United States Patent Application Publication US 2011/0014706 A2 - sequence listing, part 47

SEQ ID NO: 144663 - DNA, 548 bp, Arabidopsis thaliana landsberg
ggatggatcaagaaactctgtctgaggttgaagctattctcgagcctgtaaagaatctgacatggccaagtggaatccatcagaactaaaagaagctctttgtgtttctggtaaactcttgtcttgcttcttgtaatgcttatgcattcgttgttgtgtcattgtgttaataagagtgtaagtttggttggtatgattaataaagtttcttagatatcaaaatcagtcggaacatctttgatcgaattgattattagataaattacagcggagggtgagacttgggaagaaattacaatatgtccatttaaaaaacacaagaaaaagactaggaaaaatctccaaatctccatcacaagcaactaagttcaatagcttcttggaacctcttgtcatacgtagcgggattgccaaatagccaaagactaaacttcgaacgagcagaactttccgatgagtttctcgccggaaaaaggcatttaactatggaggctgacggttccggtgtggctgtagtctgcagagtattgtttgttgttatctgctga

SEQ ID NO: 144664 - DNA, 530 bp, Arabidopsis thaliana landsberg
atgaataggtgcagagttgtagtcgaaacttacagcatatggtctagtgtttatggtttccgtaatattataccgaatgtaaaccaggcaatgaaacagtcggtgcagtctgatctccggcatcaagtttccttactagttcgtccaatgcaacaggttagcttccttccaattcatagatagttttattacatcatgtcttggtgaagtcttattttttccactcgcattgtatcgatccaatttaaccagccaaaccagacattgcgttgtaatccagtttatgaattgaaatctgagtgatattaacccgttttctccaccaggctcttgatgctgcgttccaacactacgaatcggacttgcagagaagaaccgctaagattacatagagaacgttttgtacttggaaagaaagagattttcttcgacataaaattaaacattggactgaacatttagattttgtagtgtaatagataagattcttaaagaacttgagtgagaagcatcattagcgggatttggcc

SEQ ID NO: 144665 - DNA, 253 bp, Arabidopsis thaliana landsberg
cttctctctcttctgaagcactcaaagagtaaagtttctctgcatttcagcttctctctctcttctctctgtagaaatggcgggtcggatccaatcccaccagctaccaaatggactctacgtatcgggaaagctcgagcaaccaaaagagcgaccaccgacaatggcggctcgagctgtgccttacaccggaggcgacatcaagaaatccggcgagctcggaaggatgttcgacatctccgtcgtcgatgca

SEQ ID NO: 144666 - DNA, 712 bp, Arabidopsis thaliana landsberg
ggcatcgaatctcgattcgcttcagaaacttctcctcaagaaagcagtcttcgttgaatatagacactttctctagagcttctctcgtctccgagcaagcccgaacaatcaaggttaatcctttttcctgtgataaaatttgaaattatagagcttaattgtctgaattttgagcttcttttctttgactttgatgattgcttctgtgatttgtggattcgatctagttgatcacgatcgcactttttagtttgctttagtactactatagctcagtgtaatagtgtgattctggaattgcatttgacggtgaatttgggaacttgtagttgatcataaattttgaatcttcgattttgtgatctgttaatggtacaaatgatcaccaaatccttgaagactggacttgaggtttcactatgaaaactcccaagtgcaattatgtgtattaagtagaaattcttcatgttgtaagtaaaaaaggactgtgttacatgtttgagataagggatagtttcagattgtctcttaactctgttcaatggtttgttttaggttcttgagcaaagagtacaaacactagaaagagaactagatgctgccattacagctgctgctcatgctcggtctgagaaacgccaagctgagtcctctcaaaaggctgctgaatcacgtgcccaagaggtcacaaaagagcttgaaaacaccacaa

SEQ ID NO: 144667 - DNA, 1204 bp, Arabidopsis thaliana landsberg
ctctctctctctgttcttctatattctctctgcgaatttctaatttagtgtaagatggaggcatttgagcatatgatagtggatgagtttaacgaagaagacttctacgagacaatagaagctcccaagtttgtagacctcaccgcaccagatcatcgccctgaaggagatgatcgttactggttctgttctagagttggtcagaatcttgttcactctttttacatttcccttgttcaaaattcgaatcaaatcattactaataacattaatgttccacagatctgggaaatttgattataacattttctgaaaattgctaaattagggttttagtgaacagtgtttaattagtttatgttttgatccattttggtttcctggcgataatgtgtatttaggatgtgatcagaagcatgaggaatttatggattcggaagcaatctacaaaaaattcgttcttcgggttagcttaaagttccaaactttttttcttcttctcttccttgatttgatttcgttttaaagtgtatcattaacttaagaatttgatgttaatcaacattaataggtcatggcagctaggagtccaagtgttcgtcttcgaaaagctctttatagaaaggatttcaggtaatgaacttctaactatttgagaaatgtgtttttgaacttcgagagagattaatcactgtaatgtgtgtttaacattgcattgtgctacatactttttttttattacagtgttgatcctaaatgtcctaacacggttcctgcaaagccctcaagatcacgtgtgtctaaattggctatgatctcatcgattcctcagaagggtaatggtaatatcaggtcaaaagaagtaaaagtagtttccacaaataagaatgtgactccaaaggcaaaggcaaaaggaaaagagtcagcagtgatctcatcagttcctcagaaggcattaactgagaggaagaagcaaatgcagagtccagcagcttttagaagtgtacagaatccgagaaatgcaacaatcaaggtgtcggaaaacagagttgttgcaaaggctttagtgtttcaatctccaaagaagttggtgaaactgaagagatctgtggagcttagttcctcggtgaagaagttgtgtaatgggatgaggaagcttgagattgataacaaaagaaatggtttgggggttaatcataaggtt

SEQ ID NO: 144668 - DNA, 1200 bp, Arabidopsis thaliana landsberg
gttgatcaacaaacaaacacatcacaattctcgaacttcgccggagaatgatggaaacagctctgctccggtactgcgtcaacttttccggtcacaagaaaatctctgctcatcaaagaagtaatagtgagattccgaaaacgagtccgggaggatgcgaagacgagtggtgtgctagggttttgagtagaagatcggtaatggcgtcagggttggtctcctcgacgacggctttagcatttccaagggaaggattggctgtcgttaaacaaggtcttctcgctgggagagttcctggtctgtccgaacctgatgaagaaggttcgtttcactctgttcttgattcctcttcttcttgtcttgctcttactctgtagctttattcgtacactctttcttcttcttgagaatgttactattggatcatagattcataaatctttaggctttggacattgattcttggagttgtattatgacagtatagtagttgggaatttgttggtgtaatgtaattgtaatgctcagacaggttggagaacataccgtagaccagacgagaagtcaggagggcatggtgttggttggagtcctattatcccttacgccttttcggttcctcaagattggaatgaggttttgtcccttggctcttgtttcttcgtttctatggtttttagtcatactttgagattcttttcattgttgtatcaaatttaggtacctgtatcgatcgctgatcttggtggcaccgagattgacttgagatttgctagtcctaaagaaggccgtttgtctgttattgtagctcctgttcttagatttgcagatagtaagttgtctctgctattaaagattcatcaactttactcttttgagttatataggcaatgcaatcttgtctatttgtactcgtagattgattgatttgtgtgttccacttatacagacctcggggacgatgttaagattgaaaatattggacaaccagcgaaggtgattaacgcgtttggaccagaagttattggagaaaacgtagaagggaaggtgttaagttccaatgttgcagaacacgatggtagactctattaccaattcgagctagagccgcctcatgtaaacataactgcaacagctgccggaaaccgccataacataaacagtgtcaccggaaacggtaaggcaaaacctctcttctag

SEQ ID NO: 144669 - DNA, 1433 bp, Arabidopsis thaliana landsberg
ggactttcccattcggttggagaatccccatgttatatcctcaaatcagctatgggctggagttgtaagtactggtccatcagggtacgttcttaattctagctaccgcaatcgtgatgtcccagagtacaaacaagaacttgggaatgccataggtaagtgttttgttatttggtagttcatattggatggcctgaatgtatcattctgaatttgtgacctgtgaaccgagttctagagtatggcgagatctcaaaatcgaagagtgctatccttatagtgatcaattaattagtatgtgtttctactctgcagttaacttttctcgagtcgtgcctgaaggactgctgatatttttcccttcctattaccttatggactcttgcattacattttggaaaaatggggtatggccgttgttaattttctcttaagtatgaaaaaatgagtactctttagcttgtaaacctaccgttttttcatcattcagtgttacagaaactcaatgacagtatgggaaagaatttgcaagctcaagaaacctgtcattgaacccaaggattcctccctctttcctgcagcaatgcgggtgagcaagagatgcctctgatctacgtctcttgaataggattaatttaatcgtgtcttgtatttttgttaatggtaggacttttcagaaaaattgcaagacagagcaacttcgggtgtggtgttttttgccgtttgtcgcggtaaggtatgtattcttcaacctgtataaattttctcctgtatccatatagtatgtatgaggatgctggtataaaagataggaggtcaataagtttctctagtgtagtgtcttcagtatggctggtctctctgttgtgttgtcaggtcagcgaaggactggattttgctgacggtgctggcagagctgtcgtcattactgggttaccttatgccagggtgacagatcctagggtttgtctgctctatcctttaatgttttgttctgaatttgtatttaggctcattagcgaaatggtagcaaaaaacagttagtgaactgttttgttctttttcagagtttctttctcatttctcttcacttttatttaaactggcactggggggccacatagctttaaattttatgctgctacttgtattccagcatcattaaaccatgtgtaaaacaggttaaattgaaacgagagtttctggatgaacaatcacaacttgcagatgttaaggtgagttcaatatttatttgattattgacacatcaaggtataatatttcttacaattttgtagcttccaagatcaaccctactatctggaagcatgtggtacagtcaagaagccgcacgggctgtgaatcaagcaattggacgtgtaatccgccatcgtcatgattatggagctatcatcttttgtgatgacaggttt

SEQ ID NO: 144670 - DNA, 6347 bp, Arabidopsis thaliana landsberg
atgcaatcccacgtatctccaccaataagattttagcaaacacgagcgatcgttgtttatttgcgttcacgcgccgttaagatcacgcgcgattattaatttgggcttatttattataggcccaataatctgtagttagcccaaaacgaaagtctccggttgggtgatcggaatccgatcagagcgacggtaagtatttcttttttcttcgactgttaaaaaaaaaagaggaaatcattttcactagtgacattgttacgtttcaagagcttaagagaagttgaaagacggaggaagaagaagacgatctttcttctcttctctgtctctactagcttcgcgttttccttccttcgccgtgagattttatcgtcgtcgtaacaaacctctagggttcatcctcgacgtttccttggttaattaggtcaacaatatcgtcggatctgatggcgttatcggcttccgatttgccggcgatgtacacgctattagctaattcaatgagcggtgacgagaccgttcggcggccggcggaggcggctctatctcagtcggagagtagacctggtttctgttcttgccttatggtagcgtttctaatctatgtgtcttgtggtttctgcaaatgtcagcttgattttactcgctcatttcctctggtttggttgcaggaagtaattgcatccaaggatttggtgtcccatgtggacgttagattaatggcctcagtgtatttcaagaacagtatcaaccgtcattggaagagcagaagaaattcatggtaagttcaagttgtttccggaatcggcaattctacttataattctttttagctggctcgtttagattcttcgctctgcaaagatactaccctgtatgttaggccttgacactctttctggcaattcttacaggagtatgagcaacgaggaaaagagtcatctgaggcagaaattgttgtctcacttgagagaagagaactaccaggtgttgtagcatttacttttgatttttttccttgactacaccatttgaggcatatactttgtaagcatatctatctgactttgtttgctttattgcagatagcggaaatgttggctgttctcatatcgaagatagcccgttttgattatcctagggaatggtcagcattttcccttcttaattcatattaactggacactatcttccttgatttactgagtttatgcattgcgtgcttcatgatatcaggcctgatctcttttcggtactagcgcaacagcttcactcagctgacgttctggcttctcacagaatctttctgattctttttcgaaccttaaaggaattgtctactaaacgtctcactgcggatcagaagaccttcgctgaggtgagtctgctactaacatcaaccccttatcagtttcctttctcctcttgaatgaatttattgttggaccaaagcttcgttttttgctttagttaaggataaggtccagtttaatttgttggcagatctcgtcgcaattcttcgactttagttggcacctttggcaaactgatgtccaaacaattctacatggcttttcaacaatggttcagagctatggttcaaatagtgccgagcagcatcacgatgagctttttctgacttgtgagaggtggtttttatgtttgaaaatagtgcgccaactgataatttcaggatttctaagcgatgccaataatatacaggtagatacactatactttttcatgaatctttttagttcattatcacattcaccttcagctatctcccttctatgaacttgtggtatagtttcgccaaatatgtgttccgttccccgcactttccatttcttctgctatcttccaatggttaagttgaaatcataaccttaatagattggttgactacatcgggatagagaaatctttcttgctctccggcatatgctcttcatgcagataaaagaatatacagctaactcgtttctctcaggagatacaaccagtgaaagaagtctctcctgcgctcttgaatgcggctcaatcctttcttccatattgtgagtttttttgtgtggtggaaactctttttcatgcatatgacctgtcagcacacatatatatgtatgtattgctaacttgtgtggagcctccatgcagattcatcttttcaaaatcgagatcctaaattctgggagtttgtaaagaaggcatgtgtcaagctgatgaaggtgttaggtgctattcaaagcaggcatccattttcgtttggagataaatgtgctcttccagttgtagtggatttctgcttaaacaagataacggaccccgaacaggcattgttgccatttgaagatttttttattcagtgtatggtgatggtgaaatctgtgcttgaatgtaaagaatataagccaagtcgaactggtcgtgtgatggatgacaacggagatacatttgagcagaggaagaagaatgcttccaacacagttggtggcattgtgtcgtcacttttacccaatgaaaggatagttcttctctgcaacgtactagtgagacggtaacactcttaactaacagtaagatatgtgaattcaaatttttgggtctctcttagttaccaaactgtggccctgttatattcatattatttcatgccttagttcttattagttaatttgataatacataaatttcaataccaatgcaaaatccaaaacataatatgagctggggcaatcttgtggacacataatgatctagttgctgtacatctatgtatctctggtctcaatctcttcttgctgcgtgcatggaataaatgagaaggcaatgttactgtcggggcctagtggagctagtttgaaaattattgcatgcattaagttcatttattgtgttgtgaactgtgatggtgtcatggtcgttgtatgaatgatgcctggaagaaaagtttactgaaattaaccatcgacattccaacaggtattttgttctaacagcaagtgacctagaggagtggtaccagaaccctgagtcctttcatcatgagcaggacatgattcagtggacagagaaattgaggccttgtgctgaagctctatatatggttttgtttgagaactacagccaagtaagtagcaaatagtcttaggcacttcatcctgttctgaaaagaagtctgctaattgatatagatatcattaaacgctataactgatgcgtattccatctgtctctataattgtggacagctgctaggacctattgttgtgtccatccttcaagaagcaatgaataattgtcccccttctgttactgaaataactcctgcactgcttcttaaagatgcggcatacgctgctactgcatatgtctactatgagctctcgaattatcttaatttcagagattggtatgctcttgatcttctaatgtctgaatcttttttccatctgctctaaacatcttgacccttcattttgctagccagcagaatgtgacaaaagttttgattagtcaagtaattattgtacccttcttaatgatcggatgattggctgcaggtttaatggtgctctatcccttgaactctcaaatgaccatccaaataggcgtatcatccaccgaaaagttgctatgatattgggacattgggtttcggaggtactgctgtttacttgttttacaccggctttaccatgtttatgcagctaagcttgacaaggctttggaggaaatcacatcttatctttttttctaaaagcatcttaagattataacataatttgcaaattgacataatatcttgtccataagttgagtcaatgagggatagccatctaaaagcagaattgtttctggttatttgttacaaatggctattagggttagttaccctgttggtttgtgttctcttctctaccctagttttcgtcaattagattttggttgaaaaatggttggctaatggtaaatggttgatgattacaacctttcagattaaggatgacacaaaaagagcagtttattgtgctttgatcaaattgttgcaagacaatgacctcgctgtaaaggtagtctcatcttatctcatctttgtttcttttatctttctgtcttgcattaagggcacattctctcatttttttctttatatgtattggtgacctctgagatcatctgtttacttatgtagctggcagctagtaggtcattatgcttacatgtcgaggatgcaaatttttcggagcaaagttttcttgatcttcttccaatctgttgggattcatgtttcaaaatggtcgaggtagttcaagagtttgattcgaaggtacttgatgtagctgcctcaaattcattatagcactccattcttgccattatacttccttcgatgactcatacaacatctaactattctcaggttcaaattctgaatttgatttctactcttattggccatgttagcgaagtcattccgtacgcacaaaagttggtgcaattcttccagaaggtatactagctttctttgtggatttgtttttttgttttttcttttcttggtccgcaatttatagctgactatctatgtggttgacttaagaacaggtttgggaggaatcttctggtgaaagccttctgcagatccagcttcttgtcgcactgcgaaattttgtgattgcacttggttatcagtctcccatttgctatagcatactgctcccaatactccaaaagggcattgacataaatagccctgattcactcaaccttctggaggatagcatggcagtaagtttccatatcataacatgtatacctttcttttctgctgatacaaatgcgctatatattaataacactgctctacatatgcagttatgggaaaccacactttcctatgctcctatgatggtgccccagctattagcattgtttccctatatggtgaagatcattgaaagaagttttgatcatttacaggtgagctttttaagttttcaaggagttgtttgattcattaatgacctatacatgtgtgtgttcagatttacttcaacatgttacgtcttgagacattcaaatgaccatatataggttgctgtcagtatcatggattcgtatatcattttggatggaggagaatttctaaatatgcatgcttcaagtgtcgcaaaaattcttgatcttatcgttggaaatgtaaatgataagggtttactctcgattcttccagtgattgacatcttagttcaggtgcgtataatttcccattttcccaattggtcgtatccttattgtgatggtgtttaagttccagagatacttattcttctgttaagtttgtatctagactgcatttatttttgtattacatagcctcatctcttgggatacatatatattgaccagtaatgaaacttttggcatgattacactggaattttttgtcatgactctctataaatgtgttgcaaattacgccaagtttaacttcttgatatgaacatgtgcttgtgtattgagcagtgttttcctgtggaagcgccccctctcatcagcagctgtttgcaggtgaatttttctagtcttcttttgatggatgcaaaatccattttcttccttaatgcatctgatggagttggtttgttcgttttctcgcagaaactggtgattatttgcttgagtggtggagatgaccgtgatccatccaagactgcagttaaagtgtcttcagcagctatccttgcaaggattctggtgatgaacaccacttacctggcccagctaacatctgattcatctctttcagtgttactccaacaggcaggtgtcccagtcgaagacaatatactcctttgcctcatcgacatttggctcgacaaggtcagtgaagaacacatcttgaacattactggttgttcgaatagctttctagactattaactttcagataatggaatattaacttgtttcatgtctttacatggtctttttcttgaatcctaagcaatatctcattgtcaaactgctctacatgttgaaatgcatgtttctttttcattatctgacgcactttagtcttgcatctactcgtgcaggtggaccatgcgtctcccatgcaacaaaagacatttggcttggctctttccataatacttacacttagaatgccccaagttcttgacaagcttgatctaatactaaggtacaggtttgcacagtcgagaattaacagtttgacttatgtatctttgtgatataatttatcgcgtttctggaaacagtacatgcaccagtgtgatccttggtgaaaacaaagatttaacagaagaagaatcaag

SEQ ID NO: 144671 - DNA, 2238 bp, Arabidopsis thaliana landsberg
caccaccatcttctaatctagcgtggacttcttaccagaattcaccacattatcaaagaagaaggactgaaaggtctgaacttgcacgtaggtacttgctttcttccctagcagcagatgctacaaaccagagatctggtgatcatccaacacttcgttcgttggcccctcctgcctcttcggatgggcttgtgcttcagcctggtggtgataatagtcagaagcataatcgggcttactcgagagcaggtccgttgtttgataggcaaggggatagtgtggttggtattcctcatcctttgcgggccttggcagctgcaagcagaggaagaagcagacttatggtgtcccaggtcagtcgatacaaattctattggcatgtagcctttaacgtggatggaatttgttaactttggctcattcagttgcgcataaataccatttgtttgttcttcagcagtcactcaaatagaactaacaatacgtttctctttccgacagatgcagaatgtcttggatgtcatgcgtagggatgctaataataacaacttgcggcttgaggttagtttttcctgattgtagcgaagttatctaaattcgaacttgtcttgtgtccgtctctgttgatttctaaatgaactagcataataactggagcataaataatctgaatggttgttttccagaacgttatgcttataaatcaatcagtactgtttgatggggctactggtcatgaccggtatagagacatgcgacttgatgtggacaacatgtcatatgaggtaaattaaaaaccatagtgaaccataaatctttgtctgagtcacgttaaatcactaaatctaactccttttggttcataaactgtaggaattgttggcactagaagagcggattggagatgtttgtaccggtgtaaacgaggaaaccatatcaaaccggttaaagcaacgaaaatacaaaagcaatacaaaatctccacaagatgcagagccatgctgtgtttgtcaggtaaaaatatactagttactgaaatagcatttaaaaggtataagattgtttttcgtccgagtatgaatggtgaaaacttggtgcaggaggaatacaccgaaggagaagacatggggacactagaatgtgggcatgaattccatagccaatgcattaaagaatggctgaaacagaagaatctttgcccaatctgcaagactacaggcttgaacaccgcgaagaagcggaggatagcatgatgatttctcgaaagagctttttttttttcttaactattcaattttataatcaaaaatgaaagaacaggaaggtaccctcaagcccccacaccattgcagagccaggcaagtttgtccccaattttttttaaaaaaaagatagaatttgttcgtatttataatctgagtatgaaagatggaaagatttggattgaagggaaaagataaagggtggtagggaaatgttgtttttttcttttatggatttgtttggataatttaattttacccattgtcaattaagtttatgaatcctttgaaagaagcaggaagttgaatcagccgattttgagagaatacttactttgaaagcccatatgttgttttgagttacctagtttgctctaattggttacaaaagttttaggatgcaaaaatgttgcaattttggagaaacaaaatcaagttggatatgtgcaaatggttgtcccttaagaagcagagtaataaggtgaacaagttgagtaaaaatttagttggaagaataaaatgaatagattgagagaaataagttgtgtgttgtttaacttgttatgctcgtatgatgggactttaagaaaagagattttatggtaaatagtagaactgtacaggaatgcaaaggattacacgtacgctttgaatggtagatatgggcaaagcggactaaaacagtaacggattatagtttatgaatggtaaacgaaaatctcttcaaacaaatggatttgtctgtcctaaccatcacaaccattccggactacaatatttttctcaattttgttactctaaattagaaatgttttgcatatatactaaggagaacaaatcaaaaatcaaactctatttgaaagtcttcctagaaatagtagccctccaatatacaacaaggctacgaagagccgaaattaccaaagcaatgaccaacatattggaatttgccaatgcaacaaccagcaaatcctag

SEQ ID NO: 144672 - DNA, 257 bp, Arabidopsis thaliana landsberg
tccattatcgtgcaattaaattctctcattttcaagaaaatatctgaaaaaacagaaacttaacagaagcagcttcgatcaagagatggcttcacttacttcaatagccacgccttacccatcttcatcgcaggctttgcgtctgaaatcctccggaaacactcttttctctgccggagttcgatcggcagcaatggtttccggtcacaaaacgcttaagattcaatgcacttcaaccaaacctgccaaacctgcag

SEQ ID NO: 144673 - DNA, 424 bp, Arabidopsis thaliana landsberg
accgaaccggttaatccgaaccgaagacgttcctatataaacccaattttgagaacagagcatcatcatcacacaaaaaagatggcaccagcacgaacccgagtcaactcactcaacgtggcagtgatcggagccggagccgccggactcgtagctgcaagagagctccgccgcgagaatcacaccgtcgtcgttttcgaacgtgactcaaaagtcggaggtctctgggtatacacacctaacagcgaaccagacccgcttagcctcgatccaaaccgaaccatcgtccattcaagcgtctatgattctctccgaaccaatctcccacgagagtgcatgggttacagagacttccccttcgtgcctcgacctgaagatgacgaatcaagagactcgagaaggtaccctagtcacagagaagttc

SEQ ID NO: 144674 - DNA, 1265 bp, Arabidopsis thaliana landsberg
aagtgtgatcctttcgcagcagagcttttccgcgttgagtcagaatctagacaagttcctgtgctctgcaactccacagtttcttctagtaaatcaacacaatcgctagccgacattgatttctgtgccacattttggaatgaatgccagagtctctctgtaaccaacactccgtttgcatctcaagctggagatggaggcaacatcacttccacaatatctgaaatatggaaatcaagtaatgacttctgcaagatttttggtggagcttcagatgaatcctctgtgtgcttcaatggtcaggaagtttcatttaacgtttcaaaagtaactggtccatcatctccttcaggcatatgcatcgagaagattggaaatgggtcttatcttaacatggtacctcatcctgatggttctaatcgtgtctttctgtctgatcaacccgggaagatatacttggtgacagttccagctcaaggatcaggagaacttttgaaaatagatgaaactaacccgtttcttgatcttactgaagaagtgcactttgatgctgagcttggtctcctgggaatagctttccatcctgacttcttgaaaaacggaagattctttgcttctttcaactgcgatagagttaagtggcccgaatgttctggaaaatgcgcgtgcaactcagatattgactgtgaccctgcaaagctagattctgataatggagcaactccatgtcaataccatagtgtcatatcagaattctttaccaatggtattttaaacaatctcacctttgtatgtatttttcttttgtagtggatgttgctgagacattattgatatgtttcagggacgtatgttagaccggtggaggtaagaagaatctttacaatgggtcttcctttttcatcgcatcacggtggacagatcttgttcggacctaaagatgggtacttgtatttcatgatgggagatggaggaagtaaaggagacccatacaactttgcacagaacaagaaatcattgcttgggaagatcatgagacttgatgttaataatgttcttggtaatatgttttttctatacagctgaagcatactttacaatgaacatgagatttgattttggttcttctttcagatgcaaaagcgatgaatgagtttcagctatggggaaactattctataccaaaggacaatccgttttctcaagataagaatctgctgcctgaaatatgggccatgggagtaagaaatccatggcgatgcagt

SEQ ID NO: 144675 - DNA, 1010 bp, Arabidopsis thaliana landsberg
tctcaccttgatatttttcagagagggagagatgatttccgatcgttgctatgccgtccggatttcttcgtcaaggccgtccggtttgttaaccggcttcagcccgacatccatatgcctcttgtgatgtggttggtcggttactttcccggaatcatctggctcctttagcaaaattgtccggtgtcgccgtcctccatcggttggttcctctaccaacggtggttggctcttgtctagcttctccgtcgtccctctccggcggtttaggctagcttttggccggatttcttttccggttttgttttatgttctcgttttctatagatccagtttgattttgctcctttgtgttctaactcttagagggctcaattccttgaacctcctttgtttaaagggctcaatttgtttttcaagcttatcgatttcaattatataagaacaaattagagttgtggattggggttttctctaatgcctttgagttgggttttatgcaattgagtcaattgtcatattggtttttggaaacgagtgtttttattttacttttaggtgttcatggaagtttcattggcttaagttctacgctgatgtcgtttgaagatgatgatatgactacccaggggagattttcctttgcgaattcgaagatgaagaagattgatgggattctctgaattttgtgttgctccatcggacaagcttgaagtcttggtggttcctggtggttttggagttccctgcaatgactaaccaaatcggcggtggccgtgataacaaatgtttcttctgcccacgtgcttcaacctcgcttgataacttacatgtggttttgcggtggactacatcaattacttcctaaaagggtttcttgcttcaactgggctttaatttagttggacttttatctttattttgtttttgtctggagactgaaagcggaggtttccactcttttgtaatctttacaatctttggtttaaataagagacaacacttatgag

SEQ ID NO: 144676 - DNA, 724 bp, Arabidopsis thaliana landsberg
atgtctcttctccggcgacgattcgtgaaacaatcagttaattgcataacattccttcaaatcctcgccgagcgatccttctccaccgtgaagattcctccaggtcgtcgcaaaaccaccgaattcgacaaacttatcaacgaagctggcagctccggcgatttcgagaccgtacgccgtctcctaaacaaccgtatagttctcggatctttcaacacgagcgacacattcaaattcctcaccaacaccgcttcatactcctcctatttagaagatctccgccgcgttttgcctcagatcgacggcggtttctcgcggaaaaacgcttacgacattttaatctctcgtctctgtaagctcggacgcatcgacgacgctttaatcgttatcggagacatgtctaacgggagattaggcttaacgccgtcgacatatcacccgatcttgtgctcgctcacgaggaagtacaaaatcgaagaagcttggagagttgttgaatcgatgagatccaaatcggtttcgatggatgtgacggcgtacaattacttccttacttcgcattgttacgacggcgaattggaatcggctagcgaggtgatgcgtaagattgaagaagacgggaattcgccggattcgcgtagctacgacgcgcttgtgctcggcgcgtgtagggcggggaaagtggaagcggcgatggcaatattgaggaggatggaggaggatg

SEQ ID NO: 144677 - DNA, 1424 bp, Arabidopsis thaliana landsberg
caaacgctggaaaggagaagttggtcccaaaacagtttatattctctctggagagaagctttctgttttcgagggtggcgtggtataatctcacatttttttttatccttttgaaaacatcaaattcaagctctttggtcatgaggttggggtaggattacgataagctttgaataagcagtacagctctactcttagctataggtctactgtatctagcctaggactgaatgtagtagattagagctgttgtgagttggtttatagaacagttactgaaggctgaggtaataataatgtctcagcagattgtcttgggggtggaaattttgttgtttgattctctgatttggtcagttggaattagaatagcagttcatagctttgttttaatcagattattctctcctcgtgctgtaccagaaatataggaacgagggacgcgacacaatcattttggctggtgctgaatacggtagtggaagttctcgtgattgggctgccaagggtccaatgcttctggtacattttctgtatttaacaaacacgttcttacacttattttatgcggtttctttaaaaaattgtgacaacagggtgtgaaagctgtgatttcaaagagcttcgagcgaattcaccgaagcaatttggtgggaatgggaatcatacctttgtgcttcaaggcgggagaagatgctgagacccttggcctaacgggtcaggagctttacaccattgagctcccaaacaatgttagtgagatcaaaccaggacaagatgtaacagtcgtcacaaacaatggcaaatctttcacatgtacactccgatttgacacagaggtaagttatctctagatgatatattttcgtcttttcgtctttgagttttttttttagctctaaaacaaaatgagatgagataagtaagaggaatttggaatcgacaggtggagttggcttatttcgatcacggagggattttgcaatacgttatcaggaacttgatcaaacaataaatctggtaacaccagagacttgagttatatatcccaaggtttgttgcaataaaaatgtttgcagggaggaggacgagaatgactttaatttaaacttttgcttttgttcttcttcgtctcttgcttcgtgctagtcaattggaaacattatcactgtcgagtcattttttttctttcaaataaacatgcgagctctttttttgttgttgttgttcataagcattgtcaatgctgcattgatagaagtatactctaccattagaaaataaacacaaatacacaaagtaatctaaagagctagaggatgaaaattatcttgtgaaggttgtacaaaaacattaaaaaaaatctgagatgatccaaaggattgattatcacattcgaagtgatggtcagagattacctcttg

SEQ ID NO: 144678 - DNA, 4336 bp, Arabidopsis thaliana landsberg
ggtggaagcagattttgtagaaaaatggatggtagtatgaatttggggaatgagccaccaggagatggtggtggaggtggagggttgactagacaaggttcgatatactcgttgacgtttgatgagtttcagagcagtgtagggaaagattttgggtcaatgaacatggatgagttgttaaagaatatatggagtgctgaagaaacacaagccatggctagtggtgtggttccagttcttggtggaggtcaagagggtttgcagctgcagaggcaaggctcgttgactctgcctcgaacgcttagtcagaagacggttgatcaagtttggaaagatctatccaaagttggaagtagtggagtagggggaagtaacttgtctcaggtggctcaggctcagagtcagagtcagagtcagaggcagcaaacattaggtgaagtaactttggaggagtttttggttcgtgctggtgttgtgagagaggaagctcaggttgctgcaagagctcagattgctgagaacaataaaggcggttactttggtaatgatgccaacacaggtttctctgtcgagtttcagcagccttctccacgagttgttgccgctggtgtaatgggaaatcttggtgcagagactgcaaattctttgcaggttcaaggttctagtttgcctctgaatgtgaatggagctagaacaacataccagcaatcgcaacagcaacagccaatcatgcctaagcagcctggttttggttatggaacacaaatgggtcagcttaatagtcctgggataagaggtggtggtcttgtgggacttggagatcagtctttaacgaacaatgtgggctttgtccaaggtgcttctgctgcaattcctggagctttaggcgttggtgctgtgtcgcctgttacgccattgtcatcagaagggatagggaagagtaatggtgattcttcatcactctctccgtctccttacatgtttaatggtggtatgagaggtagaaagagtggcactgtggagaaagttgtagagagaaggcaaaggagaatgataaagaaccgagaatcagctgcaaggtcccgggccaggaaacaggttaatctcttcatcaccatctatctatgtactcttgattgtgttataagccaaaagatatgtaaagtaaattggttagcttatcttgtagttaagttctttaaccacaatgaagcgttgaattcaaagcgtaaagtgtcttgtgtgaagtagtgtagtaaacaactaaacagaattattgggacttgaaatcagtacttgtggctgaatgaatctcgcaaacaaatatgaaccttctggttttggtgtatatacatgttgcccatccgcagatattcacggcagaccaaacaatatactggaatgtaatttgctaatgtcatgaggtggctcagagtttaactgagtagtgagggttcatcgtcaaaacctgagtagtggcgacatggtttttcttttggggcaaggtaatgggtaattggtgctcccaaaaacctgttacatctgacatgtactatgaccaaactgttgagttctccatttgagggtctaaatgttttgaatggcactctagtctttatctcataagcttctcagtcgtgcttgttttggttcataggcttacaccgtggagcttgaagctgaagttgcaaagttaaaggaagagaatgacgagttacaacgaaagcaggtaatcacaaaaccatgtctcagcatcacagttgctcatacgttacattcatttctcattgtacgcctcatgttttacaggcaaggatcatggaaatgcaaaagaatcaggtaataattcttatgccaatgcaacaacactggaatctctaaactgcacatttcatagctgaacttgtaaacttggttgtttgtttccgtgctatgtataaaacaggagacggagatgaggaatcttctgcaaggaggtccaaagaaaaagctgaggaggacagagtctggaccttggtgaatcaatcaatgccatcatacttagtttctgtagataaatgacatcccacttaggtgttttagttgaattagacttaatagagaagagctttcatcgtttatattgtaagctctctccatatatgttatgttttatacatacacaggatcatcagaatctcttttgctttatttagacaaagaattttgtgtgtgtttctcgttgttgtttgtcgttgtcgctattaaacctcaaaatgtactttcttgatcttggagttaccaattttgaagaattgaagtgttgtttggtttctctgagtgccaaaactatgacctgtgccaacacagcattctagccttctaggcaagcgactataacccaaaccgaaccgaaccttggtcatttcggacggatcaggtaaccgagtcggtttgatgtggttcactgaaccgacagttacacaaagtaaacatttgtactgaaatttatgtatgtatcaaagtaaaattcctctaaattcgataaccaaaccaaacgggattaatcatttgcatagagaataaatacataaccgaaccaatttaaccgatgaccgaagcgaaccaaaaccgacttattcggtttgattttttagttactaaaactgaaagtgttcactctcattctctcccacttcgtcgctcaaattctccctaatttcacctgcaaaaccctagtttttcgttgattcgtttcgtctccggtgtaaaatcaaatactatctttaggtatttcgtcttacccaactctatctttccatgttttccgaggacaaaataaaaggttaattattcatgactaacgtctgtaatgggttttattgtgatgtatgtttgaaatttggaacatttcgatatagcattgtgttactaatgcttttgaatttgttagaaacgagcagtaaaattggttttttcttcatcttttttttcaaaaatttggacttctctgtggaaatttctgggttttctcaatgttagtgaacaaatttccttattttattgtcttcttcttatagtgtttcaagattttttgtttttctttttgttgcataggtttgaaaactgatcactcttgtgtaacctttgtttgtttgattttgaatccaaagactggaaggtgatatttttctcctccaaattcttcagaaacgatcagagaagatagaaatggctcccaaaggtcccaaaggaagaaaaaatgtaagctttcttgctagcatagacgattgaacactacagatcagtgtggttcgggacttgggtttcatacttaagtaagctttactgttacgtagaggattaaacagaagtgtggtggaggtttaggagaatagaagatccactaggtttcatacttaggtttctggtttgcttcgtttgttcttgaattttcgcttgtttcagttgattctcaatgagaaatagatatctgtttgataagtttgtttttcttcaactatgattttctcgcctttagagggtattaaattgctactttcttcttcttgttttgcaagcagattggattgaggcgtgaggatgcagcacgagaccgcatgaaagagtttgggtttaagaagcctgttatcaatgcgagtatcaagcaagtgctaaaggtttgttcgttagttttagagttctctatctgcccttgctagaaaaaaactttacttcaaacttcaaaagtgacactttactcaatttggatttcaggtgtatggtgaggaccaatggtttctgattgaagatgctaactatgaggtctccttaatatttcccttaaaaagcaagaggaacaagcctaccgattggcggccgaggaacacgaagaaacagctcaggaagaaccagaagaagaaaaggtgatttgttcatcttggttacaaatttgtttcttttcatttttggtattagttttgcttgaacgatcagtggtttcttgaacctatatgcgttattgatcactaacgaagcagtcatggactcatcaccatcagcttttcaattcgtagaagcaccaccagtagattatgcacaccattctgttggaggtatactaatctccataacaatctcaatgcatgaatcattctttaactgaggtcaaaatcattctgtaggtgcgcagagttctcactgtggatggctaagcagtgaggaggagacagatccagataaggatagtgatgagatgattcagctaactccagaacctctctgtgaagaacttgaagagattctcagagaagtatatggacagaagaagttgaagtacaactaaagtagtcataag

SEQ ID NO: 144679 - DNA, 295 bp, Arabidopsis thaliana landsberg
atgtatttttgttgattctgatgtttcgatttttgtttttgttttgacagctatgggtaaagagaagtttcacattaacattgtggtcattggtcatgttgattctggaaaatcgaccacaactggtcacttgatctataagcttggtggtattgacaagcgtgtcatcgagaggttcgagaaggaggctgctgagatgaacaagaggtccttcaagtacgcatgggtgttggacaaacttaaggccgagcgtgagcgtggtattaccatcgatattgctctatggaagttcgag

SEQ ID NO: 144680 - DNA, 1211 bp, Arabidopsis thaliana landsberg
atgttgtttgtgcttgatgatgaattcgatgcagtggatcatctagtgaatacagcgagtcttggacacactttttactttgaggaagtgagtgacacgactgtgtttccgcatttgctggtatgtgtatcttcggggtttgtattgtgatttgatcacatttcaatggcaacgatactaaagtttgagattcttgagtaggacataaacttctgggggaatgtttatccgacatacgtagcgttgccataccttcaccagacgaatggccggatagttgtgaatgcatcggttgaaaactggttgcctctaccacggatgagtctttattctgttagtacttcaaatgttcaccgctccttctttcttctatctcgtaagagcttacgtaaggttaattatcattgtgtaggctgcaaaagcagcattagtcaacttctatgagacgctgcgtttcgagctaaatggagacgttggtataactatcgcgactcacgggtggattggcagtgagatgagtggaggaaagttcatgctagaagaaggtgctgagatgcaatggaaggaagagagagaagtaaaacttttacaaccataaatatgattgcattaacttaaaaatcccaaagacttacttacattatctgtaggtacctgcaaatggtggaccgctagaggaatttgcaaagatgattgtggcaggagcttgtaggggagatgcatatgtgaagttcccaaactggtacgatgtctttctcctctatcgagtcttcacaccgaatgtactgagatggacattcaagttgttactgtctactgagggtacacgtagaagctcccttgttggggtcgggtcaggtatgcctgtggatgaatcctcttcacaaatgaaacttatgcttgaaggaggaccacctcgagttcctgcaagcccacctaggtataccgcaagcccacctcattataccgcaagcccaccacggtatcctgcaagcccacctcggtatcctgcgagcccacctcggttttcacagtttaatatccaagagttgtaataaaaactggatggaggaacaagaggtgaggtcggtttggtgtgtagagtgtagagtgaacttgagctttagaactttctctgactaagtgaaccacaaaaaaagaaaagcaatgtaaaggacatcaagtcaagaataataccggatgatacagcc

SEQ ID NO: 144681 - DNA, 848 bp, Arabidopsis thaliana landsberg
cacatacataaaagtagtagaactaaaaaatggcaaacctcttggtctctactttcatattttccgcacttttgctcatctccaccgcaacagccgccacattcgaaatcctaaaccaatgtagttacaccgtgtgggctgccgcaagccctggaggtggccgacgtctagatgctggccaatcatggaggctagatgtcgcggcgggcactaaaatggcacggatttggggtaggaccaattgtaactttgactcctcaggtcgtggccgatgccaaactggtgactgcagtggtggactccaatgtactggttggggacagccaccaaacacgttggctgagtacgctttgaaccaattcaacaacttagacttctacgatatctcacttgtcgatggatttaacatacctatggagtttaggtaagaatatcaccattatcgtttcacaagttctacttagtttttgctttattcataaattcgaactcctaaacgtaaaaatctcttgacatttaacataatatacaagcgttaaaatcattttttctgctatgcaagaaaaaaaagataataaaaaaagagaacaattatatttcatatttctaaacgttttatgttcttagacgactcgataatgatttgcctttctttttttggcgtgctatctccagtccaactagttcgaactgccatcggatactatgtaccgcagacataaacggacaatgtccaaacgtgttgagagccccaggtggatgcaacaacccgtgtactgtatttcagacgaaccaatactggtgtacgaacggtcagggatcatgtagcgatactgagtattcaagat

SEQ ID NO: 144682 - DNA, 576 bp, Arabidopsis thaliana landsberg
atggccaagaatgaggaaggaagtagtagtccgagctggggtgcttcgtttttcatgcagacttcagaagatgttgcaatggcttttgctgctgcggcttctgcgataaacccgccaaggccgtctgttgtcttttcgtcgaaagatgaaggtagcgatagtcctttggagaggttacagaggcaggtttcgaaagcggttaagaacttctatgaaactcctaagaccaagagtgtattgtacaatcctgaggttttgactagccaaaagcgtcaatgggcgaaatttcaggtgcaatatttggtctgtgtttaagaatgaagaatcaactacgtttcgatgttactatagacacttttgtcactaacttatatcaaacaggatcataaaccattaaaagatccatcaaggctttttgaaagcgttgttgtggttggacttcatcctaattgtgatattcaagcacttgagaggcagtacattgctcgaaaatctgaaggctcttcgggaagattgcgaagtgctcttgtctctcaaaatcattcccgtgtagaacccagtctcgaaccacaggtg

SEQ ID NO: 144683 - DNA, 1810 bp, Arabidopsis thaliana landsberg
  unsure (1)..(1810): unsure at all n locations
gtcttcatttccctctctctttcaagtccttgtatttaagaaagccatgaatccgattatctatttctaaccctgggccgaccagaaaactttttggacgacccaaacttcaagggttctaataaattcatcaccggaaaaagatacatataaaataaaaatctctcaccactgctgattcaaatggtgaatcttgggagctacgttttcgtctttgtcgcgttgtctctcaccgtggtggttccatcggttcaagcccacatcgccgaatatgatgaatactggacgcagcgtcaaaccaacgcattgcgagaaactttggaatcttatgacccgaacccagagaacgtcacggaccactttaactaccatgccgccttgtgggttctctaaaatttaacctagttagggtttttgatttgttatcaaaacctaacttcttccggaagaaactaatgttttcttgttttctttctcagagctatggagacgacagggatagtaaacgaaacaaggagggatctccgtcaggtcggacgcggtaagaaaaaaactagacgtggaggaaggtttgaatccctaaacgcgatcgataaatgctggcgaggcgacaaaaactgggacaaaaacaggaaaaaactagcagattgtgtncttgtatttgtcctgaaaacaaccggaggcaaaaacggaccgatctatgtagtcactgacccatccgacaacgatctactaaaaccaaaaccagggactataaggcacgccgtgacaagggaccgaccactctggatcatcttcgcgagaagcatgatcataaaactgcaacaagaactgatcataacgaatgataaaacaatcgacggtcggggagcgaaaatttatatcactgggggtgcaggtttaacgttgcagttcgtcaggaatgtgataatacataatattcatatcaaacagattaaaaggggagctggtgggttgattatagactccgagcaacattttgggcttcggacagtgagtgatggcgatgggattaatatttttggagcaacgaatgtttggatcgatcatgtctcaatgacggattgttctgatgggatgattgatgcgatcatgggatcgactgcaattactatctccaattcccattttaccgaccacgacgaggtaaataaggctacaaataaatcatagaagtatctgtggtccaaacaatacacactggatacaaacttcgaatgcagaaactattgaggtctaaggtctctcttaatgcaggtgatgctatttgggggtacaaacaaggatgtgatcgacaagaaaatgcagataacagttgcgtttaaccattttggtaagagattgaagcaaagaatgcctagagtcagatttggtttggtccatgttgtgaacaatgactacactcactgggaaatgtatgcaattggtggaaacatgaaccctaccattataagtcaaggcaatcgtttcattgctcctcctattgaagattccaagcaggtaaaaactacgaaaactttctctaatcaacaaatcactacagctacacttgagagacataattgagagaaatttggaatgcaggttacaaagagagagtacacaccttatcctgaatggaaatcatggaactggcaatcagagaaagattatttcttgaatggagcttactttgtgcaatcaggaaaggcgaacgcgtggagcgcaaccccaaaaaatccaatccctagaaagtttgcaatccggccacagccaggaacaaaggtcagaagacttaccaaggatgctg

SEQ ID NO: 144684 - DNA, 461 bp, Arabidopsis thaliana landsberg
agcgatcagagctataatcttctctcagaaggaagctaaatcgttgggaaaagatatggtttacacgcagcatcttctcttaggtttgatcgctgaggatcgtgatcctcaaggcttccttggatccggtatcaccatcgacaaggctcgtgaagctgtttggagtatttgggacgaagctaattccgattcgaaacaggaggaagcttcttctacttcgtattcaaaatcgacggacatgcctttctctatcagcacgaaacgagtctttgaagctgcggttgagtactctaggactatggattgtcaatatatcgcaccggagcatatagccgttggactcttcaccgttgatgatggtagcgccggcagagttctcaagaggtatagctcacctcgaattgttgcagttccatagataattgactcatctaatatttgtaatttgatgaatattttct

SEQ ID NO: 144685 - DNA, 547 bp, Arabidopsis thaliana landsberg
cacatctgagagcttttttcgtttcttgtgagatcatctaaaaaatggttcgactgtttcgctttctttactcagcggcggcagtggagctcttcaggcgcgttgcgcaagaaccgcgcatgttagcccacgagcggcgcattctaacaaacccgcgctttcttcgttctcgctgaccggcgcctctcgcaggaatctgttattttcgttgacggcagcgacggtagtgacgggacttcagcctgcatcaatggcggagaatattccgttatttggtataagaaagaaactgaagaaagcagaagaagaagcggtggagatcgtgaaagaaggctttgagacggcggagaaaggcgttgatgcggcggagaaaggattagaagcggcggagagaggtgtagagacggcagagaaggaaatcgtgacggcggttagctttaatggattgacacaagctggagccgtcgtggcggctgagttcgtcggagttcttgtcgctacgtcagtagtgaatgggattttaggaccagaagcccagaaatcttag

SEQ ID NO: 144686 - DNA, 2175 bp, Arabidopsis thaliana landsberg
tacgaacgaagaatggagagcgactccgagatggtagcgttgcctctgttaccgactccgatagaatcgaactacagggcttgcaccattccttatcgattcccttctgataatcctagaaaggctactcccactgagatctcctggatcgatctcttctccaattccatcccttctttcaagtttgcatctctctctcgtgattctgttttgcattttatgttcaagctttgatttttgtgatctaggaagctcatatacctttgaaattactcggattttggattttatccgtcaattcgatcaatctgttctattttggttttacgattgttgtgacttttcatgaatttgggctttgtgacatcatgaagaaactctgattgtttattgacgtttataggaaacaatagaaattctgatccaaccaatttaaaaattcaaactttcagtgttctaaagttgttttgtttgattttttttgcagggaacgtgcagagagcgatacaaccgttccagatgctcctgttcgagctgaaaagtttgccaaaaggtatcttcttttttttttgtgttctcacatgtgtgttcatagttgcttaaaagaggcgctcattcgctcaaaagatcaattttggtttgatttctcgcaggtatgcgaagattcttgagcacctgaagaaagatccggagagccatggtggtccactggattgcattgtaagtatagtttcctcttgtaaagtaaatgcttgtagagagctttgttgttcatgcatttatttttgcagcttctctgcagaattcgtgagctgatactaagagaattgggatttagggacatatttaagaaagttaaggtgtggttttcctcacaaggattttctcaaaaagcattatattctcttgcactctttgctgatcgaaagagttcatttaggatgaggagaatgcaaaggcaatatcactatttcctgaagttgtccgtttgagtgatgctattatcgatgaaggcaagcgcatagagaatctggtcagagggatatttgctggcaacatctttgatctgggttctgcacaggtatatgtcatatctttcttttcatgatactcttctctgttttgttgagtatcttaatgagtggatcttatgtttctttattcacatattgaagcttgctgaggttttctcaaaagccggcatgtccttttaggctagctgtcagaacttggtttcccgaccatgggtcattgatgacttggataactttcaagctagatggctcaagaagccttggaagaaggtcacttctttaacttctctctgttttgtcctaactatgctttatcatgacttcaggagttttatcgcaggacacactgatttgttttatttctctctttttcatgccaggctgtgatatttgtcgataattctggtgcagacataattttgggtatcttgccctttgctagagaaatgctacgtctaggaatgcaggtgcttcctcagttttttttttttatgcacaactatggacattttgttctctggtttggctttttgattgtgagaagttgtttattatgtatatttctaagttgttcctcattgcaccttcccttttgaaggttgtactggctgctaatgagcttccgtctatcaacgatgtaacttatatcgagcttgcagagatcttgtctaaggtgatgaatagagtcatttgggtactctcgtccattacagattaaagaaactcgaccctgactgagtcttaatttaccagctgaaggatgaaaatggacaattgatgggtgttgatacctcaaatcttcttattgcaaattcagggaatgacttaccggtatgttattcaaaagctcgcacaagaagattgaacttcaagttatcactaattcctgtaaaaaatttcttatcctttctatcccgttgcaggttattgatcttgcaagagtatcacaggaggttgcgtacctctcaagcgatgcagacttggtcatcttagaaggcatggtaagaccttttaatcgcgtgaagttggtgaacaatgtgttatctagtcttaggtatcaacaaactgactccttgactgtcctgtacaggcccgtgaattaaaacaaacctttatgctcagttcaagtgtgattccctca

SEQ ID NO: 144687 - DNA, 555 bp, Arabidopsis thaliana landsberg
gactgcaagactcgttccaatcttcttagacccaggaccaaccgagaagaagccaaacagcaccaccaccaagaaagacaacaagaaaaaccgaaacggtttgtgtctagagatcacaggaagggtgcaacatgacagaagtgaactcaaatacttacaagccgatccaaaatcggacggtaaatcttggccatcaggaaacgatggacttcatgtagaagatggtggtgaatgttccttagattacgactaaatatttttcagtaaccaaacccggttcaatgttttcggtttaccgaacctgatactatttgttcagtttaaaagtcaacaacttttctcttgttgagtccacgtcggatggttttttgatacgccgtcggtcaagaatcacgtgtttggaactttgggtctctcatgtgattacgtggcgttatgtaattgggtaatgttaaattctcttcggttttattaagataagattattcgtctccacgtgttacgtgttcccagctatcaaatcgttttcttagagcactatgtattttttatttt

SEQ ID NO: 144688 - DNA, 1190 bp, Arabidopsis thaliana landsberg
tggtttcgatcttctctttttcatcatcaatcgatcaaaacagacagcaacagcaaaattatctttctgcagatcgaaaccctaattggtttctccgttctccttttgttcttctagaatcggcgactcttacttttttttctttctaattatccttttctgatggattctggaatccatgtaattccccattagcgctaaaaaccctagctgtcgaagaccttagattactgcagaaatgttataatctgttttcatcttttcccgatttgaggtttttatttattttggttgggtgagagaatccgatacgagagattaaagccttgtgagtttaggatgagctagttttctttggctttgagctgtaatttctcttctctgaaatctttcactgtacatatagctagatcctgatgaagttgcgtggtggtgaatcgtggtttaagttttgctagttgagatattattggtggttactgtaatatcgaagaatcatatttcacggtatttactatagacaactactgtagagttacttgattaaggcgttaagaagagatactggtgttttttggcctcaatcagctaagatttttgtgcattgtatgatgagtatagcaaatgaacaacaatttgccatggatcaacttgtcgaaaccaatgatgattcggaaaagtatgttttttctgttttttgtaaaatccatgtctctgttttgctgcttattgtacatttctcagctgcagttgcaattgttttcaggaaaccaagaattacatacacgaggaagtttcttatatccttgagcgagaaagacgtttgcaagaagctgccaaatctgcctggtgaatttgatgaagcactgttgctgtgagactctatccgatagttttttttttagtttggatttctagaaactgtgtaaatgtgtttgatcatgttggagtgacatgtcttgatttgtacactctttatttgagtagtgacttcgaagatccttcacccgagcgagcaagaatttcaggcgatttttcgtcgcatggtttcaggcggaatgactatagttcatcgcctcccaccaggggggaattaggtactaactctcgaggcacccatggaagatgggaagggcgctctggtggatggaatgataaagatagtgattcacagtcagaccgggactcag

SEQ ID NO: 144689 - DNA, 2799 bp, Arabidopsis thaliana landsberg
  unsure (1)..(2799): unsure at all n locations
atggttgtaagtacttccctagcctgatcattgcagtaaaagattaccgaagatttatacaaagatgaacaacatataaaaatgttaaaaatcacactgttactctaaaattctaattggaagtttatgttgtattgtacgaactacaagctactaaattctatgatgctgtttctttttgcgtggaacacaattttcaattctagttctatttcaatatttgtagatcaagggtagattgaaattgatcatggtcgtaaaacatgtttagtgttccattgaattggtctaatcttatttcttcctcacaacgtcacgtaacaaccatcaactaaaatgtctattttaagctaaatgttaatcataaagtattaaattaaaaataaaaagacagaaaaacgtggtaagaaagaaggaagagcgccaaagtctgagctaaatctatggtggtttcaagcattcctaaaatggcaatcttctcacaaaaaaatattatctcaccactgaaccattcttacaattcctcatatcattattccaaactgaaaaacttcccaagattttttgtgtgtagatatgttttgatagattgaagataagtttaaatgattttggatgagacttgaagcggatcaagctagagaaaggaatcgacgacaaatgaatctatgaagacaggtgaattacaacacttgatgcttcttgagtttatccgacgttcttctctcgggtttctcagatggaatggcagatcctgctagttgttatatctatcacgagcgtgacgtcgaccaagtttgttttccttctatcttagtactatattggagatccttttcagccataagaaatgaaataagagaacaaattttatgttttttattttattttattttattttattttatgttcaatgatattactttcacatttaccacatattataattcacttttttcattttgttgtaggcacttgtcgtattgaaaaagggaactcaattactcaagtatagtcggaaagggaaacctaaattccgcgcattcaggctttctccggtatgcgatgtttttcgatgtctcgtttatatatgttatacaaactatacatatgttttgtgctagtatgttctccatatatcgtgcttactattacattgcgctcatagtatatgatgacactccatgtttattaatataggatgaaaaaacgttgatttggttctcgcgtggagaagaaaaaggtttgaagttatttgaagtttctcgtattgtcccgggacaaagaactgtgagtttaaccgaatcttttacttaaaagcaagttctttttttcggtttctaaccatttttcatgaataggctgtttttaagagatttctacgtccagagaaagatcacttatcattttcacttctatataacaacagagaaaggtcacttgatctggttagtaaagagaacatttcaacttagattgtaaaattgaacattcacttattacatatgttctttttttcttttctttttgaacagatttgtaaggacaaagctgagacagaggtgtggtttgctgcccttaaatttttgattgaaaaaagtcgtaatcgacgcgccagaagtgaaatccctgaggtatgttttcttcataatttctatacattatgttatatatcttatatgtagtcaaatttataatgcattgattcatttttgttattcagatacatgatagtgacactttctctgttggtcgtcaatctatagactttgtcccaagcaatattccacgaggtagaacatcaattgacttaggctatcagaacaattcagatgtgggatatgaacgtggaaacatgttaagaccaagtacagatggttttcggatcagtgtctcaagcacaccaagttgttcaagtggaggatctggtccggatgatattgaatcattaggtgatgtttacgtttggggtgaagtttggactgaagggatattaccagacggaactgctagcaatgaaactgtgaaaacagatgtactaactccaagacctttggaatcaaatgttgttctcgatgttcaccagattgtttgcggtgtaaggcacgttgcgcttgtgacaagacaaggagaggtttttacttggggagaagaagttggaggaaggcttggacatggtatacaagtagatattagtcgtccaaaactcgttgagtttcttgctctaaccaacatagactttgttgcatgtggagaatatcatacttgtgttgtatctacctgtggtgacttgttttcatggggagatggaatccataatgttgggctattaggacatggtagtgatataagccattggatacctaaaagagtctctggtcctttagaaggtcttcaagtactctcagttgcttgtggaacatggcattcagctttagctactgcgaacgggaagctattcacgtttggtgatggagcgtttggcgttttaggtcatggaaacagagaaagtgtttcatatcctaaggaagtacaatcattaaacggtttgaaaacggtgaaagtagcttgtagtatttggcataccgcggcgattgtcgaggttatgggtcaaaccgctacgagtatgtcatctaggaagttgtttacttggggtgatggtgacaaaaacaggttgggacacggaaacaaagagacttacttgcttccaacttgtgtatcttctcttattgactacaactttcataagattgcttgtgggcatacatttaccgtcgcactcacaacttncnggacatg

SEQ ID NO: 144690 - DNA, 399 bp, Arabidopsis thaliana landsberg
ctgtatgcgaaagcggctgcccgtaaccctcagtgcacatttgtggagtttccaagtgggatgcatatggatacatggctgtctggtggtgaagtttactggaaaacaaacttgcaatttctcgaaaagtatgcgcctgagaaaaggaaagaagatacaggtaagatgatctaccaagtataagtaacaattttgttttacagagatgtttcttgggatgtttttcccaaagtagaatactaggcttgacgttggtctctaatctgatgacaggaaggtaacgatcaacgatgctgtgtttagaggacgattcgactcacttatttaactattgcaacaagaaacgacggtattgtttgttataagcatgtgtatacgtatgttgcatttgggattgac

SEQ ID NO: 144691 - DNA, 1246 bp, Arabidopsis thaliana landsberg
aaaacgaaaccaccccagaaaactacatcaatcgcttcaaatcaacaataggagaagaaaagtttcaacctttgttcttaaaggatgttgttgaagctgtgacaagtaccgttgcagagtcgtcttcttcggtggtgaagatcccatttttttggattcttctcttcgatactctctctagtgttttgtcatttgtgtcttaagcaatttgaccaaattcctacctacaaaacaaaaccgaaccggtttaatcaaaccaatataaaccgagccggtttagatgtaattaagactcgttctacgaggatggcgggtaaaattggaaggctagctttacggttagaccaaaaaccgtcacaggagaatctatcaaagcctaattggtctttggtcaataattctctctttggtcaattcaattccttaaattttcttgttttgttttatgcctatcatcttaaacctatatataacgccacacataacatttctctcttcattcatcaaacacaatcacaaatctcctgagagatattaagaaaccaacataaccaaaaaacctatcaataatggcttcattgcaggtatcaagattagttctttcgtcatcttcttctagtacaagacctaaagcagcagtttcaatccccaagctacccaaatttcacgtctcggttccgaaaataccgactttatcggttaaagaaccgagctttgagtttgtagagagtcttcctctttcgttgaaacaaaagagaggctctgattctatccaaagagctcgtctcaatgcggttcttgaagaagttatggataggattgagatgcacaagaacatcggagatcaacgtaacaattggaactctttactgctcaattctgtcaacatgattactctcactgccgctttgatggccggaatagcctcggttaacggtcacggtgtagattctgtaaccgctgtgaagatagcttcaacggtgttgttaacatctgcgacgggttttgctgccttgatgagcaagattcaaccttcgcagctagctgaagaacagaggaacgcgacgaggctgttcaagaagctgagagtcgaaatcgaaatgtttctgagagaaaacgaggagatcgaagaagaagatgttaaggaagtgataaagagagtgttgtctctagataaagcttatcctcttcctctgatcggaacaatgctcgagaagtttccggaagagtttaaaccggcgacttg

SEQ ID NO: 144692 - DNA, 1075 bp, Arabidopsis thaliana landsberg
atgatagtgatggctccatcagatgaagcagatctctttaacatggttgcaactgctgttgcgattgatgatcgtccttcttgtttccgttaccctagaggtaacggtattggagttgcattacctcccggaaacaaaggtgttccaattgaggtataactttggtcctctcaaatatgtctctcttccttcatcattttgagatagaaaatctctttgggtgtatttcagattgggaaaggtagaattttaaaggaaggagagagagttgcgttgttgggttatggctcagcagttcagagctgtttaggagcggctgtaatgctcgaagaacgcggattaaacgtaactgtagcggatgcacggttttgcaagccattggaccgtgctctcattcgcagcttagctaagtcgcacgaggttctgatcacggttgaagaaggttccattggaggttttggctcgcacgttgttcagtttcttgctctcgatggtcttcttgatggcaaactcaaggttacttattacttccagaaattctctaatatttttctgtcttttcaaaaaatactgtttctaatttgcaactgtttgaatatacagtggagaccaatggtactgcctgatcgatacattgatcacggtgcaccagctgatcaactagctgaagctggactcatgccatctcacatcgcagcaaccgcacttaacttaatcggtgcaccaagggaagctctgttttgagagtaagaatctgttggctaaaacatatgtatacaaacactctaaatgcaacccaaggtttcttctaagtactgatcagaattcccgccgagaagtcctttggcaacagctatatatatttactaagattgtgaagagaaaggcaaaggcaaaggttgtgcaaagattagtattatgataaaactggtatttgttttgtaattttgtttaggattgtgatggagatcgtgttgtacaataatctaacatcttgtaaaaatcaattacatctctttgtgtatctttcatagctttgtgtgacatattttggtacgagcagtgtttttaaacc

SEQ ID NO: 144693 - DNA, 384 bp, Arabidopsis thaliana landsberg
  unsure (1)..(384): unsure at all n locations
atgccgcctcgccggagttaccccttcnnnnnnnnnnnnnnnnnnnnnnnnnnnnnnnttgaatttggggaagcatttggacactatggagaagaagaagacgaagaagaggaagacgaagaggaagcatatgtcgactatggtgaagtacaagaggaagacgaggaggaagaggaggaagaagattccgaacgccaaaccagggaatacatcgatgtcctagactcacctgttagggtttcacagaacgagagtgaagggatagagaatcagaataggtcacaaggtgtttgttcatcgtcttccggatcgcaggaggatgtcgaatggaaacaaggtgacactgagggattgtcttcctctatctgtatggaagtttggacc

SEQ ID NO: 144694 - DNA, 548 bp, Arabidopsis thaliana landsberg
caaaaacccattctatgaacacaatctcacctccttcatcgtgtttcatacctctcttccaaacacgatgattaccaatactaatctcttcttgtttctctctttacttcttctttcttgttttctccaagtttcttccaatggagacgctgagatattgagtagagttaaaaagacccgacttttcgaccccgatggaaatttacaagattgggtcataaccggagataatcggagtccatgtaattggacgggaatcacatgccacatcagaaaaggtagctccctcgccgtcactaccattgatctctccggctataatatctccgggggctttccctacggattctgtcgtatccgtacactcatcaacatcactctttctcaaaacaatctcaatggtacgattgattctgctcctctctccctctgttctaaacttcagaatttgattctcaatcaaaacaacttctccggtaaattaccggaattctcaccggagtttcgtaaattacgagtcctcgaattggaatcaaacctcttcaccg

SEQ ID NO: 144695 - DNA, 547 bp, Arabidopsis thaliana landsberg
ggaagccttttacgtggactaatccttcttctctcgtaccattcgtattatctcttacctattcgtatccgaatctcttggtatccagatcctcatcttcatctcattcgctggtctcaaaatccgcgatatcgaacttgtctctcgcgcagttcttccacggtacgagatctaacatagagtgttttcttgttagtagatcactttagtttttttctgatgaactttgtttaggttttacgcggcggatgtgaggaaagacagttttgagttgtttgataagtgtaagagaaaagtggtagtgacggcgaatccgattgtgatggtggaggcgtttgtgaaggattatcttggaggtgataaagttttgggaacagagattgaagttaaccctaaaaccaatagagccactggatttgtgaagaagcctggtgttcttgttggtgatcttaagaggttagccattttaaaagagtttggtaacgaatcacctgatctcggcctcggtgatcgaacctctgatcatgatttcatgtctctctgcaag

SEQ ID NO: 144696 - DNA, 1064 bp, Arabidopsis thaliana landsberg
tttttcaaactcataaatcatattgagaacaaatagatttggttatatatggcttctacgcacgtttgtttatggacgttagtcgccttcgtgctgacgtggacggtgttctaccttaccaacatgaagaagaaggcgacggatttggctgatacggtggctgaggatcaaaaagacggtgctgctgacgtcattatcgtcggggctggtgtaggtggttcggctctcgcatatgctcttgctaaggtatgtaaagtggcgtcatagttttgcgtccaaatattaaatctgcatcacacttttattaactattttcttgtactaaaatctccgtatggataataggataaaacctatacacatcatgtatgtgttttttttttggcaatatagatattgtaatattttgtttttgcatgatacaatcaaaatcggctctaagaattgaaaaacgcctaaggatataagaacaaattaaagcgcaataattaggaatctttaaaaggaaaactaatgagaattgagttaggagatgtgtaactctagaacttttttcgtccacgttataatacctctagcactagattacaagtctgcaagaacattttagtcaaaaagggaccgaataaatataggaaaaaataccttaaggcagagtcggctttgaatacaaatattatacacaatcattttcctatgctaatatccgactataggatgggcgtcgagtaaatgtgatcgagagggacatgagagaaccagaaagaatgatgggtgagtttatgcaacctggcggacgactcatgctttctaaacttggccttcaaggtctgtgtccgctttactttgattttacatttatgtaaaccaatcaagaaatgtatattgcgtcttagttccaagatgtcatgcgtttataatttatatagattgcttggaagacatagatgcacagaaagccacgggtttggcagtttataaagatgcaaaaccagcagacgcaccttttccagtggataacaacaatttttcttatgaaccttctgctcgatcttttcacaatg

SEQ ID NO: 144697 - DNA, 689 bp, Arabidopsis thaliana landsberg
gaacctgagagaaaggcagcgcttcccattgagccgtctggtgaaaatgaagatgccatcactctacttgttagaatgccagatagcagccgtcatggtcgtcgctttctcaaatcagacaagcttaaggtgaagttcgtgagtctcaactctcaagtgattagcgaggtaatcaatttttacgtattcaagcttccctaacagttgtttcttgaattgcagtacctttttgacttcatagatgctgctggattagtcaaacctggcacatatagagtggtaagccctgtgatgtgcgataaatattctcatgcattatttcattgctatttctaaggattcgagttttgccatccccctcattttggtttatattttctgatattacaagctttagaaatggtgtaattgtttttggtaaacaggttagaccatatcctcgacgtgctttcagcattcaagacggtgccttaacctttgaggaactcagcctcaccaacaaacaagaagcgttgtttctggaactgctggtgtagcaatataacctgagatgatgatagcagaaagttgaagttcagtgtactgtaagtctgtaagcgctttcgtagctaactgcatagtggacacactttgtagtaaactctctagttcattttctcacaaagtcgcaatgaatctccggtttgaaa

SEQ ID NO: 144698 - DNA, 1461 bp, Arabidopsis thaliana landsberg
caacagcttaatgcatatttcctggtgataatgattgattcttatatatagctggttggtctctacaatgttatcaggtgatgccaccaatatggtgcaggttagataggctttggtttgggcatcctggtactcttcagggatctatgacccgacaacctttcatctgcccacttgatcatgtctttgaggtagtatttgtaatgatgttgtaacatgtcaatatctgattcttcctctgcaaatgactcataacagctgaataatttcaattacaggtcaatatcatgcttaaggagctaccagaggaagagtttggccctgggattggtatcagagagtattcttttctagataacccattgctgccaaaacaagtaatatagccgcccagatatatttttctaattaatcatttcatagaaaaaatgtcaggagtgaaaatatttttcaggtgaaagagtcatggcttgatgttcagctttgtcaagaaggaaaagaaggatgcgaggcatcaaataacactagcccctctcgggttcttaagttcccaaagcggagcaatgaagatacggtaactaagatttcattagctatctatcactctttgttatatttcaaaatcgctggcttagccttatcgccttgttttgtgctcaccgcagtttaaggcgatattctcttccttcgacgatgtcaaagtgatcaagttttcttcaattgaagatgctttcatcggattctctgacaaggcaagtagatatttaaaccgtgaaaacatttagacatgttgatacaccatgtaaatctgacctgaccgaatcgggtttgcaagcaggagcgagaagaaagatttagaagacgggtaaagagatatgtgggaatatggtgttgtgaggagaacaagactccaggacacatttactgggatatgtattgggacgagaaacctggttggaaaccggttccaccacagacaccagaagaagatcatcctcctctctgataacattactggcaagaagactccaagaagcttacactcgatttcttgggtcacaaggagacagacttagggagttttttttccttctatacggcctttttatactactgtggaactgtatctttcttttctctgtctcactcaatgtatcatgttataaccataggtttggacacagaaacttgtttcttcttttcatataatttctctgtagatttttatattaataaatggcttatttagttgtttcactttcatacttcaaaaaccacgcagtcgtgttctgttgaattggtatatttggaaataagaattatcctgctgagagatattgagatgtgaaggagtccatgccatattgagatggaagaagatatagttgagataaaaaagttccaagacacaaaccaccattagctaacatgactgtgaaccatcatccatacataaaccgt

SEQ ID NO: 144699 - DNA, 424 bp, Arabidopsis thaliana landsberg
taactataataatggtcatgatcctttctttgcacacattaaccaaaatccagagctaataaatctggacttaccatcttctaccccttccagtttcatgcttttctccaatggagctttagttgatgccaatcacaataattctcacttcttcccaaatttattgcacggtgaaaaatttataattttattgtttgtgggaaaaactgttatatctatgtttatgtgtgttctgatgaagctagaaatcgcaggtaatacgagaagaaaaggaaataaagaagagagtgggtcgaagagaagaagaaagaggtcggaagaggaagaagccatgaatgaagatgagactcagaagccaaaagatgttgttcatgtccgagctaagagaggtcaagctactgatagccatagtttggctgaaagg

SEQ ID NO: 144700 - DNA, 498 bp, Arabidopsis thaliana landsberg
attacaatccactgtgaactgaaacccttccgggcataaatcttgggtagttgggttaaatctttgcttctccgggaaagtatcttagaaattatatctctggatgatgaagacgagatttctggattggtatttgaagatcgcgattggatcggctattatcggcggaggcatggaattcttcatgatcaagactggtttctgtaaattcccatcttttctattcttttctcgctttcaattttatgtgtgtttttctccataactcgtcaatcaatcaactagatcgaaaattgcttgacatggtttctgtgagcagtttaatttcactggattttggatagaaatgttatgcatttttggtttatggggacttttatgcttaatatcaaatctgatcttgtaagaatgcttattgatattgaagattcttactttccatcttttgatgaaattgtcttgcagacgacaaggttactgtaatagaagcagagagac

SEQ ID NO: 144701 - DNA, 2274 bp, Arabidopsis thaliana landsberg
atggaaccaccgccgtcttctctgtcctccaccgcggtggcttccacctccatctccgccgccactactcctgttcctcctcctctacctcctcacgtgacttcttcttaccccgaatctctcgactcctcccctcgttctcgcaccaccgatggctgggatgaccttcctgctccttctggcggcggcggtggcggtggtggtagcgccgtctcttctaaactccgtcttatgtgtagctacggcggtcatatccttcctcgccctcacgataagtctctctgctacatgggcggtgacactcgcatcgttgtcgtcgaccgtaactcctctctcccttctctcatcgctcgtctctccaacacgcttctcgacggtcgttccttcaccctcaagtaccagttacctagcgaagaccttgactctctcatctccgtcactaccgacgaagatctcgacaacatgatcgaagagtatgaccgtaccatttccgcttccaattccaccaaaccttcgcgtctccggttgtttctattcacctctaagcctgaggctactcaatctatgggtcagatccttgagagctctgccaagagcgacgattggttcctcaacgcactcaatagcgccggtcttctcaatcgaggattctcagattctgatactaacgtcaatcgtttacttggtttggatgatgctcttgctctccgttctaattccggtgacaacaacaatcgagatggtgatgatggctctgttaaaagcgccaagcaacagcaacctccaccgccgcagcagcaacaacaacagcaaggaggccaagatgtgaactgcttaccggattctccgatgttagatacatcctcttctttcggctccacttcttcgtctccctcgctcgccaatttgcctccgatccgtgtccatgtagaggaaccaggcggagtaaggactttgccagatcagagaaatctgggaattgaagaacagttcgcacgattcaacgtcgggaacaagcatcagctacatgacgacggatttgctgcgatctcttcaccaccgccgatgcctgtcacaatcgcccttcctgctgcgcctgtgactgcagccaccgtctctaatgagttccaggccagggtttactcagatgacgagagatccgatcacggcgtgcaggctggatacaggaagcctccgactccgcgatcgcagccgcagaatctaccgcctcagcaggctcatcagctgaaatcaaatagcggtggtggacacgagctgccatcacccaattccgtttccaggtactctttcttcttatattggaaccctcatgagccttaatttgatgctatagaagaactaagattggtcagaactctgattgtgtgtttgctatataatgaatgcctcagtgatagcagtatgagcaacccaatgtttcaccaaagaccatctgtctatcaagaaccaattgctcagataccttctggctctaccgttgttactggtatgatcaatccctcagatccaagcacacttttgtcacagcatcagaatcaagacccagcctatatccttcacccccagtttgagcaacaatctgcacaatctcagccacagcagcagttcatacacactgctgctcctcctcaatacattcatcaccatccgtctagcggccttcctgtcccgacttacatccaggtttacccttcgcaacagcctcaacagtccttccatcaacacgcaggtcgactggatcagcagccttatcctgtttattatgtcactgctcctgtcccacctaggccctacagtatgcctgtgccacaatctccaagtgtgagcgatgctccagggtctatcccctctaaccatcccaactctaccatgatgcctccacctcctaacaaccacatgagaagtgttagcagtggcaaacctgagatgggacaggctggggtttacacaacagccccaggtgtgggcggtgctcagatggttcaccagattcccacaaaccagcagcaattcatggggtattcgcagatccgtcaccctcctcagtctggttcagctgggaatccaaactatggatatgaatatgtcgacaatgctcatacacagatatactacactcaacctatgggacatgcacagtaccagacaatgactgggcctccacctgccatggtgatgcctgatggttctgctgctgctaagcttccagctgagaacatgactcaacagatccggagttcacagccattgtga

SEQ ID NO: 144702 - DNA, 2721 bp, Arabidopsis thaliana landsberg
  unsure (1)..(2721): unsure at all n locations
gcaaatttcttgtctagaagtactagtgaaatcaaggtatcaacaacttttttctctgcctattgcttgtgtgaactatcatgtgctattttctttagaatcaagcacttcagttgtaggatttcaaaacagagtgagggatgcattgtttaaggaaatccaattagtattgttccagccctttcccaattgactttttgcagagatatgaacaccgaccatcttatacaggcaagacatggagtgcttatgaaggaaaaagaagtatccgagagtggcgataatcaagcagagagctcccttctcaacaaagatatggaaggagcattagattctttcgataacctgttctgccgtagatgccttgttagtccatttgattttctcaggctaatgtttcatgggttattgcttaatgatcgagcaaacattggtctctttttaacttttgtatgcatctatgcaggtatttgattgccggcttcatgggtgttcacaggatctcatttttccggtgagtttagtgccaaccgaaaaaatcttactataactttagtgttacttatctaattttatggatttttaggctgagaaaccagctccatggtgtcctcctgtagatgaaaatttaacctgtggtgcaaactgctataaaacggtaaatttgttattttctcgttgctaagctcatctcctagaaagactggtttaacaaaaagcgttgttttcaatttatcagcttctcaagtctggaagatttccgggatatggccccattgaaggtaaaactggcacttcatcagatggtgcaggtactaaaaccacacccacgaagttctccagcaaacttaatgggagaaaaccaaagaccttcccaagtgaaagtgcatcgtctaatgaaaagtgcgcactagaaacaagtgactcagagaatggactacagcaggataccaattccgataaagtttcatcatcgccaaaggtgaaaggtagtgggagacgagtaggtcgtaagaggaacaacaaccgagttgctgagcgagttcctcgtaagactcagaagaggcagaagaagacagaagcctcggatagtgattccatcgccagtggannnnnnnnnnnnnnnnntgcaaaacataaagataatgaagatgctacttcctcttctcagaagcatgtaaaatctgggaactccgggaagtcaaggaagaatggcactcctgccgaagtctccaataattctgtgaaggatgacgttcctgtttgccagtcaaatgaggttgcgtcagagcttgatgcgccgggtagtgatgaaagtctaaggaaagaagagtttatgggtgaaactgtatctcgaggaagattggctacaaataagttgtggagaccacttgagaaaagcctttttgataaaggtgttgagatttttggaatgaataggtgggtaattttgatgtatttagctactgctaaattatcattctgcttcaggtttttcaatttgtggaatatagtcatatggattctttgtttctttgcagctgcttgattgctagaaatcctttgagtggtttcaaatcatgttgggaggtcttccaatacatgacgtgctcggaaaataaagcttccttctttggaggtgatggattgaatcctgatggctcttccaagttcgatatcaatggaaatatggtatattaacactaaacctttttgactttgtttacaaattcctgataaaatcgatttatttctcttcagatttaatgctttagtttctggactaaccaggttaataaccaagtgaggagaaggtcaagatttctacgtaggagaggcaaagtgcggcgcttgaagtatacctggaagtgtgctgcatatcattcaattaggaaaagaattgctgagaagaaagtccagccctgccgtcagtttaatccatgtaactgcaaaattgcttgtgggaaggaatgtccttgtttgctaaacgggacttgctgcgagaagtactgcgggtaatgtaatctatgattatccacatctgtatttcttagctttgaatctcattaccaacaaactatattttctgtgtagttgcccaaagagctgcaagaataggtttagaggttgtcattgtgccaaaagtcagtgtcgaagccgccagtgtccatgctttgctgcagatcgggaatgtgacccagatgtttgtagaaactgctgggtcatgtaagtcttattggggatgcaaatccatcctaattggtttcttagaaaatgctcaagaaatgcaactttttttttagtagttccagatgcacttatactgtgtctgaatgaatttgaatgtgtagtggtggggatggttcgcttggggtcccaagccaaagaggcgataattatgagtgcaggaatatgaaattgctcctgaaacaacaacaaagggtaaatacttagccttgttaactaaatatctatgatctgcaatcaaatgattaaacatgaaatggctaaatttgctcctcttttttatgttaatttcaggttttacttggaatatctgatatttctggttggggagctttcttaaaggtatattaggttcaaaatttgttaaactgataagtccttcaaagattaatctatgtttagagaatgaacttgccttaagaacaattatttttccttcttacagaacagtgtaagtaagcatgaataccttgg

SEQ ID NO: 144703 - DNA, 2284 bp, Arabidopsis thaliana landsberg
  unsure (1)..(2284): unsure at all n locations
agcaaaacgtcatgcaagtcgaaatcccatcgccgtatgatcacggaagcagaaggcaacggcgaattcgacgaacggaagaaacccaaaagcagaagaagatggtggcgatatctatgtacagaggcaaccttcacaaagttcccgacgtacctcgccggtggataatgcctgaccgtaatctctctttcaaggatttcaaatctcttcttcatcgccgtaaaaaagccctttctcgtctcccccttaaccctaatttgaaccttagcgtcaagactgagttggttaccgatcaggagaatccaattcttccatctgaagcgaacggttcttctgggaagcagaagctatttgaggtaaagagagaggagatttgtgggaatcgggttaagggagatgagatcaacgacagaggttttgaaggagctcgatcagacggtggagatcgtcccgggagagtgacggaatcaaaggaaaccgataatgtgccacacaagtatgcggccaaggaggaggaggtatgtttgaatttctttgatattaatctctatgtgaccttcccgatagaatttgagtactacttagctgagttaagtctagaatcgccatgctcattgagttttgtgaagtacataggaagattgggaaagattatgtcattttaggtgaatttactgaagttaagtggctgatctgttgaattgtagaataaacgttgtataagcgaagccgccatggtcacaagcagtttgattcattgatgtgtgtgctcaagtagtttaagtcacgttgatagatgttgtgaatttgtgatgcaacaagtctattgatgaaacaatcaggcaggctgcaatagagttaccaattagggaaccttgaaggcttaaatctcgtagttattttctgtgaagttgttttgtttctctatagctttgttgtttttcgtttcgtgactgtattctcttttctcgaaacagacgaatgaagcagctgaaaaagtaccaagcgagacagagttaaaacggaaagaagtggaggagagattacaagttttgaatgcaaagaaacacaatctagtccaagtgcttaagcaggtcagttcagtgtctgcccttctctctataaaggtgtttcacctgtataccgattcccatttattgaggtaatcatactcgtcaaattaactgatacgcagattttaaatgctgaggaagaattgaaaagacgcagctacatgcaacaacaaggaaccaccgtagccactcgtccttctcttccactccatgtggatgtctcgaatgactcaggaggtaatgttggtactcacatggaaggcggggaaactgatgatgcagcgaatcataataatgctcaaactcgtactctgcttcgactgtgtggcgcttcttcatcatctgaatctcctctgagaagagcagcagccttgtcacaacacaatatggtaaatattcaatatcttcattttaaacaacaatataaccaaactacttagaatctctttggtcaatctctgattttgcattcatatatgtatatatgatgattgattgttgttgctgtttatcaggttccacatacttctcgatggagcccgctcgttggtccttctcaacccggtcctgcagtcactgtttctgcgtctggaacaaactacattgcttcatctccttcaccagcgggttttggtggcacttctgttttcagagaatcacggcttcagagtccatggaattagccagcttctcctatatctttttgtttttcgtagctgtaacgtgttcatattgattgatgtataaatcagactcatccatatcttattagtattactgcaaaatgcaaactaatccatttcttcttattttctcaaaggttcatatctacattgattgttattgactgaatcagctgagcagattaaacaaaaagctgaactatgagaatatttaattgtttcttcaggaatataaattaaccccaaaagctctctttaatgtgcaatcaaatctatgagcttctgcaccagatactgctaattccaagatattgtatatatcttcactttgcggatggaaccgatcaccagatacaaacgctgaaacnnnnnnnnnnnnnnnnnnnnnnnnnnnnnnnggctctttgatcacgccttttgctttcatattctttcttacatttgcagcttcttccaagttcctgtgcttgaatatatttggctagcgttacaagtgcagttgccaagtaggatccagctctagaatcc

SEQ ID NO: 144704 - DNA, 1227 bp, Arabidopsis thaliana landsberg
atggcgtccactcgtaaacccagttgtcatggagctgaagtcgacactcagaagcgctcctcttcgaatagtagtactaagtcagccagagcagagacttttgagccgatgcaattacaaagatcagtaacaaacccaagagctgttggaattcccgagagtaaacggttgccagagtcttttaggaagcgatctagcgacccggctgtttgtaaacccgatttcagctccctatccactgttcttgagcatgtagattcattgaccattgatgaaaagaaaacatctggctttggcagcgtcaagaccagctctgcttcagccaaattgagtgatggtacgagcagtcttggcaagactagtggaagtgccaagctaagtggccgccttgatttcatggagagtggcaagagcagtatctgcagaggaagcacaagcagtgatgtgagtgacgagagtagctgcagcagctttagtagcactgtcaacaaaccccacaaggccaatgacttaagatgggaagcaatccaggctgttagggttcgtgatgggcttttaggtcttagtcatttcaggctccttaagcggttaggctgcggggacatcgggagtgtttatctctctgagctgagcgggactaagtgttactttgctatgaaggttatggacaagacatcccttgccagtcgcaagaagcttcttcgagctcagactgaaagagagattctccagtctttggatcatccatttttccctaccctctacactcactttgaaactgagaagatctcgtgcctggtgatggagttctgtcccggaggagatttgcatactctcaggcaacgccagccggggaaacatttttctgagcaagcggtaaagtgagtcatctttccttcgtctgtcaagattagcatttcctttgattttaccgtattacaaagtattggatagatgacaaaagaaatactcattttggctgaagcagcgcattcttattctcatctcactaaagattttgttttcaatgtgtggcagattttacatagcagagtcattgctagctttggaatacctgcacatgcttgggattgtgtatcgcgatcttaagcctgaaaacgttctagttcgggaagacggacatataatgctctctgattttgacctttctctccgatgtcttgtcagcccgactctagtgaaatctgccgccatcgagtcagatcc

SEQ ID NO: 144705 - DNA, 740 bp, Arabidopsis thaliana landsberg; identical to SEQ ID NO: 63386

SEQ ID NO: 144706 - DNA, 1415 bp, Arabidopsis thaliana landsberg
actgaactccgcttctaagatccttcgacggagagaaagatatttcagatctgatcggagagaatcattctcaaaatttctccattctaatttctctttctcgagagagtgaagagagacaacaaggaaggaagaggaaaaatggaggaattcttagataagttgccgcagatggatctgatgcgttcggagaagatgacgcttgttcagcttatcatccctgttgaatccgctcatcgttccatcacttatctcggcgagctcggactcttgcagtttcgcgacgtgagtgtgttttaaactcagatccgtcttcttctctttacgaatctaacgaatctcttcgtaactatcggtttaggttgattagaatttagtgagaagtgagatgtttgatctcacaatgttgatccgtctctattgatgtgttacttcgaccacgagtggacattgtagtgatgatctttttgaaattggttgaactggaacgaaattggttggatttagcattagcggatttcaattggtgttgcaaattcggttttagattagcttatgattgagatattgtaagtttgaagaatctgacacactctatctttgtttccttaacagttaaatgctgataagagtccctttcaacggacatttgcaaatcaggtatcaacgcaatgttctctgtaattctactacacttgagctctgttgtatgtgattcaatgcagatagtttttactctattgatgtggtggggcaatttgttttggtatagatgtgtgtgtatatatattaggctcagtacaaactttgtagtaatatggtgattgtttgagtgtcactaatttgtgtgatggtggttctttaactttgtttcaatttttttttacaagatctcttcttaagaattcatttatttttgaagtataatcgtagatttcttttctagtttatattacattaactcccatgcaggcagaacttgtttaccaggccatgcttaaccacaatgagaaactggacgtattgctcagctgtgaaatgtttcttttacactttggtttgaaggttctaggattttgatgtagcttagagacttggagtggatatatatgggctgggctatgcatgtacttaattgctgcactgatttatgttttccaaaatataactttgacatcatgatagaaatccttattaaccacatttattttcgatatcaagtagtatgtggtgaaatttttctcatgcatagagcttttttgcttatgcaaattcttgggggcttttaacaggtaaaacgatgtggtgagatgtcaagaaagctgcggttttttaaagatcaaattgacaaagctggtctaagatgttcaccacgccttgaaatagaaccagatattgcccttggagatttagag

SEQ ID NO: 144707 - DNA, 590 bp, Arabidopsis thaliana landsberg
taacggagagcttccaagtggggaataatttccgcgacacctgactggctttatgaatgtgttagacaggttttcctccagggattctatatctttgaaatagtttctttgacatgggatctttaaatttaacggatagttctttttgaatttcttatgtgtagaatcaagttgtttgtacagataacttccatccaagggaattgaccactcaagatcgagaagcagggtctcagtttcatacacagtttgtaccaatggcctcaagggacagtatgtctctacctgtaagtcactctgaagacagggaaaaaattcaaagttttgctggcaaaagtggttgcgggaaaggtgaagtatataacagacttggagaaattggaaaggaacaaacttttccgtctaagaaggcaaaacttttgagagatggtcaagaaagtgatgtgtttcctgtgagagaacttccaagcaattgtgatcgtccttcgcattctggagatggcattgtgactggatatgatgtagcaagtggtcgtgaagttccagatgtggctgatactattgaggatctgttagagcagacaagcaaa

SEQ ID NO: 144708 - DNA, 598 bp, Arabidopsis thaliana landsberg
atgttctgcattgtagcagagagcgaatcgccattgaagaacagaagcaaaggaagtgagcagtagtatgtaaaatggtgatatttgtgttgcttttgtaacttgtaaggaagtttctcagtgattaactgtacgtttgaaaaatctagttgtatcttattgaccaaagatctagttgtatcttatagaccaaagaaaaccgaggatctagctagttgtatcttatagaccaaagatctaacttatgccccaaggaaaccgaggatcttaataataataatatatattttaatagagagactgaaaagattgtattttacgatctttatatttaaattcttgaatgatgatgcttaagttttcgtcgatttaaaattctatgtagcgtatcttgcccttgacaatcgggtaacagcgaaaaaggagcagttagtgaaggaggagctggaaaaggtgacattttgggattaaacattaattactgggggttttcgaagatcctaacactaaacttgaatgtgctttctctgatatttgcaggtgaaataagcaggtacacaaacaaccgacatctgggtcttaccaccggattacgtca

SEQ ID NO: 144709 - DNA, 699 bp, Arabidopsis thaliana landsberg
gtcagcagttcgattcagcggaagcgcagtccagcaatcccgcttatgacgtttttgaatctacatttgatgctgcaaacttaccatcatccttatcatcaaatcctgatgctgctaatttaccatcatccttgtcatctagtgttggtggtgcagaccacaaagaatcatcaaaatcactttttagtaaccaggacccatggaatttgcaaactaactcaaacgaggatgtcaaacctgatctacttaattcttcgaaaggtgagattgactttcatgttatacatgactccattactacttttttggtagttatccttgagaatgatctgttgattggtctttggttctctctgaaaggctccgaggaggagcacatcaaacaagaacttcagaatgttgctgaaggagtcgccgcttctgtgttacagtcaagcacaccttcatatcatgaacctccaattaaggtggatgagtatgcttttaattcgaaaggagaagtttcacgtaatgatgaaatgaaacagcagtctacacacttcaaggtccttagcttactgttcactattcttgtcattatttctttagatttcatattgcctcagaattattgctattgcttcgcaggatataaggaaccaacttctagaaagactgaatttcggatattctggttctgattcgctggatcagttgcag

SEQ ID NO: 144710 - DNA, 1178 bp, Arabidopsis thaliana landsberg
ccttacgatctttgtgttggcggcgattacaccatcaatttgttagtttatttatatattaatatgggttgcggtggctcgaggcttggaggtgtggcgacgacaagggcggaagaaggcggggttgtaccacttgcagcgggaatacgtccccttctccggcgaaggttagaggagatgaagaaacggagccatgcaggcgtcttgaaagggagccagacgttgtctaagaaagagcttcttaggcataactcttccgaggacggagaagatacggaggagaacgacggtagcttgaaggcgtccgctaaggttgctccggcgcctgatcataatgtagaagagaagaaagaggttatttatgaaaagattccatccaaagatgatgttaaagaggtgaaggaagaagtagttgtgaacaaacaagaagaggacaatcatcatcaagatgttgtggagaaacaagaggaggaaaatcatgatgatgatgtggtcgtcatcaatgttaagaaggaaggagatgatggtaagaatcatgatgttgatgaagggagtatcaacaactttgatgagagaatgattggtcctggatctccaagctttagggtttattgcgtcgatgttccttctgatgatgatgatgaaggtaaatcatatgttcttatacaaacacacatatatacatgtataaatcatttactatttgtatttgtatatggatgcatgcattgttagagacatatatatgtttatatatgaaatgcttgttatattatgtagtttcgttattgaaacaatttatccattcactattgcagaaaaagatgtagaagacgcgagaaagtcgatggaaaccgaaagcgtcacgacagagataaaagaggtggtcaatcacattaattcacattattgattatttgatctatgaggatctctaacaatgatatatttgtatttctataggacggaagcattgtcaaaaaggagaaaaaagaaagaagaggaaagaggttcggaatcgcattgccgaggaagtatttagcaaatgtgactgcgccgtgctatgcaggtggaggatgcatgggaaacactcattctcgtttggtgcaagagaaatcgagccagtgatcgatcaaaatatgtttgccatctttgcattgactgatttgttgaagtaa

SEQ ID NO: 144711 - DNA, 874 bp, Arabidopsis thaliana landsberg
caaattaagagcgagcaataatgagggtttctcaatctcttatcccttttgccataattgctttgttcctttcctttgtcaatgcttatgatccaagtccactccaagacttctgtgttgccattgatgacctaaaaggcggtacgtaaagaaatctccggttatctatttctctacttttctccttatgattaactttgacgtagtaatataatatatactctttgatattatatttctacatgcagtttttgtgaatggtaggttttgtaaagacccgaagcgagtcgatgcaaaagattttttcttctcaggtctcaatgtgcccgggaacaccaataatcaagttggctctaatgtgaccactgttaatgttgatcagatcccagggctaaacaccatgggaatatcattggtccgcatagactacgcaccgcatggccaaaatccacctcacacgcaccctcgtggctcagagatccttgtccttgtcgaaggaacattatacgtcggttttgtctcttccaatcaagataacaaccggttattcgccaaagtattgcaccccggtgatgtttttgtgttccccataggaatgatccattttcaggtaaatgtggggaaaattccagcaattgcttttgcgggattgagtagccagaacgctggtgttatcacaattgcaaacactgtgttcgggtcaaaccctccgatttatccagagcttcttgccagggcgttccagttggatgcaagtgttgtcaaagaacttcaggccaagtttgggtccatatgaactgatcatctatgtcgtttaagagtgtttatcagtgaaacacttaaattaaaggaatacactactatgaaatattta

SEQ ID NO: 144712 - DNA, 1104 bp, Arabidopsis thaliana landsberg
gttcttaaaggggttcctgacagaccagaggttgctcttgtcaaactcagagaaatcaaatgcaaacttgagaagaaaatcaatgttcaagatcgctacaaaaatgtcattgctgtgaaagatgacgtcagagtgatcgagggtcctagcaaagtaagtacctttgctgtctggttgttgttgcttaccttgctcaattttcctgatatcatatcaattaatatttatattctagggtaaacaaggtcctgtaaagcatatctacaaaggagtcttatttatatatgatcgacatcaccttgagcatgctggatttatctgcgctaaatgcacatcatgcattgttgttggtggatcacgttctggtgctaatagaaatgtaagtgtcttgttgtgatgtggccatgttttgttatattttcatcaaactgttgcttcaccttatctagctatttttctactctagggtggtgattcgctttcaaggtatggcaatttcaaggcacctgccccagtaccctcatctccaggaagatttcaacgtggcagaggcggaggatataataactgtatgtttgatcttttctttctattttggttatgagtaagaatacgtaatgttttgtttagttgatatttgcattcttcactggtctgctgcacttaatacttcttcaggataagaaaatatttccactatatatgacttgtacatttttctggtagtacaatgttttattgctttccatatattttgtgacatgcttatacatcttatctacgtaaagtttcacatactcttatttgtatctttaaatgcagctggagggaggcatgggggtggaagaggacggggagacgattctttattgggtactactgttaaaatccgtctaggacctttcaaggggtataggggacctgtagtagaagtgaaaggaaattcagtgcgtgtagaacttgagatgaagattgtgacaggcaagcccttgaattcacttctccgcgtgtgggtttctacatgtcgaacgaattctaacaatagttcatatatgcagttgatcggggtgcaatatcagataatgttgcgacaacaccgtttag

SEQ ID NO: 144713 - DNA, 2776 bp, Arabidopsis thaliana landsberg
cttctgcaatctattcgttggttggttaatagaagctctctttctctgtctgtctttctctctcagagaaatggctcttcttctagtttgttcttcctcctcctatgccctcagagtcaccattttcttgtctttcttcttctttctctgcaatggcttctcttaccctactacttcttctcttttcaacacccatcaccatcgtcaccacttggccaagcacaactacaaagatgctctcactaaatcaatcctcttctttgaaggccaaaggtcagggaaacttccttctaaccagagaatgagttggagaagagactctggtctctctgatggctctgctcttcatgtaattcacctcaactcttcctcactctcttcttctctttttatgaaatatatgaaatgggtttggttggttaatgagagatctcaacaatgtaggttaagtgttgtatcaatatcgccaaaagattcaacctttttacataactctactgcatcaaaaaaaaaacagaggataaaattagggtttttgttttgtcccccttttttctacaatccctaattttaacaaaatgggcttgcttagaaagttatagatctcaagattctcaacaatgtaggttaaattctgtatcaatatcgtcaaaagatcaaatctttattagttgttttctttcccctctttccaaaaaaatctctaatttgtgtgttttgttgattaggtggatttggttggagggtactatgatgcaggagacaatatcaaatttggattcccaatggcattcacaaccacaatgctttcatggagtgtaattgaattcggtggactcatgaaatctgagttacaaaacgctaaaatagcgattcgttgggctactgattatctcctcaaagccacttcacaacctgacacaatctatgttcaagttggtgatgctaataaagaccattcttgttgggaaagacctgaagacatggatactgtaagaagtgtgtttaaagttgacaagaacactcctggttctgatgtcgccgctgaaaccgccgctgctctagccgccgccgccattgtattcagaaaatctgatccttcttactccaaagtcctcctcaaacgagccatcagtgtataacatttttttgtcatactttaataattttgtgacataaaaaatttcttcaactgattttttttttgtgtttttaaggtttttgcatttgcggacaaatacagaggaacttatagtgcaggattaaaacctgatgtttgtccattttattgctcttactctggttatcaggtaaataagtaaatgagttattatttacatataatgatcagattttggaaatttgtgaaatttataggaagatttgttattttatgatattttttggtacataggatgaattgttgtggggagctgcttggttacaaaaagcgacaaagaatttaaaatatttgaattacataaaaatcaatggacaaatccttggagctgctgaatatgataacacttttggttgggataacaagcacgctggtgccagaatccttcttacaaaggtaaaatctaaatttaaaaagttttgttatatcaagtccctaattaattttgttgtgtttttgtttgtgtgaaggcatttttggttcagaatgtgaagacacttcatgaatacaaaggtcatgctgataatttcatctgctctgttattcctggagctcctttctcttctactcagtatacaccaggttcttacatttttaatctttcactaattttcacttcatttacatgttatggtaattattttgtggagttttttacattatgaactttttctgttttggtgtttttttagataacctattttagagaagatatttatttgactgaataaatttgctctttatgaatattaaaacatttatatacatatgttatgtaggtggattattgtttaaaatggcagacgccaacatgcaatacgtgacgtcaacatcgttcttgctcttaacctatgccaaatacttaacctccgccaaaaccgtcgtccattgcggtggctccgtctacactcccggtcgtcttcgctccatcgccaaaagacaggtccagtgttaaaaatctctcaatctttagattttagattattttgttaaatataaaatttataacattttcgtaattcttttttgatatataggtggattatctacttggagacaacccattaagaatgtcttacatggttggttacggtccaaaattcccacggagaatccaccaccgtggctcctcattaccttgtgttgcaagccacccggccaagatccaatgccaccaagggtttgcaatcatgaactctcaatctccaaaccctaacttccttgttggtgcagtcgttggtggtcccgaccagcatgatcgcttcccagacgaacggtctgattacgagcagtccgagccggctacttacatcaattcaccactcgttggagctcttgcctacttcgctcacgcctatggtcaactctagtttagtaacgacgagtgtgttagtttaagtaaaaataaaaatgaaggaagttttttctttatttttacttttatttgttagtaatgtagtggaccgaaaatcggatcacaagaggacattggtccgagggatggtttatttggttcgttataatataacgtcaagtgtaatcttattgtggttattaatgttatcatcctattaattactatatccatgtcgttaa

SEQ ID NO: 144714 - DNA, 2895 bp, Arabidopsis thaliana landsberg
cgaattccaagaaaatagaaaagtaggatcatggtggcgatgatcatggcttcaaggtttaaccgggaagctaagctcgcatctcaaatcttgtctacacttttgggaaaccgaagctgctacacatccatggccgccacatcttcctctgctttacttcttaatccgttgacttcttcttcttcttctactctccgtcgtttcagatgctcgccagagatctcttctctctccttctcctccgcttctgatttctctctagcgatgaagaggcagagtcggagttttgctgatggttcggaacgagatccgtctgttgtgtgtgaggctgttaagcgcgagactggacctgatggactcaacatcgctgacaatgtgtctcaggttagatttgaaattgaaattggtgatcaaatttttgagctttcctctaatgggaatgttggcgaaagtgtgattgtccattaaaatttgaaacttgattagctttttaaatagttcagaatttacttacggatctctcattgttcttggcttgattcagctcattgggaaaactcctatggtgtacttgaacagtatagcaaaaggttgtgtagcaaatattgctgccaaactcgagatcatggagccatgttgcagtgtcaaggataggtctgtagcttaagtcttttgtggcttgtttgtatgtttttagttgagtcccttcaagtcctaacttttatgtttcacggattcaggattgggtacagtatggttactgatgctgagcaaaaaggatttatatcacctggaaaggtatcgattatagattgatcagtcttttgtaaagtttaatggatgagaccagcttttacacacataaagttgtacaatctatagtctgttatttctggtggttaatcatgtccttactgcattgatctagagtgttcttgtggaacctacaagtggaaacacgggtattggcctagcattcatcgctgcttcaaggggctatagacttatcttgacaatgccagcatccatgagtatggaaagaagggttcttttaaaggcatttggagctgagcttgtattaacagatcctgctaaaggcatgactggagcggttcagaaggctgaagagatcttgaaaaacactcctgatgcatacatgctccaacagtttgacaaccctgcaaatccaaaggtttgtggtttatatttttccttatttgtgtcatgatttggtttttgctctagtcatgtaccataagaagagaaatgaaatgttaagttagagttaaccagaaactcatctgtatttagagaatgcccacaagtgtgtaactgaagtggttttcacttaaactgtacaagcaaattgggaagtggctgatcctttgaaatcggcatgatcttctgtgaggttctcttgtcacgtttgtaaactcaagtttgaatatacgcagattcattacgagactactggtcctgagatctgggatgatacaaagggcaaggtggatatctttgttgcaggaattggaactggtggaactatcactggtgttggtcgatttattaaagagaaaaatcccaaaacgcaggtagatgcaaaagttcaatggtttcattcttagctggagtacattttcaggtgttatttagacagtattgtatgttcattcaagcaatataattcgtagttaactattcgatgtttacatgtaccaggttattggtgtagaacccaccgaaagcgatatactttctggtggcaaaccgggtaaggcttgccaatagatatcaatcagtaattttgtttccatgatttcgaaatatgatcttatattcacgtattttgctttctcttgcatttatacaggacctcacaagattcaaggaattggagctggatttatacctaagaatttggatcagaaaattatggatgaagtcatagcggtatgatttattttgttggattctgtatggttatacaatttatctggtttccacaaaacatccacaattcttgtgtcaatttattgcttaaattttccaattcctgagactcaaacttcatcaattactatcttctttttgcgtttaccagatttcaagtgaggaagctatagaaaccgcaaagcaactagctcttaaggaaggcttgatggttagttctttgcagtatttatgatttctgagtgggaaccacacggatgttgtggtgtcatgttgcatgtgaaaggtggaaattacacaagattcttacgtgaatgtaataatcttgtcaggttggtatatcatctggagctgcagctgctgctgcaatcaaggtggctaagagacctgagaatgctggaaaactcatagctgtaagtcttttcggtttcagttatgtgttatgtcttgaaaacaaaaaggtggtgcaaggggtctttgtgcaacatatagatggattgctttagatttcatcttaagatagatttgaggattattaaagtctcccgagtctgtgatccaatactaaaccaaagaatcaacaatatagtcacttggctagttagattgttaaatcttctaagtaggtaactgtaaatgaatctatgaatgcggtttttcaggttgttttcccgagcttcggggagagatatctatcgaccccgctgttccagtctatccgggaagaggtggagaaaatgcagcctgaggtatgaacattagcaacttggtctacttctgcaaagctctttctcccataattacagtctgagtgctaagcaatttatttttatcaataaggcattagtgaatgtggtttgagttctattttggatatccaacactagtctatgttttactcaacattttctgttggaaatcccaatgcttaattatattgaattg

SEQ ID NO: 144715 - DNA, 792 bp, Arabidopsis thaliana landsberg
atggccaacaaaatgaaggatttgtcggattatgatcggtgcaagtaataacgcttcccctcctcttgttttcttgtttgcttgttcggccagaatctacgggaaaagttatctttttttttttctcataagtggaaaatcttattaacgttaaccaaccatacatgggctaaaaaaccaaaagcccaacatacactgagattacaagaacatttgaagtcctaaatgagtccaagaacattgcttaaagatgaagaactgatattgtggctccaaccaatcttacgtgtcaacagctgaaaacaacacagcacacgtttggatgagtaatctaaaagcatttccgacatcttcctttgccgtctgagattgattccggtgagaaaaatcaacattgataatgaaagcaagtttgattcttctgggtttcaccttaaacaaaccaatcgaacttccagataaaaacttagcagctaagggcaatattaatatgcaacgaaaacttcttcttttcttcaacttaagatgcaaatctctaaattgattcctgcaaatctcaaactcaaaagatcgaattggataataaagatctttaagcgaaaaatcacctaaaccattatcaccaacataagatctatgagattattgaaagaaaaacaaaacaacgttggatacaaaccaaatccggccaacgacgctcatggaaacaacgctgccgggcaagagccagccaacactactaaaaaagccagagatgctagacataagacccgactaaatcgggacagataa

SEQ ID NO: 144716 - DNA, 2280 bp, Arabidopsis thaliana landsberg
atggcgaaaggtgtgaagatggcggccttgaaaaaaaaaattaggttttattaggagcgtttatgctctgataccatatagagaatggtaattcttattattcatagtaatgggaagtacacatatatatacagagcctaagaagtgattagggtaaaactaattatataaacacccttaactaagtgataacatatatatatatatatactcttatattctccaccatctttatctctatgcttggtttaataagctgtgtttaatacaaatagaacacacattataaggaacgaaaacatgaactaaatgcaggatttatcacagcatttagagtaaaccgataaaaagacactaaaagaaaaaataaccgtcaatgtgaatagaaagttacgatgaaaagacactagcgaaaaaaagaaattattaatatattaacgaaaagttgcgataaaaagatactaaccaaaaaaataaccatcaatcttaaaatgacaaaaatacaaacgaaaaattgcgataaaaatgtactaacgaaaaaatacaatgttagcgaaaagttacgatgtaaagacataaacaaaaaaaagtaactatcaacattttaaatgttgcgataaaaaaatacaactcttcagaaatgaaaaagacattttgtttttggatttatcatgaaataattaaataatatgtggtaaagaacaaaaatttagaaattatttaagaagaagaacgacacaagttatgttgttttggggattaagggattgagttttcgatttggggattttgttttgtttcgtttagtacaaagcgacgccgttttcggttttaacagaactcattaacgtctgctaacggggttaatcggatctattaatgcgagttaacgtttcgtgattttggacagattaacgttttgtttttgttaaaatggctggtcaatgtttttatcatatttaatttggccgaccttagaatttacgtattgattggctactttttgaatgttcagtataaaacaacatttttcccgatctttatgatatcatttttattgatatgtttctttttttctttttgttaaaggatatgttcttattttgtgacaataatatataataagagttcttgattatgatcaaagtaaactttttttgtagaacccatgacataacatacatgatacaaccaattattcccactttgaggttcctttcactaatattcaactaatattagattattattttattagcttctatacttttaaaaagtttacaataaaaaagtgaacataatctttaaaacagttatttatcgtgaattattttgaaaatagcatttattaacacacattttctcttaaatatctttaatttcgtatttatttcatcaaaataacaatatttaatcgtaattacgaaaattcaaaattggaataaattgttttgctaatcgttatttattgggccataaccagtagagaaagcccgaactaaatatgggccgatacagagagaccctaactcaaatctggaaacaaggacaaaatggtaattcagacaactagtaatgatttatcattattgattcatgatgaatcatcatcatatgtgtaatggtatggtcaaaactgtgttaaaaagatctctatctcttgaaaataaacatacattaaacaaatacgtggcagtaacaacaacaaagttacctctcgctcaaaattgtcccttcttagctcatcattgatccactgagagagaggattacgaatacgagatcggagacatggcggagagtcacggtggtggtggtggttgctgtccgccgatggatctgatgcggtcagaaccgatgcaactcgttcaagtcattgttcccatggaatctgctcatcttaccgtctcttatctcggcgatctcggtctcgtccagttcaaagatgtacgtatagagtttactctctccatgatcgtctctctcgagtgttaagttttattgtattgcgattgcattagaggatatctttagtgaatgttgaactagtttagttgttcttcttatatcggctatttttgatgttgatttcagcttaattctgagaagagcccatttcaaaggacttatgctgctcaggttagttcaagtttatgcgaatgctgaaatgattattatgctatttacacctattgtgtgtgtaatggtggatttgatggataaagataaaaagatgtggggaaatggcacgaaaaatacgtttctttaaagagcgtatgc

SEQ ID NO: 144717 - DNA, 1080 bp, Arabidopsis thaliana landsberg
ttcccggtgtcatgaggagtggttcagacaactcttacttggaatttgaagccaaatctgccagggatggtgcatggtgattcccttgcattcaatcttcagtattttttttgctgacttatgatactttgtaacaatatcattacattccactgcttttctctgatatgtaactctcttgcttacttacaggtatgatgtgcaagctttcctagctcatagaaacttggagattggtgatccggtaattcctaaccaacctcttgttgacttatttgttccccttctttgttttgctaacaacaatctttctgttgggtatttcaggaagtgcaggttcgatttgcgggtttcgaagttgaagaagatgaatggataaatgtcaaaaagcatgtaagacaacggtctctcccatgtgaagcatcagaatgtgttgcagttcttgctggagatctcgtcctttgtttccaggtttagaacttcgctctctaagcatttagtgataggtgtcatgttagtttatccctgactagaactatgttataacatcttcaggaaggaaaagatcaagctctttactttgacgccattgttcttgacgcacagagaagaagacatgatgtcagaggttgtcgttgtaggttcttggtgcgttacagccacgaccagtccgaggttggacgatcatctctctctctctctctctatcccttgcggttttatttacccgtcagctccatttcatggtttagaccataaagcaaaaccctcctcactcacctattttggatttcttttccgttatcccagcaggaaatcgttcccttgaggaagatttgtcggcggcccgagacagattacaggctacaacaacttcacaacgccgtaaacgatttggctaactcaaatcagcatcagatacccgctctagatgcggctgcaaaaacccctctgtcactacccggagctacagttcccattgttgcacccgagtcaaaagatccgagcctgagtgccactccagccactttggttcagcctagctccaatgcagctactgttcccgctggttcagcctag

SEQ ID NO: 144718 - DNA, 1142 bp, Arabidopsis thaliana landsberg
atgagtgctccaaagtttggttatgtattactattgattgtattaatcaatataagcaataatggcgtcgatgcatttcacaaagttttcaagaaattgcaatcaaaatcgacattattggagtcagtaagtcctcttcacagaaccgcttatcactttcaacctccccgccattggatcaatggtacaacatatgtgacatcttattcaagttcatatttattcaacttctattactagggttgtttatatcaaccaaaatacattgttctaacgtaaatttcttgggtttgttgttttgccttcgttttggcattcttgactccaacagatccgaatggtaagtccattacaaatatttttccctttttataagttaatgacaaaaacattatatatatgattgcatgtaacaatattcaaaaattgcaacagctccaatgctctacaagggagtttaccatctcttctaccaatacaatcccaaaggtgcggtttggggtaacattgtgtgggctcactcggtttctaaggacttgatcaattgggaagcccttgaaccagccatttacccatccaaatggttcgacatcaacggtacatggtccggttcagctacccacgtaccgggaaaaggaccggttatcctctacaccggcatcaccgagaaccagactcaaattcaaaactacgccattccacaagatctttccgacccatacctcaagacatggataaagccagacgataaccccatcgtaaaacccgataatggcgagaacggatccgctttccgtgacccgaccacggcttggttcaacaaaaaagatgggtattggagaatgcttgttggctcaaagagaaagaacagaggaattgcttatatgtacaagagccgtgacttcaaaaaatgggtcaaaagcaaacgtcctatccactcaagaaagaaaaccggtatgtgggaatgtcccgatttcttcccggtatccgtaaccgacaagaaaaacggtttggacttcagctacgacggtccaaacgccaagcatgtgttgaaggttagtttggacttgaccagatacgagtactacactcttaaaacgaaagacacaaagaaagatcgatacaggccagacggttacgct

SEQ ID NO: 144719 - DNA, 1834 bp, Arabidopsis thaliana landsberg; identical to SEQ ID NO: 60956

SEQ ID NO: 144720 - DNA, 833 bp, Arabidopsis thaliana landsberg
atagtcggagaagacgaaaacgaaagttccgaagaagaagaagaagaaggagaaaagatgatttaccgaaagtggagtttgctgtccggcccaccggttatcctcggcggagcggtaattgctgccgtcgccgtcggattcgtcttgcaaaacgtattctccttctctttctcttgtttggtcgttagatctatatcttcattggctgctttttctctccttcttcacaatttttcatgtgttgcgctcctcctttgatcttattcggatcacaaatactcttgatgagttagtaatttggccttttgaaacattgaggcacgaaaggaacaacctttaattgaaaatttgtgttctttcatagtcttcgttgatggatcaggattgcctttatttgtgtgttgataaaggttatgaatttgatccgtatcaggcgactaagcttctttctcgatcttctggagattatatgtttgaatacataaaccaatttcatctttttttgttggtaactttgatccaaagatttagatttggagtctgacttttggtgtctgatgatcaggtaacgaaaggggagcagaagaagaatgtctcaacaaacaagtgagaagacaaatggagagatgctacaaaatgtggtgatcatgtgatttgatacaatttagttcttgcagtgtataagctcaataatgcttttgtaagcttttgaatacacagatctttgtggtgtttttagattcttgttactaataatgatatttcattttccactttctcattctttacattgatcataaggctctgtaaagttagaaaaaagtttagcctag

SEQ ID NO: 144721 - DNA, 2643 bp, Arabidopsis thaliana landsberg
atgaacaaaacgagcaaacacgcatggttaatggaacttaattcggtatgtaacgattcgggttggagatggaatgggaactagaacttttgcaatcaatatttttgctccaggagtgtattaaatttaagtgatacatgaattgaatttttatttttaaaatgagatgcatttttataaaatattcttatgttgtgtttaataatttttttttcttagttattatcaatagtagaaaacgttgaaacgtgtttatagtatatatattttacaatgcaagcttggatagtttacataacgcgcgtagttatatgatggcaacaaaaagatgtagttatatcttacatgtgtacggagaacaaatatctaaactaattaattagctagtttgagtcctggtagaatattggaaaattagattacgttttttaatacaatgatgaaaaccatcaaattaaatatattatttatttggatggttagctagaaagctatcaaccgatcaatggtttaattatattattggtcatgccaaaggaacaaattacccataagttttaagggtttctttgcagtttagtaacgcctatattaaaagctcatttatttttatttggtttaaaggaaaaagaaaggtcgcttaaatgcctgcgataataatataacccaaggtttggcataaaagtttgaccccagaataatacacgccaagagtgcatcccccatagaattatagaatattttccatttttaaaaaacatagaaatatctgagaccgtcaatctgcgatgttcttctctctcttttaccacgaaacgacgacgtccctagcatataagcatggagccgttacacatattaccatgtctctatatatagtgaccccttggcctcgctagttaattcatatcgaagaaaactcaaatagaggaatcaagagtcgaagatctctatatattttcccttctcttgtttccttattagttttttccgacactcccattcaaaagtagaaagatactgaagagctcgctcattcacaaaataaccaaaatggttctcactcacaacgtattggcagttacatttggagtcctgggtaagtttcaagcattcataaacaaacatcaagttatacaaaactatatactatatcactgttattataagtgcatatcaaatttaactttgttatctttacctatatgtatttttgtaggtaacatcatatcgttcatcgttttcttggcaccagtgtaagcatcatcgatctcaaacgtacacttctatttttatctgctttctcttaacaaagaaaaatgttttggacattattttcaggccaacttttgtaagaatctgcaagaaaaaatcgatagaaggttttgaatcacttccctacgtgtcagccctctttagcgcgatgctatggatttactatgctctgcaaaaagatggagcaggcttccttctcattaccataaacgctgtgggatgcttcatcgaaaccatctacatcatcctcttcatcacctatgctaacaagaaagctagagtacgtttaaaccatcccatttcttttggtatattaaaacatgcactcatacatacaggtttagctgatgatgataaaccatgtagatatcaactttgaaggttcttgggctcttgaatttcttgggttggggtgctattattctcgtctgcgagctcctaaccaaaggatcgaaccgtgagaaagtccttggagggatttgcgtcggattttctgtttgtgttttcgcagctcctttgagcatcatggtacgtacatacttatgtgacatgtatcacacgcactcagaaaaaagaaatgtttgtctatctaaaaagagccatgctaattcatatagagaatataatatactctaaaataaaagaaactaatatttgtctttccttttccggtaatagcatctctttatgtttacgtatattatatagttctctaacatgtgaaattgtataaaatgatgacgcagagagtggtgatacgaacaaagagtgtggagtttatgcctttctctctatcattgtttcttacaatcagcgccattacgtggctcttctacggtcttgctattaaagacttctacgttgcggtgagtctctctttttttcttatattatatgtgaatctttttctttagtatatgaaaatggacagctcaaacatagtatcatatattattatgggtggtttatgttaaaggcaaaagagtttccaccaccttttgtctctttgcccaaattccatctatttaaagacgacgaatgaatgatttgagccgtacgctacttttgctttatgcttacaatcatatattatatgatcacgtaaaagaaaccgagagtacaattatataaagttttttaggttgtcggcgattgataggattactgttccctatcaaaaaatgattagtgggattgttactgatgatgtgattacttttttatgatttgaagcttccaaatatattgggtgcgtttctcggagcagtccaaatgattctatacgtcatattcaagtactacaaaactccactagtggttgatgagacagagaagcccaaaacggtgtcggatcattccatcaacatg

SEQ ID NO: 144722 - DNA, 3574 bp, Arabidopsis thaliana landsberg
attgtgtgggatgacggggttagactttccaaacggagaattgaacgtgaacaaggtcgcaatgatgcagaagaggatcttctttctgagctttctgaaggagagaaggataagaatgatggagagaaggagaagagtgaagttgttacaactctcgaaccacctcgagatcacatgccccgtatccgctctgaaatgcaaatttggtcagaagatgataaatcaagtcgaaacctttacattgtcttaatcaggcaagtagagattggtttatctgacttatttgttgttttcaatatgcttatgggacttacctggtgcctctatttggttccatactttgccaactgcagcatgcatggactcgtgcgtggagaaaacatggagcttggaagagactctgatactggtgggcatggtatttagccatcttctagtagacctctttgtaaagcttaaattatttaaggtgcttcacgtgtcgactctggctttcttatatttgtatcaatctgaagagtcttgttaatggacgaataggtgaaatatgttgttgagcttgctcgtgcgttggccaacactgaaggtgtccacagggtcgatctcttaacacggcagatcagttcaccagaggttgactacagctacggcgagccagttgagatgttatcatgccctccagaaggtagcgacagctgtggctcctacattatccgcatcccctgcggttctcgggacaagtactatcacataagactcctttgaatttctgtattaaaatttctactttgaaaaaaaaaacagctagtttttctatactcatgtttgttaaatgcaggtacataccaaaggagtcactctggccccatattccggagtttgttgacggggcgctaaatcacatagtgagcatagcaaggtcgctgggagagcaagtgaatggagggaaaccaatatggccttatgtaattcatggccactatgctgatgcaggagaagtagccgcacatttggcaggagcgttaaatgtgccaatggttctaactggtcactctttgggaaggaataagtttgagcagttgcttcaacaagggagaattaccagagaggatattgacagaacatataaaatcatgaggaggatagaagctgaagaacagagcctagatgcagccgagatggtggtgacaagcacacgacaagagattgaggcacagtgggggctgtatgacggttttgatatcaagctggagaggaagctcagggttagaagacggcgtggagtcagctgccttggtagatacatgccacgaatggtggtataagtcctttcccgcctcccatagcatctgataaatgacaacataattattatcaaaataaattataatcacatagacactgcagttgactggtgcagctaaaagaacagaaaatttaattgaaagtaaagtcattcaccaatctgacctgtctttgtggcatcaggttataccgccaggcatggatttcagctacgtcttgacacaagattcacaggaacccgatggggatcttaagtcgctaattggccctgaccgaaaccagataaaaaagcctgtgcctccaatatggtccgaggtactctttttttcattattgtgttatatccaatctcatgcaagaaaggttacactcttgtttttccccatctttcaatccattgagcaagtaactacatgaaccttttacctgcagataatgagatttttctcaaatcctcataaaccaacaatacttgcgctgtcacgtcctgaccacaagaaaaatgtcaccacattggtcaaagcttttggtgaatgtcagcctcttcgagaactagccaacctggtaggtatctcagcatttattacacatgcgttatccagtgaactcacatatgtataagaagattgtgaatgagcatactactaatccacctaaattgctaataaaactgtgccaggtacttatactaggtaaccgagatgacatcgaagagatgcctaatagcagctcagttgttctcatgaatgtactaaagctgatagaccagtacgacttgtacggccaagtagcttatccaaagcatcataaacaatctgaagttccagatatttaccgcttagcagccaaaactaaggtactttccacgaaaattctattaaacaatatgagtatataactcacattgtttactacttccgtgattccagtagaacatacatcagagacttttataatgcagcatctacaattattagttccatgtggtagacctttggtagtttctcctgagtctacatggtacaaaaacaatgttatcgttagtagtttaccagaactcttagctcatccttctttgcaaaatgaacaccgtaattataaggtggttttctctcttaaagggggttttcatcaatccagctctggtggagccgtttggtctcacgctcattgaggtaactagcatatatatctatgtgtttcccttatgagatacacaaccttgtgagatcttcatgccgcgccatttgttgtgcatatgacaggcagctgcttatggtctgcccattgttgccaccagaaatggagggcctgttgatatcgtgaaggtaatcaaatctcttattacaaagctaactgtataaagacatagtcacacctcactgatcccataaagcttattaacagtgcatatgttctatcgcaggcactaaataatggtctcctagtcgacccccatgatcaacaagccatttctgatgcccttctaaagctagttgctaacaaacatctctgggctgagtgtagaaaaaacggactcaagaacatccaccgtttttcatggccagagcactgccgtaactacctatcccatgtcgaacattgcagaaaccgtcaccctaccagtagtctagacatcatgaaagttccagaagagctcacaagtgattctctacgagatgtcgatgacatatctttgagattctccacagaaggagatttcactttcaacggagaactagatgcaggtaccagacagaagaaactagtcgatgccataagtcaaatgaattcaatgaaaggtcgcccagctgctatctacagccctggtagaaggcagatgctctttgtggttgctgttgattcctatgatgacaacggaaacatcaaaccgaatttgaacgaaatcatcaagaatatgataaaagctgcagatttgacatcgggtaaaggaaaaataggttttgtgctagcctcaggttcaagcttacaagaagttgtggagattacgcagaaaaacctgattaatctggaagattttgatgcaatagtttgcaacagcggaagtgagatctactatccatggagagatatgatggttgatgcagactatgaaactcatgtggaatacaaatggcctggtgaaagtataaggtcggtgattctgagacttgtatgtacggaacctgcaactgaggatgatatcacagagtatgcgagttcatgcagtacaagatgctatgcaatttctgtgaaacaaggagtcaag

SEQ ID NO: 144723 - DNA, 1350 bp, Arabidopsis thaliana landsberg
gtgttgctcttccagattccagatcctgaagaaggtgaaatcttatctgtgatccattggaagattgaatcaagtaacagattcacttagttcacttgcgtattgcatgcccctgaagataacattttgaataatgttgatattgaattattacctataagctctggttcttgttgcttgtattggttctgggtatctactagtgaagaaaccatggcttttggttctcctaggaataattctatattagctgcggctggatttcctcggaaagtgtctacagttgcaattgctattggtggtttggcatcattctttgttttcggattgttgcttcgtctttcgtatccgaatagttcttcagttggtggcatattttatgggatagggaatcctgaacaagttcatgtccctttatctttgagcttccatactgtcaatatccttcagaagagtagggacatcaatgcgtttgataaaaatctgacttctgattctagctctggcttacctgttgttgttagcaaaagtataccacctccagatttcagtagtgataggaagttggagacacctttgacacaagaaaaagaggatttggtttcttcggatataactgaaaagactgatgttcaatcaggtgaacgtgaaaccaatgtttccaaggctgaagacactccaagtgcatcatctcctccagatgatgtctctgaaactgcttcagcagaaccaggtactgttgttatcttttaaacgcttatttccgtttacgtagcttttgtcgtatttggaacattttgagttatggtagcttaaatttcaataaacaaagactaagctagtgtgggaatgttatagaacatttagctttgcatttctatggaaaggcgtaagtttctgagaagttttaaagaaattcagcggctaaactcttagctatagacctactgtaattattctagccgaggactgaatatagcagattagagtaaaaacttgcattgagagcaaataacgacgtgcagagctagtcgaggggttctaacgaattgtattcgggattaataaatactaggacatctctggcgagctgtatgattactttacctgcgtatttattatatatatacaaatgcattctgaatactatgataattgaactgtgtgaagttgaaaaaaaaaaagaaaaaaaaaaagtaaattgacaggtaaacggaaacaactgccaaagcctaacggtatcgctgccttaaaacgtactttcggtcgtggaaaatgggcccacctcatcatccccacggctttcctacgctttctgactcagttccttcttggcccacaggcccataa

SEQ ID NO: 144724 - DNA, 1833 bp, Arabidopsis thaliana landsberg
  unsure (1)..(1833): unsure at all n locations
tgagcgtttcaagcttctgcagtttaatgggagactaaggagtcatttgagtgaaacgtttggaactttggaaacagatggagtgtcgtttggagttgaagaaaggttcttgtgatagaccaccatttgtagctgctgagaagaaggtattaactaaggaaagctcaaaggcatttacaccggataagtttagagacgataaacgcgggttatcttactccgatttccaccgcgagatcacgaaaaaagttgaagatgtatgtcctaaacgcttggagaatcgtttgaagtcaaggataggtagaactgcttcaggagaaagagatcttgtgaagtacaagtcttatgtgccgagttatataaagaaatgtgataaagttgaagacaagagtgttaaagctggtggtgttattggttcacaggagctaaggaatatgcaagggattgataaactgatggataagcatacgaggtcttccttgtctaatacaagtacatcgtcttctctctggactgatgagtcatcgactgattccagtagaggtctttgtgcttctccttttcgtaaaaagatcaatcaccctcctttgcagtattatctcatgtcttctaagcctggagataattttcaagatttggagccacctcaagataacggtgatacttctcacagtcatagaagagatgggcagtttcatcagacccctcgtgcaactgcggtccaacagaatgagaagaaagatactgatgttaagattgttccaaagacaagaactctctttagtccatcgaagccagatagtccttcttgcacaaggataatatcaaagaatctagccgaggattttaagaagaaaggagagaagttggaagagagaatccgaaatcctcgtgttcatgatctctttggaaaagaaaagcctgctgctgtatttgtaccagggattgtttctcagaaacagtttattggtttgtccaagttctatgattcgaaagtgttactagctgagcgattggcggaaagtaaccgaaaggggttcccagagaggttagcgcatgggaaaactgcagttcttgactctgatgtannnnnnnnnnnnnnnnnnnnnnnnggaggaagtaagccattcttaaaacgtatcagcttcttatcagaaagatcatgttcagctccacgatcaagaaaggctgaatctagtccctctagaagcaggactctagatagaaggtcaacagaaacattacctaaacagtcagatcagaaaccagctaaagtcttatcagaaagagctaggagcatttcaccatttcgccgactcagcttcagcattggaaagtccagtaaaaactccaacaccgaagatgctaagactcctccacacttaagcacagcacttatttcatcacgagctggtttagacaatccatctgcctcttctttcagtgacagctcttcttttgataaaaccagtgcagcaaacagaggcaggtctagtccattgagaaggttactcgatcctttaataaaaccaaaatcaagccactcatgtagatctcctgagccatcactaaaggaagcaccttcaagtcaaccatcttcgtcatcctttctgtcgagaaatggaaaatcttcaactgttcaggctctatttcgtgtgacatctaagaatgatcaaccactcttcacttttgcggttgaaaaggaacaaagtattacagcagctacaataagaaaacagactctccagagaaggaagactatggacacaagtatactttttcactgttaagaagacagaagaaaaatgcaaatggatgaacacagcggaaagt

SEQ ID NO: 144725 - DNA, 686 bp, Arabidopsis thaliana landsberg
caatgtaatggcaaggccaaattaattatttgtattacatcattttcacttattacaaaatgaatgagcaccacaccattcacagaatcaattagcacatttttaatcccaaaaaaactgggatcaaaaattttataaaaaaggtgaaaaaaagaggattgagtttgagttagcaagcacttccaccggttgtaacacaatggttaagtgcagaaaaccaagaacgtttcccttcaacctgcgacgttgatcgcctgaatcctacaccggatcttgaatatgatccaccaattaaccggcttcgaggttcatcaacatctgagccaccaaggcagagacttggaggaaaccggcggcagctaagagaccgaaacgctgatgatctagcggattgtggagttcgagaacccgttcttgacacaaccggtttacaactgttagtgggggtagttaggagagctgtgtctaagacatcagaggagcaagtgcagaaggacaaggagatgcttgttcttgatgatgttgatgttcttgttgttgccgttgtatggggaagtttggtgaaagatacaatgccattgcgacagagaggacacgggacagagcctggtgtgacgtttgaggtctttgacgatgttatgcttgtggtgcttaggtataatgcacagtttgtgcagaactcatga

SEQ ID NO: 144726 - DNA, 1441 bp, Arabidopsis thaliana landsberg
ttggttattaaaatggtggccaccgtttaagaaggctaacttgggaaaatggttcaacaatataatgattcattcacccctaattaaagatatagctcttgcccattggaactgaaagtctaactgtctttgttttggccagcttcttttctctgttttcagtcatgctcttatgagacctatgagcaacagtgcgttgtcttttcctacggaaattgtgttgtcataaaatccctgtgtatttgtttcttttctaggctctattaaaggctcttggtgagcgtaaagggattaaccggtttggtgacttcacagctcctctagatgaagcgcttatacatgtttccttggtataaaattgtgaaacttttgcttgcatctgtgtttattctctcattactggatatttctctagactttcttgctgcttatagtgaacaaaaacctcttgcaggacttgtctggtcgaccatatcttggttacaacttggagataccaactcagagagttggaacatatgatactcaggttctctctttgctcctggaattgtcttcttttgggtttatctgtgttattcgttgtttagtaatcattgaaagtgttgccaaaaattgtttaacctttcgatttgtagttggtggagcactttttccagtcgttggtgaatacttctggtatgactcttcacatccggcaggtactttgtgattcaaatcttccaaaagctaacaaaatcatgcagtttcatgagtttcttctatcctctgtctgtggaccatttcataacagttttaatatttgtttgttacaacagctcgctggtgaaaactctcatcacataatagaggcgacgtttaaggcgtttgccagagctctacgacaagcaacagagactgatccacgccgtggtgggacaataccaaggtttgactgatcctcttatcctccactacattctacatacactaagtaaagataaatatcagatataacgcaagattcattacatcaaagaaatagataatcttttatgtcaaaacaagccaaattatcttgatgaatgtatatcattggaaaacgtgtttgatgtgtgatggttcatggcatttgcagttcaaaaggagtcttatcacggtcttgaaagctaatcaaacacacaagacagttcccagattcacacttcatcgtcgagttcatgagccatcgtcaattctcttatggtaccaaatgccaagcctgttggatcttgctgttccattccattacagaagcacaaagagcaaaatgtgaaaatagattagagatcacacagttcagaagatcataggctcatctttatattaatctgttgttgcagagtgtattaaacctcttaccattgctgtatcatcatcaactgagaacttactgtgagttgaagtgactgtaatttgcttt

SEQ ID NO: 144727 - DNA, 1091 bp, Arabidopsis thaliana landsberg
gaattttgcctaaaaaggaaaaaaaatcaatttcgacggccgtttttgtctctcatcgtagggattcctatctctcactactcagatgcttccttcttcactttaatcacccttttcgattttcgttttccagctttttgattcctctgtttcaccaagtagacgaagtagaagaagaagaagaagaaagttttcacctttactctaaaagtttcactttttatgtctgctttgaagctctgagatcggagaaagcaatatctatggcggaagcaagacgattcagcccagttcatgaattaggtgaagtgaaagttttcttctttctgaagtatttgagatatttttgtttgcgtgggtcaaatcaaatctttatccgatctatttggtgtgagtattggtatatagtcatcaaagtttcaatctttatctattggaatctattcaaaagggcatttttatccattattggtgtgagtgatgatttgttcttgttgaaagtatattttatctgaatattcatcacttacttattagtttacttatccaagttgataacgaatctattctaaatcatgttcatcatttttagtgggttactttttacttctttactctttaagtttctatgcataatttatgattgttataggcagctaagaatatcttgggaaatttagtatcgtgtgttggttatactttaattagctgcttcttgtgaggaagttgactttttagctactacatcagaaggtactatagtgtctcttaaaagctttcttgatgaatgatatcttcttagttgtactaatttttgtgtgtcttctgattgcaataattgttgtccacagatgttggacaaatactctcagaagcacgacatcgatggcttcgtcctcctgaaatctgtgaaattttacagaattaccaaagatttcaaatttctactgagccacctactacaccatcaagtacagctaaagtttttcataaacattcagtgtagaatggaacttaaaagttctaagactgatgttcatgggtaatctcttcctcttttcaagtgggtctgtttttatgtttgatcgaaa

SEQ ID NO: 144728 - DNA, 530 bp, Arabidopsis thaliana landsberg
ttcttctgggaccactggcgcttacagcttttatttttggacggtaagagcatttaaattcgtatttatgaacttgggaagctatatatgttatcacctgtataatcatcaatacttatcaggttgcctgtgtgtataagatagagaataaggcttagtgtaaagacttatgtaacgggctgttttaccatgtttctttgtagttttgatgtgattttgaatagaattgctactttctttctttacaggaggttgataattgcaaatgctggtgattgccgagcagtactggggagaagaggtagggcaattgagttgtccaaagatcacaaaccaaactgcacagccgagaaagtaagaatagaaaagttaggtggagttgtgtatgacggttacctcaacgggcaactatcagttgcacgtgccattggagactggcacatgaaaggtcccaaaggctctgcttgtccgctaagaaaagagccagagttgcaagagacagacctgagtgaagacgacgagttcttata

SEQ ID NO: 144729 - DNA, 457 bp, Arabidopsis thaliana landsberg
cagccacaaagtaaaaactccactgtcgtcttccgtagtgatgcttctttctgcaatcgcttctcagacccttctctcatcaaaccctaatctacacttctccaattctattccaaaccctagaccttctaatccctcccttaagctccccaatgcctcttcttcttcctcctcctcctcgtcgtcttctatatttacacgcggtctccgttacgtaaaccacactgtatccaatgaagaatcagaacccggaggaggagagaccatggttgcttctgcttccgctatagcttccgcgattcgtggagcttcaacaactcctgtagagttcacgcagatgattgagaaagaccatctcaagactaagattatcttgccaagtcctgattttcaacggctttgtcttgagcaattagatctctttcgtcaaatcgttgatccaaacgcagtactctcg

SEQ ID NO: 144730 - DNA, 3085 bp, Arabidopsis thaliana landsberg
  unsure (1)..(3085): unsure at all n locations
attcatcatcaccttcatctctctcttcctctcatcagacttcaccgttcttctttctctcttcttcatcttcagacgaaacctcctttacttccccttcaaggttttatatttcccaaatcctacacctgctcacatctcaagctcaagttttgttttcccgggaaaagtgacacaaacaagaacttaacangggagaagaaaaagcttatattcatatcaacggttgacgttggaaagctattaagatttgtttttctacaaatttgttcttcctgaaacgtcacgagacagagcttccaagaagagaaaacagaggaaatttcgttgcattttttttacatattgattcgattaatggattcaaataatcatctctacgacccgaatcccaccgggtcgggtcttcttcgttttagatcagctccgagctctgttctcgccgcttttgttgacgacgacaagattggtttcgactccgataggttgctttcaagattcgtgacctctaatggcgttaacggagatctgggttcacctaaattcgaggataagtctccggtttcgttaacgaacacctctgtttcatacgccgccactctgccgccaccgccgcagcttgagccgtcgagttttctgggtttgccgccgcattacccgaggcagagtaaagggataatgaactcggttggtttggatcagtttctcggtatcaataatcatcacaccaaaccagttgaatctaatcttctccgtcaaagcagctctccggccggaatgtttactaatctctctgaccaaaacggtaccgttttgctctctgctacaaagtttttccccctttttttagtctgaaatctttttttcatttataacagaagtgtttttggtacttcttgttcaacttttttgaatgttttaacacttgcttcaagatttttgaatgttttacgttccttgagaataattttaagacaagatctgatttgattttgtcaaccatagagttaaagcactttggactcaacaaatctaataagtgtttactatatacttacaaatttgcaggttatggttcaatgaggaatttgatgaattacgaagaagatgaagagagtccatctaattccaatggattaagacgccattgcagtctctcttcaaggccaccttcttcacttggaatgctttctcaaatacctgaaatcgcacccgaaactaattttccatatagccattggaatgatccatccagctttattgataacttatcctcacttaaaagagaagccgaggacgatggaaaattgtttctcggagctcaggtaactcggttatctaaccggtttgttttggttattgatcagtagctgaaagtggagttgatttcttggagtggtttctaatgatgtttttgatgggtttctacagaacggagagtccgggaatcgtatgcagttactgtcgcatcatttgagcctaccaaagtcatcatcgacagcctcggacatggtttcagtggataagtatcttcagctacaagattctgttccttgtaaaatcagagccaaacgtggttgcgctacacatcctcgaagcatcgctgaacgggtaacttcacctagttaaggccatctttacatatatcaatggaagtccatttgaagcagaatctagtttgttttcagaaagcctttcctaagaaatcttgtcaattgtgtcaggtaagaagaacgcggataagcgagcgaatgaggaagttacaagagcttgttcctaacatggacaaggtacagttttcaggaacttccttgtaatgacttttgatcataaacaaattgttaaatgatgttgttttctttatgttttaacagcaaaccaacacttcggatatgttggatttagctgtggattacatcaaagatttacaaagacagtataaggtaaagttcctgatcattgtggaaaaaaaacaaaggggcctgtttagtcttctgttgaattgatttagtcttctgttggttttacacagattttaaacgacaacagagctaactgtaagtgtatgaacaaggagaagaagtcaatatagggcgcaacaaagtgtgtagtagataggactaaaaagcagggagaaggacaagaaagaaacaatgtcatgtctgaatattttttagccgaaacagaccaaattgtctatgtaagctctcgagaaaagcatctgcttccaacaaaattctaagtaataaaatagtactcgatttgttcttatttcattacaatgcagaatctactaatcaaatgttgtactacaaaaggtaagatcaactacggtagctaaatgcgaaaattatgaccagaagaacaaagaaagactcgaaaactaagcagaaaacataaattattcttccatgtgatctgcagcgtcagaatctttgatatcaccagtaagactactcctggtcacaaccaaagtaagaatcacacatgaagtagagtgtatacgacttctctcctggttcagttggtactgcaaactccagctacgatgcagaatctagtaagcaaatgttgatattacaaaaggtaagatcgaccacagtagctaaatgcgaaaattatgaccagaaaacaaagaaagacgcgaaaactaaccagaaaacataaatcattcttccatgtgatctgcggcatcagaatctttgacatcaacagtgaaagaatactcctggtcacaacccaagtaagaatcgcacatgaagtagagtgtatacgacttctctcctgtttcagttggtactgcaaactccagcttcaccttcgccttccgttgcagggagattctcttgatggccatcaactggttcgtcttggcttctccaaatgtnnnnnnnnnnnnnnnnnnacattgccagattctgcaaccgcttccccaacattgaccttacatatgagattgtgggaagtaacgaggtaagccctggaaaagatatcacattgcaggtattactggagagagacatggagggaaggaccgaggtgggacctgtggacgcgccaagatatcctaagactaaagaagaag

SEQ ID NO: 144731 - DNA, 2515 bp, Arabidopsis thaliana landsberg
ctctccgggtcatcggaatttgagctagtttagctaaagttccgatctttcctctctgggtcgtcggaatttgagctttttaaaatcatgggaaattgttttgccaagaaccatggattgatgaagccacagcaaaatggtaataccactagatcagttgaagtaggagtaaccaaccaagatccaccgtcgtatactccacaagcgagaaccactcagcagccggagaaaccaggttccgtgaatagtcaaccaccaccgtggagggcggcggctgcagcaccaggactaagtcccaagaccaccactaagagcaattcaatactagagaacgctttcgaagacgtgaagctcttttacacattgggtaaagagctaggtcgtggtcaatttggggtaacgtatctgtgcacagagaattccacggggaagaagtacgcttgcaaatcgatctcgaagaagaagctggtgactaaagctgataaggatgatatgaggagagagattcagataatgcagcatttgagtgggcagcctaatattgtggagtttaaaggagcttatgaggatgagaaagctgtgaatttggtgatggagctttgtgctggtggtgaattgtttgatagaatcattgctaagggacattacagtgagagagcagctgcttctgtttgtagacagattgttaatgttgtcaatatttgtcatttcatgggtgtgatgcatagagacttaaagcctgagaatttcttgttatctagcaaagatgagaaggctcttatcaaagccactgatttcggattatcagtctttatcgaagaaggtatattacatcttttgttgtattggtgatatgtcttttggaattggttcattcatgatggtttattttgcagggagagtgtataaagatatagttgggagtgcatattatgttgctcctgaagttttgaagcggagatatggtaaagaaatcgatatatggagtgctggaattatactatacattctacttagtggtgtgcctccgttttgggctggtaaatgcgatgaaattatcggttatttcgattcatatatatttgagaagaatgtagttgcatgtgtgtatgagtatggattgttggctttgggaatgtagaaacggagaaagggatatttgatgctatattggaaggtgaaatcgactttgaatcccaaccttggccctcaatttccaatagtgctaaagatttggtacgtagaatgttgacacaagatccgaaaagacggatttctgctgctgaagttcttagtaagtaaacgatcttattctttgttggttatggtaacttcttgtatacttacttgaatgttgacaatatggttgatgttttaccttttgaagagcatccatggctaagagaaggtggagaagcatcagataagcctattgatagtgctgttctctcaaggatgaagcaatttagagcgatgaataaactaaagaaacttgctttaaaggttagatcaaagattctacaccttgttgccagatttgacagtcctttgtacctttcatcttacagattgattttgacacaggtcattgcggagaacattgacacggaagaaatacaaggcttaaaggcgatgtttgctaatatagatacagacaatagtggtactatcacatacgaagaattgaaagaaggattagccaaactgggatcaagactcactgaagctgaagtgaaacagctcatggatgctgtaagttttgatcaagacaagatcgttcatttacttcttgaatgtttaaaaactcctattcgggtttttgtgattcaggctgacgttgatggaaatgggtcaatagattacattgagtttattactgcaacaatgcatagacataggcttgaaagtaatgagaacgtttacaaagccttccaacattttgacaaagatgggagtgggtaagtgatccttcttttggtatgaatcattttgcaatgtaaatagatttgtttgcattgattgatgagactattactgaaaatgtgtgtaatggatacattacgacagacgagctagaggctgctttgaaggaatatggaatgggagatgatgctactatcaaagagattttgtctgatgtcgacgctgataatgtaaaagccaaaagattaaagctcttctcccttgtaacgtttttcgttttctttctctgacctcaaattttgtttcttgttacaggacggtagaatcaactatgacgagttttgtgctatgatgagaagtgggaatccacaacaaccaagattgttctaacatattttatttgtcttctgtctgaatctaatcaaaaaagacaagagtggtattattattgttgtttaggcaaaaatttaaggatgaaaagagagagagagagatgattgctttcatttattttggtactgctaaactggtcatctcatttggtttgaaggaccaataaaagtatataacagaggaagataacacaatgtaa

SEQ ID NO: 144732 - DNA, 536 bp, Arabidopsis thaliana landsberg
catatttcgcagtttgtacaagtcctcaggcgtgaattagaaaaagtggagacagaaaaggaagaattcatcagcgacttctcagaagtaaaaacatttctcacaactaattcatttgagcaaaacacctgtttgttgtgttctcatattgatcacaaaatcttattattacaggaggattacaatgacattgttggaggatggtcggcaaagcttgaaaggactgcatctggtgaacagaaatggggattattcatagccgacaagaagtaaaatccatgtttttatcccaaaactctggtgattcatttcccttcaataaaaccgttcctttggaggacaatatctgcttgtttactatcatggaactgcaaatcaaaagataaactcatgtgttgtttcgattcttactcgagtcgttgtgccacataaaacctgcattgctttgattttccattaaatatctgcataacattcaagggtaatcgatgttttttgttcttagtgtattcaagaacaaagttacatttatgaca

SEQ ID NO: 144733 - DNA, 482 bp, Arabidopsis thaliana landsberg
attcgaaaatctcagctaaagagagaaagagaagcaccatttttctttctcgtcgtgtcatcggtttctcagattcctgaataatcattcccttccgattccaaaatccccaaacctcatccactcctccatctcccggattcggattcccagaatcatgcccatggagaacgacaatggcccacacgttggcaacgtcgtcgtcaccgctgagcaagcgaccaagattaacgagactgatggacggttgccggagaatcggcagaccggtgttgtctctgacaccggaagtggtagcgagagaggagagcaaggggttggagagtcggcagttgctgtggcggtgccggtggaggagagcggatcgatttcggtgggagagctacctgctccccgatcttcctctgctagagttccgtttactaatctaagccaaattgatgcggatcttgctcttgctcgcacactccaagaacaggtgc

SEQ ID NO: 144734 - DNA, 695 bp, Arabidopsis thaliana landsberg
acacggatacagaggagggaaagaagaacccctaaaacccttgagcaaccactatgaatggataatagctgaagagcttttactcaaatcgatacttcgagatgcgatttttgcttcgtttaccacaaattcattttcggaaactctcgtgctcgatgtctgtactcatgggttcgaagcaattcctcgaattttgtcttcttccttcttttgcctcatacccttcttctccttcttattcttcaagtagacaagtatcttccgtttctagaagatttcgaccagttttggcctcgagacctgtgtccaaaaacagtccttattaccaaaggaccaatggtttatcatcttacaattcaatccccagagtcccaactcctggtatgtgttgaattccttagttcgatttctatatatgtttgaaattattgacatttggggttatatttttagtcatttaggagattctggttctgttcttattactcctcttcttgttatttagtcatattgtgtttccatgtgtatgcatttggtttatagctgcttgcaattactataagctatagtaatggaactgtttgatgaagtttctcagcattttctgctttgtagttgatactgaagtagaagcagataagaggggagttctatctagattagtgactttgaggcgtaaattgcggaacaggagt

SEQ ID NO: 144735 - DNA, 968 bp, Arabidopsis thaliana landsberg
gagaatttgcagaacaatttgaaagtcattcaaaacaggtctgattcaatacaattctctctctttcgttttcttaaaaagatgatggttctcgggttttttgacttgttatccctcattttgttcgtgtttgcagccggacgtttctgtctatcatagctggtgtcttagcaggaataattggattcaatggcttgattggttttgtattttactttgtggtgatgttgatcacatctgttgggctcatggctaaggcaggattctcagctgacttgtactttgattcgtggaatcgggttctttttgacggttttcttggtggccttatggtatatcttcatttccttttcttattacattgtttgttgcttcaagatacatgttgttgatccaacctgttaatctcatactaatcgcggtgttgttttctttttcgcagtcgtttgtgctgttctggacgtatccttaaactcaatttggtggtcatactcattttatgataatgtgcaaaactaaatcaaaggttgattagctttatggaaaaacatctatggtatggtgtaggtaaaaatgattagcttcttaagaacctgtgattaacatagaaatggcctttttgtttacttcgtgtagaatcaagtatatgcgcaactcgaaaacagctctctatattctctggctggcccagtaggaggccttaccaatggagtagatttgcgtatgacttggtgcacatattctgagggaacttctgctccagatgaggatggtgaaacggcacacaagattgagttcgggttttgcagcctcttcatctaaactgaattagattgacaatgtttctcttgttccctttttgaacaacagtttatgagttcgtattacctttttttgttatttgagatcacatcaaactgtgaaaacctttagattgaaaagtttcaagtatttacactttcttccaa

SEQ ID NO: 144736 - DNA, 1177 bp, Arabidopsis thaliana landsberg
ctgaatctgatacatcaatacaccaacaacaatggagttaccaaaactattaatctcactctttctcttctcattctcatctttcttcttaggtaattatactcatactcatctaaaaagctcttaatcacataaatgggttctctgaaacccactactaatgattaatattttgaaggtgctgaatcggattatcctcagcatagtaacttgaagagactgagaccgaatagactgttcgtgtttggagattcctatgcagacaccggaaacataaggaaatctctctccgattcttggaaaattccttacggcatcactttcccccaaaaaccttccggtcgtttctccgatggccgcgtcgccaccgattttctaggttttctctctcacacacttttttttgtgacaataaatgaggatatggtgatgtgatccggccaccagattcaacaccaacactaacaaaccgtaggttacgtagattaatgtgttaattatcgaaaaaggaaaaagtatgggtatgttactagctaccatcatgctgacgtggaaatattagaaacctttataggtctgattttgtcgttagattagtaaactattcaagctgtttgtacaaaataaaaagattagtaactgctcaactttttttgaaaattgtgagttatgttttgaatttcatttttgaatcacattaaatctttagaatcgaaccaaaaaaaaaaacaagaaattaattaaactagcctctccgaatacaaacggctgattgcaaatagtgtgggatagtcctgctgcttaatctatgatctacacggtttatttacatactacgattattacttttgaaccatttataaagttttgattcaatttttaatgcatgtgtgcagcaagatacttggggataaagtcaccaattccgtacacgtggaaggattatgccggaaaggaacggctattgtacggaatgaattatgcgtatggaggaacaggagtgtttaagactaaagataatccattgccaaacatgacaactcagattgattatttccaacgtgtcctcgccgccggcaatatctactcgccttccgatctcccctcctccctcgctctgctcagcgtcgccggcaacgactacgccactttcttggccctaaaacgcccactgacc

SEQ ID NO: 144737 - DNA, 3339 bp, Arabidopsis thaliana landsberg
agaagaagaggaagaagaatcagaaatcgtccccaaatccgtcacttccagaagatttgatagtgagcatcttagcccgcgtctcgagatcgtattacacaaatctctccgtagtctcaaaaaccttccgatcaatccttacttcaccggagctttacaaaacccgaaccctcttaggcaaacccgagacttttctctatgtctgcctacgcttccctgatgaagctaatcctcgttggttgattctctaccggaagcctaatcaaaccctaactaagaagaagaagaagaaagaggattcaagtgttcatcttttggctccaattccaattctcaattctccaactgtggaatggtcaagtctagtcgctgttggttcttatctgtacgccattaccgcagacatcaaagattctccatgctctaacgtttggtaccttgactgtcgaacgcacacttggcttgattctccaagattgcgactggctcacatcaatagtgactttaatgggaggacgtatttcccaggaagctctgaaaagccagattctttgaactgtgttgaagtgtacaacacaaatactcagacttggaatcccgtgcctccccaaaaacgaaaactcaaattcggaaatatggaaggaaagatttacatacccccttgtcaagagaatcataggaaggctgtggctctaaacccaaaggttttgacatgggaagcggtaggattgggtacgaatttggataggggttctttttgtatgatagggaacatagcctattgttatgaccccagtgggaagtttagatggatgaagaagacagggaggagtttggagatcattagagggattagaagggctacctaagtttgctagatatagtagtgttaaattagcggaatatggcgggaagctggttgttttgtgggacaagtatgtagctgcaagtgggtataaggagaagatgatttggtgtgcagagatttcgcttgaaaagcgcaacggtgaagagatttgggggaaggtcgagtggtttgatgcggttcttacagtccctaagtcttataaattcgtgtgtgctaaatctgctactgtttgattgatgactcaggacataggtacgaagcttcttttatttaggatgtcacagttgaaagaatgtcttgtatctttttcggaatgcagttgtcattgttttcgccttacaaacacctgcactcacttgcttgtagatgattaagcttattttgtgactgtctctttgataattcctttgatgccaaactctttctcctactgttttttgctctgaatgttgtgttgcaaaatgcctatatttatgtgactatgatgaatgcttctctcatgcttttagcggatattgtttcacttctaaacatatgcactcacttgtagactgtttaagcttactttgtctatgagaatacttttgtttgtcttgcatagaaaagtactgttatctttacatttcacgataagagctagaacaagatacacagttagtgcttgttttgttgtttaaactgaggcttatgttcatgtcttgtacttgtagccaacctaacctacaaagaaattgctactgtaacaatttgaggatcttgtgtgaaaatacgagtggacttgtcaagccactctttcttttcttctcaatcgaacattattattatccaattatatactctctatttttttatgattcaattcaagttagattccattatgcacagaaaattaaattgatcatatgtccaaagctctactgtcatttttgaattttgttgaaattttgaagggttaacttattttgtgccattgaccactatgatgcatttgaaagactttttttttgttgttgaacatacgtgattactagcttcataggaagaaataagtgtaacaaaatatatatagttgacgaatttttggtcctctactggtaattttgagttgtgttgtagaaatttgtggtgactcaaaactattgttttaaggctcattaagattcaatacaaatgaattagataattctataaggcccattaagattcaatgcaaatgatttagataatttctaaaggcccactaagattcaatgaaaatctgcaagtcggagtagaagcagaagaaatcgactaatctcgccaatgtcgtctccagagaagaagaggaagaaacggtcgcttgaaccgtcaccggaatcgaccccaaacccgtcacttcccgatgatttgatagtgagcatcttagcccgagtctctagattgtactacccaattctctcgttagtctccaagatagtcagctctctcgtggcatcgcctgagctgtataagatccgaaagctattaggacacaccgagagttgtctttacgtgcgcctagaatccatgtctggatttgaccgacattggttcactctgtgccgaagaccaactcgaacccctaaccttaactcacgatggttcacttcgcagttattgatgaaaaacttttggtgtcagtccctattcgcaattattgtcctcggtttgggctcaagaatatcatcacacttggttctaatatctacatgattggggaattctcctctacggtcttcttcatggactgtcgatctcacacttggcacgaaggtccaggcatgcaggtggccgcaaagtacaacgaggtgagtgttcttgatgggaaaatatatgtagtggaaagatgcaaagtttgcgcctactggaatatgagacatgttttcgatcccaaaacccaaatatgggagtgtgtggcaagccctagcacggggattcgcgggcgttttggattaaacagcttagctatagatggaaagctttacctgtttggggataaaaatttggtttacaagcctaaagaaaaaacgtgggatgtggtaggatttgagatgaatttccattggattccccatgattcttattgcgtgatagataatgtaatcatctactattacaatagacattccaggttgctcgaatggtatgaccctgaaggaagctcgtggggaattttgaatggtttggaagaactactaccgaaattacctcgagtgttagttagtcgtcatgttagattggtggattatggtggaaaggtcgcgattttttgggagaaggaagtgcgtcctcttatcggctataacaagattaccatttggtgtgctgagattgcgcttgaaagactcaatgcacaagagatttatgggaaaattgagtggtgtaatgttgtgcttacattgcccagttcatgttctattgatgagttaaatgctgtcagtatcattgtctga

SEQ ID NO: 144738 - DNA, 1707 bp, Arabidopsis thaliana landsberg
ctgaaatatctggttctcttgtccttgaaaattttacgaggttgttctctgtgaataatcgatgtctgcttcatgtgctttaacaccgtctgttaggacagagttattcagttcatcatcatctaaaagatcaatctttcctgctagaatttgtcgaccaagtaagattcaactccaacctttcatttagatgtgcccctaagcctgaattatgaacaatctgtttaatctttgcaatgaaggaaacaaatgtgaaatcagcagaagggattttgcaattaggggagggattgttgcttctggagtttcagtcatggatacttcttctgcttcttctcagtctgttcaaggtaaaaaaaaactagctttggaactattgcttctctcttggtctaaaaatgtcatctttgttaaaaagaatttggatgattctttaggtagtgagaggttggcttttaaaccagaaggctataacttttgggaatggagaggtcacaagattcattatgttgttcaaggagaaggctcgcctctagttcttattcatggttttggtgcttctgtctttcattggaggtaccttcaatctcacctccatgctctattgatcagtgtaggctttaagtcaactttttaccttatcatacgaattcgagctaatatcggtagatttttataggtataacattcctgaattggctaagaaatacaaggtttacgccttggacttactcggtttcggatggagtgacaaagctctcatagagtatgatgccatggtttggacagatcaagttattgatttcatgaaagaggtagtgaaagaaccagctgttgtcgttggaaacaggtaaatgaatgtcttctttgaagctctttttgacattccacaaggaagtctgaaacaagttcttccacttctttacagccttgggggatctacggcattgtcagttgcggttggattacccgagcaagtcacgggagttgcacttctgaactctgcgggacaatttgcagccgagagtagaaaacgagaggaagctgatgaaactgtgataaccaagtttatagttaagccgctaaaagagattttccaacgtgtggttcttgggttcttgttctggcaagccaagcaaccttctcgaatcgaatctgtcttaaagagtgtaatgtcttattaacttctgtcagacttcatctcaagtatgttactttgtacttagttttttcttgtttttgcaggtgtacatagactctactaatgtcgatgactacctcgtcgaatccatttcaaaacctgcaacagatccaaatgctggagaagtatactacaggtactaaaccccaataaagagtttctctgttttgatacataataaagagacctaactgttgtttgtttcgtgtgttaatatcttacagattgatgacaaggttcttaacaaaccagagtagatacactctagatagcgttctaagtaagatgacttgtccgcttctgttggtttggggagatcttgatccgtgggtcggtccagctaaagccgagaaaatcaaagcattttactcgaactcatcgctcgttcacttacaagcagggcattgtcctcatgatgaagtcccggaagctgtaaacaaggctttgttggattggttgtccattaatattgcttcaaagccagcttctcctatagtcttggagac

SEQ ID NO: 144739 - DNA, 2545 bp, Arabidopsis thaliana landsberg
  unsure (1)..(2545): unsure at all n locations
atggaaggagaaaacggcgaactaggacttgaattggaacgatccgtcttgaatctcaacatgttagtacatggactcatcggagaagaagcagatccttgaccacctgcaggagacaaacaaggagaagcaaaatcagatccgaaaagctcagatttcaaaagtctagaataggcttcattccctccctctttaaccggggtagtcggttccttatcctgcagatcgaaagcgtggagtctcgaagaagatctgcacggtatgaatctgtcgctgcaagtcgattttgacggcgaggataaactcgaaatcccacgaaatgagctcgaaaacgtttctaaacgcaacgaagtctggttcatccctgcgggaagattcaaaccggttttggtactctgtggcgatgccatttctgggttctattcgaaagcactggaagtggtgtataggtttggtcggagattgaaacaacccccgcgagagaagattgcaaaagaatcgaagagagctttatctctctttttttttttcccttcttttgcgaaaagtagtaatgttctccaacggtcaaattatgatggtcggagagattatataataggaaataggagcgggatctgattatcgggacatttatgtcataaatcatgtattatcgatttctggagttcatgctccaacggtcagatcttgggtcctagcgtaaaagataatcaatatgaataatatatgtcaattaaataatcaagtgctcagtaatcaacaaagccgtcttagctcagtgnnnnnnnnnnnnnnnnnnnnnnncgtggccgtgggttcgatccccacagacggcgattctattgagtacattcagttttgtcttcttgtcttgtccttaccggtttggtccgaaaacttttagtctgttatttggtttaggatataaaaactccaaaccaaacccgactcggtgcacttacttcaaaacgagtttaaccatttttatattttacctttgaaagcaatcaattccattccatcaaaggggtttttagggtttcgtcactcgccgataatcctctctctctagaaaacatgactgccgaacagaaagtggagctcgccgccaaattggaagagcagaagatcgatgtaattatctctctttttctaccttttttgtttcttttttttttcatttcaaagtctgaaaatgatttagctggattcgtattattgatttcttcctacctcgatctcagtgactggttttagattttgtaacactagagttaccaattttagatctgaatcttcttttnnnnnnnnnnnnnnnnnnatgtcgattgtcgcattgcttaagtcgataaatatctaatttcttctgatctggaattgtagcttgataaacctgaggttgaagatgatgatgacaatgatgaggatgattccgaggacgatgacgaggcggagggtaagtttttttttgtttttgcctctttcaattctcttcaattatatcttgtccgcattctataagttcatttgccaaaatgctacatgtttcaaatttttgatgtggttggttccattcatttttactactcgggcagctaagttgaatttactttgcgtgtagaagagtaacagagatgtctatttgttgataatctgaaactttgttgtaatgagcctatctgtttaatccattctcttgcttttatgtcaccctgactggtgaaagtttgatacttggtttggtaaatatagaatgaggaattcggtatcatttctgatgagctacgtcatgacagtgctgtgatttgtttaaccaggacatgatggggaggccggtggccggtcaaagcaaagcagaagtgagaaaaagagtcgtaaagctatgttgaagcttgggatgaaaccaatcactggtgttagccgtgtcaccgtcaaaaagagcaagaatgtttgtgctcttcagaaaattaaatctctcttgtgttaattgtttcctatgtttccaaattcattgatagaatgtggattgaaaattgcagatcttgtttgtgatatcaaaacctgatgtgtttaagagtccagcttcagatacatatgtgatctttggtgaggccaagatagaggatttgagctcgcagctgcagagtcaagccgcagagcagttcaaggctcccaacctcagcaacgtgatttcacagggagaaacatcgagtgctgcaactgcagctgctgttcaagatgatgatgatgaagaggtagacgaggagggagtagagccaaaggacatcgagcttgtgatgacccaagcaggagtgtctaagccaagggcagttaaggcgctcaagctcgctaatggagatatagtctctgccatcatggagcttaccacctaaatccgaaacttttcctactttgatgtgcttttcgtgtttttgttttcccattttcctttcaagtgattttgcatgttgtatcattatatactatacgtttggactcatttcatattttagaaatttgagtggattttcatgagtttata

SEQ ID NO: 144740 - DNA, 1189 bp, Arabidopsis thaliana landsberg
agattccagaaagaaagaaaaaaaagaaacaaataattccaaaaccttctctcttaatcaaaatcaagaaacttacaagatctggtgaaaaccatggaagaaggagattttttcaactgctgtttcagcgagattagtagtggcatgaccatgaataagaagaagatgaagaagagcaataaccaaaagaggtttagcgaggaacagatcaagtcacttgagcttatatttgagtctgagacgaggcttgagccgaggaagaaggttcaggtagctagagagctagggctgcaaccaagacaagtggctatatggtttcaaaacaagagggctcgatggaaaactaagcaacttgagaaagagtataacactcttagagccaattacaacaatttggcttcacaatttgaaatcatgaagaaagaaaagcaatctctggtctctgaggtacataatgattctatcgatatctttatctttaattgaacagtgatagaaacaataattgataatgatctttttttttttataaagtataaaatagcaaatacagtcttggcatttattggtttttgggggatgtaaattctcgatcattttgcctaatttgatattaatcaatctctatttgcagctgcagagactaaacgaagagatgcaaaggcctaaagaagaaaagcatcatgagtgttgtggtgatcaaggactggctctaagcagcagcacagagtcgcataatggaaagagtgagccagaagggaggttagaccaagggagtgttctatgtaatgatggtgattacaacaacaacattaaaacagagtattttgggttcgaggaagagactgatcatgagctgatgaacattgtggagaaagctgatgatagttgcttgacatcttctgagaattggggaggtttcaattctgattctctcttagaccaatctagcagcaattaccctaactggtgggagttttggtcataaaaacatataagaaaaaaacagaacataagcgaagagaaagagtgtgaatagtttgtaaattatgtgttaagaaaaataaatttagtttagtttaaatcttgtttcgatctatgtatctactatgttcaatactctttgtagctaattagtagcttataatgagactagaaaagttttgaagtcaccaaggttaaatttgtg

SEQ ID NO: 144741 - DNA, 381 bp, Arabidopsis thaliana landsberg
ctatgctttgatctactagagtcatggcttgcacaaaacacagacgcagcctgtttcaagagagatggccagtctgttttccgggaactcgctctctttcaagactaccatggcctctcttccttcaaaaatgtaagattattaattgtatttatcaaatttatttgtaggttgctgatcttgctcgaatgattttcaggcctttgctgatttcatgtcagaaaatagaggaaatcgagtttcttttgattcaaacaaccttgtgctcactgctggagccacttccgcaaacgagactctaatgttttgtcttgcagatcccggtgacgctttcttgcttcccacgccatattatccagggttagtccaccgttccttaag

SEQ ID NO: 144742 - DNA, 1434 bp, Arabidopsis thaliana landsberg
atggatgtgattattgtgtcaaagcttgctaaccagaatgggacttacttactttgtggcaggggtgttgtaccatcatgctcggcttcagatatcagaaaggcatataggaaggccgcactcaaacatcatcccgacaaggtatttaatagaaactgtcatctttgcatgcttgtggattcacctagaacaatttaaatgcagaaagcaaagagctacagacgataattagttacataaattcattttatcttgttttcactattcgaaggctggtcagtctttgacaagaaacgagactaaagatgagaggttatggaaggagataggggaagaagtgcgcaaagataccgataaattatttaaaatgattggggaagcgtatgctgtgctttcagaccctgcaaaggtaaaaatatcttcaccgataacaatcctcagctctgtttttgttttctcttagagagaatatttttcaatggaccaagaaagatgataaaagtcttctgtgaatataacatttgttttgcttctcaaggatttgtgcacgcacccctagagtctcctatagtatatttatatttttatgttgtggtgcttttgcagcgttctcagtatgatcttgaagaagagatgcataattcgcaaaagagacgtgatggaagcagcacatctggagcagacacagataagtatccttaacacagcagtagaagaaactggagggaaggatggagttcacgtaaagacccatcaactccgaggtggtttgatccaaaccgatcaaacagatacccgtaactgtaatcatctcgaaggtatcgtttaccaaattcctcagcagcaaagttgattcctcctgcaaatacacaggccggtaaggcactgatagtattatcttcatggaagaagatacacattacacgattgagatgccggaaatctacgcaagtaatggagaaaaggaagaattctctctattgtatactcgttttgttcatgaggtagagacttcttcattgttccccatgtgaagaaacattgtacagggtcacagggaacgtagagtgggcgattgaaggagacatacatataaagttatgttttttttgttatgttctttgggtcgtgaagaaagacaatgtgtggtctctcttgttttaacccttttgattgtagattgtctcaattcattgatttctgcaaaagagtcatttagatatttgattttgcatttatgaaaaatatataatgtttgaatgtttgtagaaatttcattaatttatttatttaggcagttacagagtgaaggaagatatggaagaattactaatgataatttattttaacagtttattggaaacgatttgtgatgatatggaagaatcactgaaagcgatgaaaactgttctctgtgaaagagggttactataa

SEQ ID NO: 144743 - DNA, 4782 bp, Arabidopsis thaliana landsberg
  unsure (1)..(4782): unsure at all n locations
cattcttattacttccactgattcaaacatgtggaagtttaaaccttttgctcaaaaagaacctgcgggtcttttaggtcgatttctcgagataggaaatctgaaagttcaagttagaaatgtcattgcggaaggaggtttctccagtgtttacttagctcaagatgtaaatcacgcgtcaaagcaatatgctttgaagcacatgatatgcaatgacgaggagtcacttgaactcgtaatgaaagagatctcggttctgaaatccctcaagggacatccaaatgttgtcacgctctacgcacatggtatcttggatatggggaggaataaaaaagaagctcttttggctatggatttttgtggtaaatctcttgtggatgtgcttgagaatagaggtgctggttactttgaagagaaacaagctcttacgatttttagagatgtgtgtaatgctgtctttgcaatgcattgtcaatccccacgcattgctcacaggtatacatgttgtattattagatttcgtttcgtttttacattagcaagcgatgtgaattgatactgtattggtgttgctaatcgtgacagagacttgaaggctgagaatcttctattgagctcagatggacaatggaaattgtgtgattttggaagcgtttcgacaaatcacaagatttttgaaagagcagaagagatgggaattgaagaagataatattagaaaatacacaacaccaacatatagagctcctgaggtttgactggatatgcacctatgcagattataagagttttaaaagtggtgaaaaaatgtttgatttatgtctttattggcaatagatgtgggatctctttcgaagggagatgataagcgagaaggtcgatatatgggtatgtgatgacactttttcaatctctccagattgctaatctatttggttgaaacttgaaagtaaaggtttgtttttaaaaaaaaataggctcttggatgtctcttgtttcggatatgctatttcaagaatgcatttgatggagaatcaaagctgcaaatcttaaacgggaattatcgtattccagaatcgcctaaatacagtgtatttattacggatctcatcaaagaaatgctccaagcttcacccgatgaacgaccagatattacacaggttaaaagtcaatttttactcattgtttcttctcagttgaggaaatgtaaaatgtctctaacaacatgtccatctacagatttggtttcgtgtcaatgagcagcttcctgctaatttacagaaatcattaccggatcgaccacctgaaatgcaatctactggagtccatgatggtatagtgaataaaacctattttggatagcttctcaaagaaagatgtgatttcttttgatccttatgaattttgacaggctcatcaaaatcagcaactaaaccttctccagcacctcgtagaagtccgccaccgccgccaccatcttctggagaatcagatagtggaggaccgctcggtgccttttgggcgactcagcatgctaaaacctcagttgtatcagaagataacaaaaacatgcctaaatttgatgaaccaaacagtaacacatctaaatctgaaagagttcgtgtggatagtcatcaacccaaaaaaccaagtcctgtgagaggagaggctcgtggtattcaaagaaataaagatcttgaaactacgatttctcagaagaatacaactcctgctgcagccaataacatgacaagagtgtccaaggatgatgccttcaactcgtttgttgctgacttcgataccacaaagttcgataatggtaataaacctggcaaagaagaggcattggaagctgagatacagaggttaaaagacgagttgaagcaaacaaaatcagagaaggcagaaataactgctaagtttgaaaagctttctgctatctgcagatcgcaaaggcaagagttgcaggatctcaaacaaacacttgcctctaaaagtgcctcaccgtcaccgagcagagactcttcacaaaatcaaccctctccagggatgcattccatgtcatcaactccatcggtattattcttggttcttgttcatctaagcttagacacccatacaaaagtcttcatcaatgtatatcttagaattctaatgttcttgatgaaacagagagataagatggaaggaacaatgtgggaacttcaacaggacagatctaactggtcaactggcagctctgatacaaattcatggcaaccttttagtgatgaagcgaaacccgtgatggaatctgcatcaaagggtaacaataatacgattaatcagtctgtgagaaccagaagtaaaccagcttctgctgcaggtactcaaggttttgagccatggggtttcgagacagaatcctttagagccgctgcaacgtctgcagctgctacttctgcatctggaacacaaagatctatgggctctggaaacagcacttcacagagatatgggaactcaaagatgagagaaaaccagaaaacagctcaacctgctggatgggccggcttctaaaactcactcagatgcgcattgctatttcttcctcatgcaacaacaacagcttcatgttgctgccattacagaatcttgaatctttttgtagatgatgatcatcccctgtttttgtgctgctgctaaatataccccacccatatccattatgttttatgtagagtcttaaactttacacattctctgagctgtggccagatatctcagcttatggattattattggaaaaataaataattcaagattcagacagcttacacttctttctgtgaaacttagaactaaagtcacatttaataccgaacccaaccatacgatggctacattatggtttaaatgtacccaaaaagatttcagccgtaactaaatcagcattttaaaatcctggattaattttcgttaatgtaaatttttcattgaaccggacccgagtagaaaaaagtaaaaaaccgaaccaaaacattaaataccgaggaagaatttctattctgccatgattcggagaaaaaaattccattctgccacccaaaaaaaagaatttctatttgatttatttttaaataccaaaacagagggagattaccaaataacctcggtgatttagtgaaattataggatccaaccacagttcatggtttagcccagaatccgacccagtattattgggtgttcccccaaatcatttttttttaacctaagtaacttttcaaaaatcaaaaccgtcgactactctcaactctcttctcttctctctcaaccggcgaacttcaaaaatccaaaaccgtcgactttctcttctctccgttcagttcaccgtcgccggcgacatcacttgttatctccgtcgccgattgtgtgggtcgtgttcgatttcgcatagtcgttcatcccgtttagccgccgttgtaattccgccgtgaccgatgctgttcctaaccgtcgtcgttccaaaccgccggcgttccaaattgtaagtgtcgaatagggctttaagtatagaaattggaacggtttttgatttgaaacattagaataggttttcgttgtgttgatttgaacggtttccttgattgttgagtgattttgcaaggtaatcatgggtcgtgtaaggttagtcactcctagttcgagtgaaagtgaagacgagagggtcacgatcatccgtgaagcggatatgaaccgtgaagaagtggcagaggaaaacaaatttgaagacgaaaactgtgaacaagagcctccgaaaaaccttaacgaaccggaagaagaaaatatctctgaggtatatacaaatttatgaaaattttgtgtgaatattgatatagtgtttagggacaactagaaaacaatgagtacaagttaatagtataggtttatgtaattggtgcatggatatacgtgattaatcatacattgggttgcattagaaaattgaattctgagaaaagttgataatgttgttctgagataactagtacaagtagtacaacgaaatattaattttatggttgcgtatgaattttcaggaagttgatgatgaggaaccaatgcagtctcaggggatggaagaaaaccctaaagaagaagaaaaagaagaggaaaaagaagaagaatctgaggtaaatggttatttctgtaaattgtgtttgaatattgaaaatagtgtatagggcacaactagaaaacaatgagtacaacttaatagtattggtttgtttgattggtgcatgcatgaatttatacgtgatcaatcatacattgatttgcattagaaaattggattatgagaaaagtttataatgttggtctgagataacgcgaaatattaattttatggttgtatatgaattttcaggaaggtgatgatgtggaaccaatgcagtctcaggggatggaagaaaaccctgaagaagaggaaaaagaaggggaagaagaagaagaatctgaggtaaatggttatttctgtaaattgtgtttgaatattgaaagtagtgtatagggaaatcaaaaccctaatttctnnnnnnnnnnnnnnnnnnnnnnnnnnnnnnnnnnnnnnnnnnnnnnnnnnnnnaagattcagcgtcgacggaggttcgttgtgttgttcgtcggcggaggttcgtcgtcaaagaagagagaaggagagaagaaaacttttcgagagaagaaaggagaagaaggaaataaagaaagagagagaaaagtttgtaatttaatgagatga

SEQ ID NO: 144744 - DNA, 1799 bp, Arabidopsis thaliana landsberg
attcaatctacgttagccttccttcagatcaagactacgacgttttaagcaacaagatgcagttggggcagggatctacgttgatcggcttgatccagggacacctgttccgatcatcaaaggtgctagaccgattcccggacgacatcctttacttggaactcctgagccattgatgagtacaagaggaaagattgagagttcgagacctagaagaggttcttggggtcaaaacggtgacgtttcgtctccgtttgtgttaaagcctgcacctttggattttgatcagtgtacgccggcgaaacataggcttggtacggggagatttatggcggcgtctccgaatgttatgactagagggaggtcacctggtggtgttagatgttcttatggtggagggcttttgtcgaaaatggcggagagtcctgctgcaatgatgaggaagagctgtgttgttccgccgagttcgaagtttccgagaagtaaaagtgtttgcgatagagagacaatggcaaagaactctgttctttttagtccttttaaatcctctgtaggtactttttcctctctgtttttctatattggcttaggcatcaaggtttatgagttaacaagggttttgcaggcaaagaaaaacgattcaccgcctccgagtgtacgtactagaagagcaacagcagcttccttgttggaagatgaaagagaggctccaaagtctacttcaaagtatagtaagctggaaaaacctgagaagagtttgagtctaccaggaagacttagcacactgagcaaggtttgcgtaaatgtgaatgttagattgaatggttagtcttttaagaatgtgtttggtgatgatactgagagatgtctttgtatctgaacaggaagctatgcaacagcgagagacggctcaaaagatagctcttcaggcattgagagaagctacaacaacagaaacagtagttcgtcatctcaagtacacataacaatctcttcttgattggtttcattgtatgatttatggatgtttgtgtttgaaatgttcttatggatgttatttgggacaacgcaggacatttgcaaatctgagcaaatcagcaaaagctgattgtccagctgcttgcttcgacaagttcttggagtttcacagccagatatctgaaaccatgaacgaaattgcttctatcgaagcagctgcttcacctgctactactgagaaaaaatctgaggatggatcattaatactacacgaaatccagcataactctattgatcaggagaaaacaacatcaaagagaagaattctcctgaagcagcagcaaaagagatcaaacgatgagaacaagaaccccgcagtttctctttccggattaggaaacacggcgaggttggttaaagagatagagaaagaagctgcaaattggttcatggagtttatagaaaaggctctggagaaagggatgaagaaatgtaaaggcacaagtgatgcagatgttaagaaggttccacagtctctgattctcaaagttgtaaactgggtggaagaagaacattctgctgataacacgaaacgaccagttcatccaaaagcatcacatatcactagaaagctcagaatcaagttgaagaatccttagaccataagcgcgattttgagatgttaagttgttccttctacgtctactgtgaaaaggctttcagtttccactgcttatagagagatttattcatggattctattgttattagtcaagttcatgtacacatcaatgaaactaataagagtttgtgtttattaa

SEQ ID NO: 144745 - DNA, 290 bp, Arabidopsis thaliana landsberg
gaagattactactaaacagagtcttttttgacttgccaaaaacacatctgtctctctctctctttgcggatctgaaatggcgattcctgtaatcgatttctccaaactcaatggtgaagaaagagagaagacactgtctgaaatcgctagagacttgcgaagagtggggattttttcaggttcggatctaactaacaaaaaacagaacacacactctctctgtctctctgatttcatgtgcttatctgcgtatgtatgtagctggggaaccatggtattccattggagct

SEQ ID NO: 144746 - DNA, 2390 bp, Arabidopsis thaliana landsberg
  unsure (1)..(2390): unsure at all n locations
aaagccccttgggatttgaagaatgtctctctttttgaatcccattctttgtgcattgcaggacttctgcaaagcccttttatgcgattatccacagggttacagggagcatcatcatcgactttgaacccgtgaagccttatgaagtccccatgacagctgctggtgccttacaatcatacaagctcgctgccaaagcaatcactaggctgcaatctttacccagcgggagtatggaaaggctttgtgatacaatggttcaagaggtttttgaactcacggggtatgacagggtgatggcttataagtttcatgaagatgatcacggtgaggttgtctccgaggttacaaaacctgggctggagccttatcttgggctgcattatcctgccaccgacatccctcaagcagcccgttttctgtttatgaagaacaaggtccggatgatagttgattgcaatgcaaaacatgctagggtgcttcaagatgaaaagctttcctttgaccttaccttgtgtggctccacccttagagcaccgcacagctgccatttgcagtacatggccaacatggattcaattgcatctctggttatggcggttgtagttaacgaggaagatggagaaggggatgctcctgatgctactacacagcctcaaaagagaaagagactatggggtttagtggtttgtcacaatacgactccgaggtttgttccatttcctctcaggtatgcctgtgagtttctagctcaagtgtttgccatacacgtcaataaggaggtggaactcgataaccagatggtggagaagaacattttgcgcacgcagacactcttatgcgatatgctgatgcgtgatgctccactgggtattgtgtcgcaaagccccaacataatggaccttgtgaaatgtgatggagcagctctcttgtataaagacaagatatggaaactgggaacaactccaagtgagttccacctgcaggagatagcttcatggttgtgtgaataccacatggattcaacgggtttgagcactgatagtttgcatgacgccgggtttcctagggctctatctctcggggattcggtatgtgggatggcagctgtgaggatatcatcgaaagacatgattttctggttccgttctcataccgctggtgaagtgagatggggaggtgcgaagcatgatccagatgatagggatgatgcaaggagaatgcacccaaggtcatcgttcaaggctttccttgaagtggtcaagacaaggagtttaccttggaaggactatgagatggatgccatacactccttgcaacttattttgaggaatgctttcaaggatagtgaaactactgatgtgaatacaaaggtcatttactcgaagctaaatgatctcaaaattgatggtatacaagaactagaagctgtgaccagtgagatggttcgtttaattgagactgctacggtgccaatattggcggttgattctgatggactggttaatggttggaacacgaaaattgctgagctgactggtctttcggttgatgaagcaatcgggaagcatttcctcacacttgttgaagattcttcagtggaaatcgttaaaaggatgctagagaacgcattagaaggtaaactctcttcctaagttatgctgagtttgctaagaatcttccaactagatttcactattcaagttccaattgagtatcgtggtcgaagaaacttgatgcaatgtgttgtttttggttcttaatgatggaattttgttttccaattttatcaaacactgaagccgagtctataacttcacttgcttatctatgcaggaactgaggagcagaatgtccagtttgagatcaagacacatctgtccagggctgatgctgggccaataagtttagttgtaaatgcatgcgcaagtagagatctccatgaaaacgtggttggggtgtgttttgnnnnnnnnnnnnnnnnnnnnnnnnnnactgtgatggacaagtttacgcggattgaaggtgattacaaggcaatcatccaaaatccaaacccgctgatcccgccaatatttggtaccgatgagtttggatggtgcacagagtggaatccagcaatgtcaaagttaaccggtttgaagcgagaggaagtgattgacaaaatgctcttaggagaagtatttgggacgcagaagtcatgttgtcgtctaaagaatcaagaagcctttgtaaaccttgggattgtgctgaacaatgctgtgaccagtcaagatccagagaaagtatcgtttgctttctttacaagaggtggcaagtatgtggagtgtctgttgtgtgtgagtaagaaactggacagggaaggagtagtgacaggtgtcttctgtttc

SEQ ID NO: 144747 - DNA, 638 bp, Arabidopsis thaliana landsberg
aaattccaaaaaaaataaaataatacaaatctctctttttctctctaaaaaatcttgatatggatcaaaacgtaccaataagcaagaagctatggaacatcgtacgttttctcttgtacatgatccgcaaaggcgtctcaaaaaacaaactcatcgctgacttcaacgccactctcaaacgtggcaagaacctcatgttccaccaacgtcgtcgtgtccacgccggttccaccgcctcagccgctctaaacgctacttcagccaccgcgtcatcgcgacaagagtacgagtttagctgcagcaacactccaaactattcattccctttctctaatatggctttcatgaggaaaaagagtcacaataatctcttcacgtgtggtcaagcgcctcagacgcttgacgacgacgtagccgccgctagagccgttcttgagcttcttaacggcgttggagacaaaggaaacgtcacgccggcagatttaacggtggctttgtctccttatttccccggttttggacagactccattggttagaccgttaagagtaacggactcaccgtttccgttaacgccggaaaatggtgatgtggctaatagacacgttgacaaagcagctgatgattttataaagaag

SEQ ID NO: 144748 - DNA, 1382 bp, Arabidopsis thaliana landsberg
atggtgatgatgttgaagaagacagtgaagaaaggtttaatcggcggaatgagcttcgctaaagacgccggaaaaatcaattggtttcccggtcatatggctgcagctactcgcgccattcgtaaccgcctcaagctctccgatctcgttatcgaagttcgcgatgctcgtgtctgtaaacactcactcacactatctctctttatattcaatccctttatcatcgtggaaggaataatctgaattgtcgttgtctttgtttttgggtatttttgcagattcctctgtcatcggcgaacgaagatctacaatcccaaatgtcagctaagagacgtatcattgctctgaataagaaagatttagcaaaccctaatgttctcaatgtaattcgtttttttgtgtgaacctttgtctttctttaacctcttgttagtctctgtgaggttgagtttctgaatttttatgcaatttatagaaatggactcgtcatttcgaatccagcaagcaagattgtattgccattaatgctcatagcagaagctctgtcatgaaggttagatgatcctctttacatttaggttggtgtgttaaaaccagttatagtttcttcacacatataatttgatgaggattttctactactgcgcattgaaaagttaccttctttgcataatttttcgtatgtagctgcttgatctcgtggagttgaagctcaaagaagtgattgctagggagcctactttacttgtaatggtggttggtgtccccaatgttggaaaatctgcgctcattaactcgatccatcaaattgcagcagctcgttttccgggtaagatattggtgtctcagcttatcagcagtgttgagtacacatttcacagatatagtccggactgtgaatccgatttctccaaacttaaacttacaagttaattatttcatgaacagaatgatgaatgaaatgtaacgtggcttatttcgttattgtatgcattatgtgcatagtgcaggagagattaaagagagctacggttggtccattgcctggtgtaacacaagatattgctggtttcaaggtaatctttatttgaaaatcctcttttttccgtatgcctgttaattgtttgtggatttgcttcagcatgatttttgaacacatgatgaaaatgttctgtggtacagattgctcatcgacctagtatatatgttctagactcccctggtgtgttggttccaagtatccctgatatcgaaaccggtttgaagcttgctctttcaggttcttatctatatctttatctcctttctcttctttcttcttggtgctagatcgtgtaaacccgtacactagatttagttcatcaaatgatgatacagtttag

SEQ ID NO: 144749 - DNA, 506 bp, Arabidopsis thaliana landsberg
aaccccccgaagggaaacctgcgctctgggagctggattctgattactatctccatgtttcagggattggagatgatattttcccagatatcgggtaagacttatatttaatgaacctagtgcttgtcagattgtggttcttcattatatgcaaataatattttgagccgtgccggatactggacgtcaagtttaatggacatatgaaccagttcgggcaataccaaagatgttaaatttaatttcccaagataatgagatatctaactttgggtgtatgcagggtccagtccattgctaaacctatgagtggtattggagtcaatcttgcaccagtgccagctttcagagacgacttctcgcggaagaagctgacatcgtttgacaaactgatagagcagacatgcagttcaataaagaacgtgaggctttgtagtgagacagaccaaaggccaggtggcaacactggaagcactggtgtggctcctgatgcagcgtaatgattc

SEQ ID NO: 144750 - DNA, 846 bp, Arabidopsis thaliana landsberg; identical to SEQ ID NO: 32165

SEQ ID NO: 144751 - DNA, 5748 bp, Arabidopsis thaliana landsberg
  unsure (1)..(5748): unsure at all n locations
tagaccttgaaatcgatggaaagcaatcgaacccgaaattctctcatttctcaatcaaaactatcttctttcacttctgggcaagaagctctgttgtggaacatcggaaatcagaactgaaacagaaacagaaaccatggagaagagagaagacgagcaacaaaagcgcgacgattctagattcaatcaaacactcaagaacgtccaagggtaatgagtcaatcacctcccggatcgtgcatttcttatatctgatttcaatgtcttcttagatctgtaacttcgttatgctacttgtgaatcacgaaatttattagcagggtttcagatttgattgtctcgactttttgcttgtttttgtttaggtttcttaaaggtagaagtattcctggtaaggtattgttgactaggagatcagatcctcctccatacccaatctctccaacatatcaacggagcttatctgagaatgacgccggaagaaatgagctattcgaaagtcctgttgaggtatagtagttgtggaaatgactttgagttattctcttgttctttatgtatcaagggaaagtgaaattaagagtgatgatgcaggtggaggatcacaattcaagcaagaaacatgataatacatatgctggtaagctacgatcaaactctagtgctgaaaggagtgtgaaagaagttcaaaacttgaagataggtgttcgatcaagtgactctgctagagttatgaagttcaacaaagtgctttcagaaacaactgtcatattaggtacacttctttgcctttgttgtagtgttttgtttacccggaatctgtttcgatagtgagaatcctatgggaatgatatcacttgccagacatagcttaatgaaagactccattttgatcttctcatatattctgttaattggttactatggaaattcctcttcaattcctgcagagaaactgcgcgagctagcatggaatggtgtaccacactatatgcggcctgatgtctggcggcttctcttggtacgctctaggactttcatatctaagcatatccaatgttaaacttatgtttatttgacttgtaatccatttatccttattatgtacatttataatgctgatcattataatatcttccatagatagctgtttagattatttagagtcagaatgagggcacacttgcactagtcagatgatttgtgttattagctctttccatcaacacggcaactattttggattttggtttgttttgtctatttgaatttaaatataaactgacaacagggatatgcaccacctaattcagatagaagggaggctgttctgagaagaaaacgtcttgaatatctggaatctgttggccaattttatgaccttccagattccgaacgttctgatgatgagatcaatatgcttcgccagggttatcttgtagtctcagtgcttctataaccaattattcaaaagttggtaaatctcttagcaaattaattctttctcagattgctgttgactgtccgaggactgtaccagatgtcagtttctttcagcaagaacaggtgcagaaatcactggagcgtattctttacacgtggtgagctacagaatgcattgggtcaaccaacaacccgttggataattcagttgaaatctaaatctaaaaattgaattttctgagtttgcagggccattagacatccagcaagcggatatgttcagggaataaatgacctggtcacgcccttcctagtgattttcttgtcagaatatctagatggcggtgtagacagttggtcaatggatgatctatctgctgaaaaagtctcagatgtagaagcggattgctactggtgcttaacaaagctccttgacggtatgcaagatcattacacgtttgctcaacctggaatccagagacttgtgtttaagctgaaggaactggtcaggcgtatcgatggtaggttcttgctagcttgttcctgttaattggatgtgtctttggtgattgtttgagcttatgacatgcacgtcctctccttacagaatcatgttaattatattgagtccgattttcaacttgtttaccatgaagtccttaatttacatcttctgcattttaaggaaatttgaagtttgtgtctttaacaatggttgtgtacttgtgttaagtttggttttaatgtagtcacgcttttgcttatatacgacattttgatgagttgatgtcataaagtgataagaacaagggatgctaatcaacttgtcatgatgattgatgctattgtactgcatttcttagtgcattaattcataattaaccaaccacctattttccattttaggcctgattattgttttataatatagagttaacattgtcacatcttcatctgccttgttatatactagaacctgtttcaagacacatggaagagcatgggctagagtttcttcaatttgctttccggtggtataattgtcttctgattcgtgaggttaaacatcactttgaactcctacgaatatatgccagtatgccatggtttcttaaatccggtttagtcgcagtttttaattgtgaaactgacaaacctttgaacttttctagatcccattcaatctcatcaatcgactatgggacacttatcttgctgaaggagatgcgttgccagacttcctggtgtatatatatgctagctttctcttgacggtaagcaaacactgaatcgaatataacttgcgttggtcttgaaaatgttttcttctatataccacgagaatcaaatacaagttgtttctgtaaacaatgcagtggtctgatgagctgaagaagctagattttcaagaaatggtaatgttcctgcaacaccttccgacacataactggtcagaccaagagctcgaaatggttttgtcaagagcttacatgtggcatagtatgttcaataattccccaaaccatttggctagctgaaatgacttttcctccatggtgcttgctgctgtttttccctttgttatattatcttcttcttcttgttgtctaaatcagctttcgttttgttttgggttatggtaaatgctaacattcttgtcttgttaattgttattagtttatgtatggtttcagttgttgaatctgtcaccagtttgtgtgtttgtaatatttgtagctttcactaatttggctctctcaatattttttttttttgggaattcatgaaatttggggagacatagagagctctgaaatggataactcttgaatgtattatccatgccaatccagctcaacccgatccgacccgactcttttgggcgagtaataataggttcttttgtttatgtgttagatagataaaacaatattaatgattaattaacctcaaaattcaaaacacagaatgtggacataagcaacgttgtcaacaaatctactactaaagatgatgtcttttgtcttggattcctaagcataataatatatattttaaagtcaacatcaatcaaaaaatttggtcgattatttgcatcttttattattaactttgggtggtatgattatttttgataaggaatattatttctagtaaattattagttatgtaacgttatagaagcttgagcagtaatgtcactaatatagcaaattttccattcaagtaaaagaaaaatatcgacagattataatgaatatgatgatgatgatgatgatgaggatgatgatgatgatgatgatgagtctgattctgatgaatcgctgggagactgggcaaatttggaaacaatgaggagttgtcatcccatgttttttgcaaagagaatgactgaggttgacttttagaattcattaaaaagaaagtgttttggttctttataaaaacgatatgcaagatcattttcaaacctgaggctaaaagagaatgactgaggttaacttttaacacatttgtttgttgtcaaatttaggttgcttcaaatgatcctgttgattggatggnnnnnnnnnnnnnnnnnnnnnnnnnnnnnggacttttgagtcatatcttagtggaagattattcagatatccaaaagaaacttgctgatagcaattctacaactaacggaaacaaggatgcagaaaacttagtggacaagcttgaagacaatagtaaggcaggtggtgacgaatctgagatagattcatcacaggatgaaaaagcaagaaatgtggtggcgttttacaagctggagatgataagaattcagcttatcacagcacaaggggatcaggtttggaacatagcctccatcttttctgtgtaaatttattcatgttcttgcaaaactctcgtctatctaaccattgtcgcatatctggaaaactgtgttacgcttgctcttgctttgtttcttgattggcaaatctcatgattctcgttttcaagcttcacttcttatgtaaactcttctttttgttgcaatcttatgcttactagtatcttttaaacttttgggaacagactgaagttgaggtggaagatgtcagaaaagcacaacctgatgctattgctcatgcatcagctgaaatcataagccgtttagaagaatctggtgataaaataactgaagcactcaaatctctgtgttggagacataacagtattcaagcagaggtaaatagcttcaacttaactctagaagctctggaatataacaggatatctctgtaggttttggctgtgtacgaatagatgatagacgcccttcccctttgtttgcaggaagtgaagcaaattgaaatagattccctaggttttgacctcaggctttgcgcaggagcaaagattgagtcattgcgatttgcattctcgacgagggtacatccgttcttcctttcatgttttaagatcttgttcctgatctataatattttaagaacccgtgctgacataataattgatggtattaacatatcatgccaatcaaaactcttgcaggcaacatcaaaagaaaacgcagagggacaaataagaaaactattattcccgaaaacgaaccagtcgacgcaaccaaaaccaaaatgaacaagtcagaaggaatgttgacgctgtagtaatcttctgtgaagctgcagagaacagttccatgaaccaaaatccaaacaagcaatgcatatgtttctggaacaaatatgaacaagttcttggagatctaagcaaaagagtaagatcagtgacttcaagcaatttttcaattgatttttgaacgctgtaatttcgtgttaaatattggtttcaagtttgtgggttactctgcacaaattgggcattgaagttccaacccattattggtttcaagtttgtgggttatcttctgtttgagttaatgtttttttcgtataacttacaaaggaattctaactataacacaaataactgttgtttctttatgaatgaaaacgcattcttataacatgcaagtgttaagcaaaagagctaatacaaacaaacaatcgaaactctgtgacaatttcttgtttaaatgaaagtcaataaacctttcttattgccatcgactgtgacgccttcgaacagccccttctggattaagagctgactcgtcaaacttttgtctctttgcctctggttcctctggtcgtgcagtttgcatcatccccattgaagcgtctgcagactgaccataactataaagataaggaggatacatacgctgatattccagtggaagccgcataa

SEQ ID NO: 144752 - DNA, 612 bp, Arabidopsis thaliana landsberg
aaaacaccttgacaataggggtaagagtagttagatcctgagttttgtgttcatatatacgttgaagtctaaacattttcacttgaaatggatttgttatcatgaggatttgtaggtagtaagtgggttgggaagagagataccttcacctaatgggaagagtatttcagaagctatacaaaccgatgctgatattaactcaggtatgtaagttaattttacatgaaccctaagatctttaaacatctaggttaatcacataatagaatcattaggaggtttatcggtttacctctctttattgccgtagagatgtcttcatgaataggtttctgaagtattgatctttagtttaggattaggtttctctcaccttgcaaatatgttaaataataacattattccaatagaaaacggataattacaagaccatataataggggagaaattacaaggtaattcacaaacatattaatcagtttttgtcatcccattcagttttatgaaaatcaatctttctcgctatgttgatataggcaattctggagggccattgcttgattcttatggccataccataggtgtgaacactgccacattcacccgaaaagg

SEQ ID NO: 144753 - DNA, 546 bp, Arabidopsis thaliana landsberg
ttctaagttagctacatatgtaactttctcccttgtagactttcatttgcagcaaaaatagtttctcatatggagaggcaaatcataaacaagaagaaacgagtgttttctcttgaaccaaacaagaaccctagtgcagttttcacgagaaaatacacaagccacttggttcctgcactcaagaagctcaacatgaacaagaactcttcaaaacaaaccgtgaagcatgaagtagatatggctttggctttgtctgctcaagaatttccatggagccgtttcttgctgcagaagctatcgtcctcatcgaatccaaccactaccactagttcttcttccgatggaattcggattcttgaaagacccgataaagaaggcggaaacgaagaaggagggatagaggagagactgagggaattgaagaagcttttgccaggtggggaagagatgaatgtggaagaaatgttgagtgagattggtaactacattaaatgtcttgagttgcagacgattgctctcaagtccattgttcaagatagtacttga

SEQ ID NO: 144754 - DNA, 4204 bp, Arabidopsis thaliana landsberg
  unsure (1)..(4204): unsure at all n locations
atgtctgaaccactaattccagtgatacgtggctttgtacgaaggtattggtcacaaggagcgtttttgctttaacttgttgattcataatgcctgttaggttagcacatgtcaatggcgattgagtctgggactagtttaacttgaggatctttgttgcggtggcacttagatttggttattgaacttgttgtgtaaagacaatgtattgtgcatgtcaatcacatgtagattaaggaaacttagctactcaattaccccatgctcttgaatttctattccatttgatttctttgcttaaattgctatcatttacttgtttttattgcctcttgtttagtttttgcatttttcgcctgttatcactctgacacttgaccacccaattgtctggcaacagactgtgcaatcgagtactcctgttacattctctgtctggtttgctaggtggtcgagtgttttactgtttctgtttgattttctgttttctgcatgttcacttaggactgctggaacacaccaaaacctgttattgcttggcttgacttagtgacttctgatcacatcttgattgttagcatcacacccatttggattgacaacctaaaatactacaatgacatgattggtgttttaggataattgactaaaaacctattatcaatttggcgccgttgccaattgggtgtttgtttgttacatttgagatttcagacttgcttagatcaagttctttttcaattttcttttcagttactaactgtgtgtttttcttgttgtcttcttgatccaggtacacctctactgtatgcgaactcgatcaacaggcaatcagaacctccttttcaacgacaacatcaaccgcacagctcgcgaactcagaaaaaggagaaccacagtcaaccctgtacctcagcaaccactcgttatggctgaagaacagaatcaacaaaatggccatgccaacattggtgctggagatgcaccacgtgatcaccgtcagaggaagggaattgcacctcctgctatccagaacaacaacttcgagattaagagtggtctcatctcgatgattcaggggaacaaattccatggtttgccaatggaggatccactcgaccaccttgatgaattcgataggctctgcaacctaacgaagatcaatggtgtcagtgaagacggattcaagctccgtttgtttccattctccttgggtgacaaagcacatatctgggagaagaatctgccccatgactcaatcaccacctgggatgattacaagaaggcttttctatcaaagttcttctccaatgccagaactgcaagactcagaaatgagatttctggtttctcacagaagactggtgaaagnnnnnnnnnnnnnnnnnagcgtttcaagggttacaccaaccaatgccctcatcatggctttactaaagcctctctactcagcacacattacagaggagtcctagcacgcatcagaatgcttctggataccgcagcaatgggaatttccagacaaggatgttgaagaagctgggaattggttgagaaccttgttcaatcatacagcaattacaacaaggactgcgataggaccgtcaaacgcacagctgactctgatgacaaacacaagaaggagatcaaagcgctgaatgacaagctgaacaggattcttcttagccagtagaagcatgtacacttccttgttgatgacgagcagtttcaagtccaagatggggagggtaaccagccggaagaagtcagctacatcaacaacaaccaaggtggctacaaaggatacaacaactttaaaaccaacaaccccaacctctcctaccgcagcaccaacgttgctaatcctcaggatcatgtgtatcctccacagcaacaacaaggtcagaacaaaccttttgttccctacaaccaaggtttctatcccaagcagcaattccaggggaactaccagccgccaccaccacctgggtttgcacctcagcaaaaccaaggtcctgctgctcctgatgctgaaatgaaacagatggtacaacagctgctacagggacaagcatcaagctcaatggaaattcctaaaaaattatccgaattgcaccataagctggactgcaactacaatgacctgaatgccaaagtggaggcattgaataccaaagtcagatatttggaaggacaatcagcatctacctctgtacctaaagtcataggacttccagggaagtccatacagaatccaaaggagtatgcaactgctcacgccatcaatatatgccatgatcgagagctgccaactcgacatgcctctacctctatcactaggggcagtaaagttcaagaaggggaggattttgttcagaatgaaatacaagctaaaatagcattagatgagcccatactcgatcacagtactcgatcccaagctcaagtagtactttcttcagttaaaaagcctgcatctgctaaaaccaaggataaagtctttgttcctccaccctacaagcctccattaccatttccagggtgatttaagaagcaactgataaagaagtatgaagctctcttggaaaaaaaattgaaggaccttgaaatcacaatgcctctagtagactgtcttgcgctaataccggactcacacaaacgtgtgaaggacatgattacagagaggatcaaagaagttcaaggaacagtggcgttacctcacgagtgtagtgcaatcatccagaagaacattattcaagaaaagttggaagatccgggatcttttactctaccatgctccattaggcaattgactttcaacaattgtttatgtgatctaggagcctcagtcagcttaatgccactctctgttgtaaagaagctgggattcgttcaatacaagccttgtgatctaaccttgattcttgctgataggacttcaaagagaccttttggccttttagaggatgtgccagtaatgattaatggagtagaggtgcctactgattttgttgtgcttgagatggatgaagaatctaaggatcctctgatcttaggaagacctttcttggcttcagttggagcagtaatagatgttaagcaaggaaaaattaatcttaatctgggagaggatgtcaaaatgaagtttgacatcagggacgctatgaagaagccaacaatagaaggacaaaccttcttagttgaggaaatggatcagctaggtaatgaactgctagaggagattgttgacagagatcaccttcaaactactttaactaaaagtagtgaagctggatttctctccagtgagaccttgagctatgagatgtcattagactcacacaacgaagtaccaggatcagagatctttaaaggtgtcattgcgtcagaaacagaggatgttacattgaacgaggaaggctcaactaatactcgactagaatgctcaaccaaacagctagagtcaagcgtgagggcatcaaatgattggttaaactcaaggagaggtcaaaatggcacggctaagctataagagagctaacacacactgtgaaagagccgaaggatcaagtcaaagagctccatgggaaagccaaccaagctccactcgacatcaaggacgtcccaaatgatgaagttagtcctatggttagaaaagaaggatgtgaattcacatcaaaacagtccagaaaagacgactatccagatgatgaaaaaggagcttaccaagaaagggtcattgagtactcaattacagacttgtcatgagagcatgctgaatttgatgttgtatctactaaggaaggagaggatacgtcaattctactctatcaccctccttgagcctaatgagtgtgaggagtcaagctagacacttaaaacaagctcacttgggaggaagtcccatgcctatccttgtatatagtttttatttttgttacttttgatttgttttggttttgtttttgattctcaggaaatgaaaaacagctggagcaacaacaggcatgcaactgagtgttcaaataaaaaaattcaaatttttgatgaattagtctatcgcaagacgagagtaaaagctcgagagtgcgatctagtggttttgggacaacatcattctcaacgacaatgtcataccactcgatcgcaacatggcaatggtgtgatcaagtggtctcctagtggaattgcccaaaccacttaa

SEQ ID NO: 144755 - DNA, 1106 bp, Arabidopsis thaliana landsberg
atgataagcaacgaaaagagttgagccgtgatctcaatttagagcctcttcaagttaagttttggttccaaaacaaacgcacacagatgaaggtttgtaaccattaactagtatatatattcttcttaaagccaatatcaatattttaagtaatctagtttcatattagtcaaagatttctcagtacaatacattgtgtgtaatatatataggcacaaagtgagaggcatgagaaccagattctaaagtcagacaatgacaagctcagagcagagaacaatagatacaaagaagctctaagcaatgctacatgccctaactgtggcggtccagctgctattggagaaatgtcttttgacgaacaacatctcaggatcgaaaatgctcggctccgcgaagaggtatatacatacatctgtctatattacttttgtttgatgaacttgaactctaaatctgttacctcttcattctacagattgataggatctctgctattgctgcgaaatacgttgggaagccgttaggatcgtctttcgctccactagcgatccacgcgccttctcgttcgcttgatcttgaagttggaaactttgggaaccagacaggctttgtaggagaaatgtatggaacaggggacattttgaggtcagtttcgattccttctgagactgataagcctataatcgtggagctagcggttgcagctatggaggaactcgtgagaatggctcaaactggagatcctttatggctttcaaccgataattcagtcgagattctcaacgaagaagagtatttcagaacgtttccgagaggaattggaccaaagccattaggattaagatcagaggcgtcaagacaatctgcagttgttataatgaatcacatcaatctcgttgagattctcatggatgtggtaattacttgttcttcaagtaacttaagggctaaaatgattgaaaaaactaactaaagttttaatcttttgatgtgggttcaagaatcaatggtcttgtgttttctctgggattgtgtcaagagccttgacacttgaagttctttcaactggagttgctgggaactacaacggtgctttacaagtg

SEQ ID NO: 144756 - DNA, 1499 bp, Arabidopsis thaliana landsberg
  unsure (1)..(1499): unsure at all n locations
gtaggtattaacaaatccgatgtaccaaatggtccacatttggagaattgtgaggagaaggctcgagttagggagcgtttggatacacggttggcgaactggacacttcctccttgggtatgcttcttctttttcttgttctttgtcatcaagcaactattatggtgaatgaacaatcaaaagcttgtgttttagatcagtggaggagatgaagagaattatccgttaacgaggagagtgcaaagagatatatggattcatcagcatcctttggactgtgaaaacaagagtctcaagttccttgtagctgattgggaaacacttcctggttttggaataggagctcagattgctggaatgaccggtctactcgcgatagctataaatgaaaaccgagtgcttgttgtaaattactacaaccgagcagatcatgatggttgcaaaggtacataaaggctttaatcctttgagtcttcactctaacatatagcagcaactatcacaaattacatcttcttggttaatcttcttatcaagatgttttagacgctgaaaagtgtatataagaaccaaactttggatttgatttggtgtttctcttttgttttgatgcaggttcttttcgtggaaactggtcttgctattttctacaggaaacgtcagaagagtgtcgaaaacgagcctttgcgattgtgaagaagagagaagcgtgggagagtgggattgttacagggaaacaaaactatagcacaaaggagatttgggctggggctataccaaagcaatggggtaagccttggagttatatgaagccaactacagaaatcaacggaagtttaatctccaatcatcggnaaatggatcggagatggtggagagcacaagcagtgagatacttgatgagatatcaaacagaatacacttgcggtttgatgaacgttgctcgaaattccgcgtttggaaaagaagctgccaagattgttctttcagctggagattggagaaagaagaataagaagatgaggacagagattgaggaacaggtgtggtcggatcacaagccgtggcttccaaggccaatgctgagtgttcacgtacggatgggagacaaagcatgcgagatgagagtcgcagctttagaagagtacatgcatttagctgatcggatcagagatcggtttccagagctcaacaggatctggctctctacagagatgaaggaagtggtggacagaagtaaagattatgctcactggagattctattacacggaagtggcaagacaagtcggtaataagtcgatggctgagtatgaagcgagcctcgggagagagatgagcacaaactatcctctggttaacttcttaatggcgtcagaagctgatttcttcgtcggagcattgggttccacttggtgtttcctcatcgatggtatgaggaatacgggtgggaaagtcatgtctggttatctcagtgtcaataaagatcggttctggtaa

SEQ ID NO: 144757 - DNA, 1153 bp, Arabidopsis thaliana landsberg
aactctaattcctttcgtgctgaagtactttgaaacaattatttctgcaacagcctaaaatagaaaatatagcattacttggaaggcaacatggtgagaacaattttggttattgttctacgggaaatatctgtcaaactgcaagctcaattaaaagacacacagtaccttaagttcccctcgagaaaggtaaggcctcttttcaccatcttgtgaaaaacgaacctttcccctttcttctttagattttgtccactctttacatatttcagactgattccacatatcttccatatcttcgggggaagctcgagagtcccagtatgtgaaatcggtgtctgttcaaccggagggtatatttcagttcatatcagaacttataagagaatgatacaggttctccaaatatgagcatagagctaaagcattgtcacactgcacgatgctcctagagatctttatatgtttgacataggtgcatgtttatacacgtggagacattgttatatgatacagaacgatacaaaaagagggagagattacttgagcctggggaagcgggattcgtaggacgaaagcttgaagggccagcatcgccatgttttctgcaacaacaattaccaaagagactgaagttttagcttcgcttccctcaacttcttggtgcaactaccttattagtagtatgaacaaaattaacaatatgaaagcccacggcaacacaaaaccttatccgtgcaaccatgcataaaatatgacagcagaaactaggtacatagagcaagcagagataagaagcaacaaccttgaagggagactttctttcactgcaaggtatcgtttccaatatggcaatgtcgacttgtgagtcgccttttttgtcccaccattgtatgctctgacaacaaactcttcacttctctggctgcacatggaaagtaaaatatatttaaagtaattccaagaggaacttagacttgttgtcactgaaattgtaaagctagcaatgtaagcttagggacaatatatatcatacttattctgatagtctgttaaccatttcaggtaagctgccccaaagtacacatttataaagggcttgtgaagaagatcaggattgtcatctacattatatgcctgatagccttggccc

SEQ ID NO: 144758 - DNA, 667 bp, Arabidopsis thaliana landsberg
cgacggagttgacaaacatgaaagcaaggcaaaccattttcttttaccttctcatagctttcacatcttattctgacttatttaatttgttcatctgtgctattggtgccgtgactggagtgcatattaatataaatgataccgaaatgcttggttttcctatctttgctaggtctcaacgagttaaagagagttgagattaaactgctcattttctgcttgctgatcttatcttttgattcctatattggaaactcatttattcatgcatctttgtttgtttgttcagataacatcaactgccggtggtggtactttgtctttagagtttggcgtgcttagtcgtttaacaaatgatcctggtgagtaaaccagtttagtcactgagatatacttctataatcataaatctgttagtccttgagaaatacttctctttagctctctttactcttctatcattttcgttgggatttccaagagatgtaattttgattttcatagtttgttgtgtttcttacgtgctcttacatgggccaactttgttaaacttgaagttttcgaacaagttgcaaagaatgcggtgaggggactatgggcacgtcgttcaaatctcgacttggttggtgctcacatcaatgtctttacaggtgaatggacacagaag

SEQ ID NO: 144759 - DNA, 829 bp, Arabidopsis thaliana landsberg
atgggttctttggaatctgggattccgacgaagcgagataacggcggcgtaagaggtggaagacaacaacaacagcaacagcaacagcaacagttcttcttgcagagaaacagatcgagactctccagattctttctattgaagagttttaattacctcctatggatttctataatttgtgtcttcttcttcttcgctgtgctgttccagatgtttttgccgggtttggtgattgataaatcggataaaccatggattagtaaggagcttttgccacctgatttggttggttttagggagaaagggtttttggattttggtgatgatgttagaattgagcccaccaagcttctgatgaaattccagagagatgctcatggttttaattttacatcttcttctgtcaatacgactctgcagcgttttggattcagaaagcctaagctagctctggtcagtagtttatgattagaaaatgaattgttctaatgatgcattgtggttgatcttcttgagatctgatgacttgcattgtggttaaggtttttggcgatttgttagctgatccagaacaggtgttaatggtgtctctctccaaggcactgcaagaaattggctatgcaattgaggtatagttttgttgtttctttttgctcttttgtttattagtaatatgtatgaagttatgatacaacgaaacctcaaacttgtcttggtaggtttactcgcttgaagatggtccagtgaatagtatttggcagaaaatgggagttccagtcacaatactcaagcctaatcaggaatcgagttgtgttatcgactggctctc

SEQ ID NO: 144760 - DNA, 1334 bp, Arabidopsis thaliana landsberg
gcgttcttcatcagcgccgcgttctcaaagttgctgtcacaatctccgatctccaattttatgtaagtcctttctctcattccgatttcaagtttcgtatcgatctctaagtagattcgtattaagctataagagattgatgaacctagttgctcccgtactcgagaggcttagatttggaatcgaaattgtgatgatgtttaggtaacgaaacccagtaactaaatccttgcgttgagcttatcaaaccctaattttagaggatttagatccatttgcatttctgcttagtgattcaataattagtctccaaagactcttcttttaacaacatttcaactaatctgcttttgatttgtaagaaatgttgtgtcaatttcattctcactatctatgatctctctttggattcaaagtttgtatctttttgcttctatgcatcaccaaatctcttttgggattcaaagtttgtatctttttgcttctatgcgtcactatcatataataccttccttcaattgatctcctctgcttttagctagcaagtttataggtttcttaacttattgtgagctaattggattacaatgagatattatcatctttaaagaattgtggttttgggcatatgcagaagttatggctggaaaagctgcagaagctgtggcaaagacagtgacagggtttcaacatccatggagggcgaaactcgataagtacagaaccgagttgacgaaaggtgtgtggggttattgggagatgggagcatggaaaccgttagggataagtgcacgaaggagggctatgctgaggaaagaagtgttgactaatggagaagattggccttatgatccagagaggaaagctatgaggacaaagaggaaagggcataaatgtgatagaatttcagctgagaaaagagagaacactgcgaagcttatgttgaagatgcctcagatgttgcttgattataagaagagaaggtgggaaaagaagatgaaggaagaagagaaagctaaagaagacaagtaattgatttgttgagatcatgattactatagacttggttgatgaataagaataatttagtttgttgatcttatgaaatcttggaaggtttaagatcacaagtttgcttctgatatacttttgtatgatgtttttttatgtttgtttttaacagaacccgaaaagtgtttgtggttaggatcggaatttgtttttcaaccaagactaattttgactgtaaaatatggtttatgaaatatcggttcgtgcaatttctagaagaaatgaagagatcgataggttttgtagataaattgataagttaa

SEQ ID NO: 144761 - DNA, 969 bp, Arabidopsis thaliana landsberg
cataccaccactagctgtagtgggtctcagcgaagaagaagcagtagaacaagcaaccggtgatattctggtcttcacctcaggctttaatccaatgaagaacaccatttctgggtatgcaagcattgaaagttcttttctttttttttttgtctaaagcattgaaagttctaagttttagaaaatccttagaaaagttcttgattttcttcaatatgcttgcacctgatcactctttgaactaatcactattttattttggttatagacgccaggaaaagacattgatgaagctaatagttgatgagaagagtgataaggttattggagcatccatgtgcggtcctgatgcagctgagatcatgcaggcaagttttcctttatagtagcttctaccatttattttacttccctttagctgctctactgagtggtgcataggtgtcaagaataaaaatcatttacagggtagctgaaagatttgggttgattaaagacgattgcatgtctgaatttttcttctaaccatatagaacctgatttgagtttgagaagtatttagtattgtaaatggattagagtttgatccgaagcgtgtcttgattttaagtgattatattgtatggcttaatgcaggggattgcagttgcgctcaagtgtggagcaaccaaagcacaatttgattgcacggtaagtcatacgtctttcaagcacttgggtttcactttcaccagtttgatgtttgctctaactaaagataattaatattgcgaacaaaacacaggttgggatacatccatcttctgcagaggaatttgtgacaatgcgcagtgtgaccagacgcattgcccacatacccatacctaagacatatctatgaaccgcaaaatataaagagctatatagcatgaaaactcggtacacttagtttgatcaaagagtcagacaacgatgagtttaatcatactc

SEQ ID NO: 144762 - DNA, 2823 bp, Arabidopsis thaliana landsberg
  unsure (1)..(2823): unsure at all n locations
atgacacgtaagtacgcgtcaaacgatgtctttaaagtctaaactgttttagttcggtcttctcaaaagtcattacgtataatgtgggcttttgtatcacaggcccatatcttgaaaataatcaatcagtttatattgtctctttagtgctctcatagagtcattacggataaggtgggcttttgtatcgcaagcccatttcttgaaaataatcaatcagtttattatattagtcaatgttatttaaattcattgaaaataatcaatcagtaagacttttttttttttggttgagaacttgagacggtaaaaaaatattggctaatcgaaggccggaaaaagaaatctgtggaaagacaagaaaaaacgagcacagtggccagtgtgggaatttttgctggacgagagagcaaaaccctactgcgatttatcgactactaggagaagaagaagaagaagacgatgcggagattcggggctgggaacagatccgtttccaagctcgtactcaccatttgtgtagctatcctggtacgatcccttcgttcgatctgtcgcaagattagtatttgatcaaaaccaaatttgaaaattgatgatgagctgcgatgttatctgttaatgcttttgtttttaaactcacctttctctttctcaattgagtttgcgtaatttgtttgattgatttcgtggcttagttcataccatctctatcgtatggagcttcacaagggaaccggaagacggcgaagtcttctgtgttttccttgttcaatcttagggataaaagcagattttggagcgagtctgtttttcgtactggtatgtgttctgtttccaggcctctctttgcttttggatttcctatgtcttcatttgcatcacaatttttcgtgctgttatcagattttgatgatttggagtcttccgttcactcaaattctggtgtgctgaattacactaagtcaggtaagtaataacctttagtttctgtgaatggctaaaggacttactagctcaattcgcaacaccacgttctgatttggattgcatcctttcaggaaatattgcgagttacttagagcttatggaagtcgattctgtctatcttccagtgccagttaattttatcttcatagggtttgaaggaaaagggaaccaaggtgaataacttctgcctgtcttgcttttatttgaattggagctatcacttgactttctcttttgtccgtaactttttccacacactttccagacttcatactccgtcccgaggaacttgagcgttggtttaataaacttgatcacatgtttgaacatacacgagttccacaaatcaaagaagttctcaatcccttttacaagattaacattgaaaaggaggtgcagcaccatcttcctatcatcagtcgcgtgaactacaagtacagtcatctttttcttaacttttttcctggtggttcattcacggtggtgttggctttaagtaaagtttaattgggcatttgtttccctttgtcagcttttctgttcatgctatacaaatgggagaaaaggtgacatcagtaattgaacacgcaatcaaagttttagctcgcaaagatgatgtggctaccaataagtaatgcattacaaagaccttttttttgcttcagtttatgtcgtatggacgtccatttctgtcaatttatatgcagcgatatctgagcctgcagaccacttggttctagtaactttatgtcactcatgctagctgcttccaacttttttaagtggtgtcctgattcttattttttgtgttggttctatattaaactatctcgttttatggtaacagagatgaggaaagtgctctactgcaagtggatgctgagatgatggaattcattttcactagccttgtcgaatattttcatctcgaggatgcatacaacctttttattttgaatcccaagcacgataacaaaaaagccaannnnnnnnnnnnnnnnnnacctgctgtctatatgatcatattattgtaatacagtcgaggaacatactagacttataaaaggattttgcaggagagggttttcagagtcagagatatcttatctgaaagaggtatgtcaatcttttcatgcttgaaagcaattacatcataaacaatcctcactaaaaaagaagaatgtccttggagtgatctcttggttaagttcgctgttaagtgcttctaaattttaaccaagttcatattactcttactatttctcgcagaccaaggaaatactaaaaattcttcttcagtctggaagacggtcagaaaatattttaggtacagaatggacaataacaatgatatgtctccattgattatgtacattccagttttcttatatgaaacctgctgcgagtatgttgtagcatttgatatggtgaggaagccattgtacgacagacatccaatgctgaaattttcctggacaaatgcagaggagactgatacggttagttattttagccactcttatgttcaagttttattattccattgattaacctcaatgtttgtaagatatggcagttgttgattttggcaatgtgtttagttccgcagtgtgttgcaatgactatacttacattagagaaccagagctgttatgcttcgagtatctggtgtttattatatcttacagtgttggctattgtgttttacagtgttgattgttgtcttgctttcaggctgagtggtttaatgcatgccaggatgctcttaacaagttggaacagctatctcttggtaaagatgcagccgaactcattcagagtaaggttttgcag

SEQ ID NO: 144763 - DNA, 629 bp, Arabidopsis thaliana landsberg
agtctacatgactactcaagtttgttttcatggagatcttgaaaacgaaatccgccattgcttttatgtaactgatcaaatccatatttaaattgttgactataatgttttgtacccacaatctgataggataaacccgtgtaacactttttttatctaatcgatttttatccatttttaataccccgactcggctcctccttatagtggtctaacactacaatgaatcaagtctttgcagtagatagaatgcgattggtttccttatttgcatttcactatcttcacaattacgtcttgtcaattccaaaatctcagttttatctctttggatttaaaacgtttcaccaataggaataattggtagataaaatgtcattatctgataaatagtattcacaaagatgagaccacgcgtcgcttgtttagttaacgtcaacgaatatttggagttttcatcgaacatcataataagacgtcacgtaagcttacttgaatatcttaaagaaaaaattcatagcccaaaatgaagaaggtcccacgaataatgaatgggtagatgtcggtgtctttactaaaccaaagtcattggatcatttccatcgttcgagaatcttctccttattttg

SEQ ID NO: 144764 - DNA, 1158 bp, Arabidopsis thaliana landsberg; identical to SEQ ID NO: 23304

SEQ ID NO: 144765 - DNA, 669 bp, Arabidopsis thaliana landsberg
agaacttggtcatgtgtccatttttagaaatcaataaaatattataccatatatttatagtatctaactttaagagaataaatatttttatttgccgattcatatacacacatgcgtgtggtatctatgtctatccattaaactaattatatataaacttattttctggccacaatttttgtttcgtgtatagagagagctcaaagatggaaccaacagaaaaaccatcgaccaaaccatcttctcggactctacctagagacactcgtggctctctcgaagtattcaacccgtcaactcagctgacccgacccgataacccggtgttccgtcctgaaccaccagcgtggcaaaacttgagtgatccacgtggcaccagtcctcaaccccgaccacaacaagaaccagctccatccaaccctggttcggtctgatcaagaaatcgctgtcacgacctcatggatggctctgaaagacccatcaccggagacaatctccaagaagacgatcaccgccgagaaaccacagaagtcggcggtggcggctgagcagagagcggcagagtgtgattgggtttgaagaccgatacaaagacgggaaagccacatggagtgggcgtgaggaactctggtggaactgagaatgatcctaacggggaaagactacatc

SEQ ID NO: 144766 - DNA, 411 bp, Arabidopsis thaliana landsberg
ccgcctctccgccatggctgctaaacctcttcttcttcctcttctcctccttcttcatctctcaatcaccttagctcaaaacgacacaaatgctctcacactcttccgtctccaaaccgacacacacggcaacctcgccggaaactggaccggctccgacgcttgtacctcctcatggcaaggcgtttcttgctcaccatcttcacaccgcgtcactgaactatctctcccttccctctccttacgaggaccattaacctctctctcctccttagaccaacttcgtcttcttgacctccacgataacagactcaacggcaccgtttcagcactcacaaactgtaacaacctcagactcgtttatctcgccggtaacgatctctccggtgagattctaaagagatatcttgc

SEQ ID NO: 144767 - DNA, 1176 bp, Arabidopsis thaliana landsberg
  unsure (1)..(1176): unsure at all n locations
gaaggagcttgccttgtatacagcttccaaagttagtagtgagtttttatgctttgatattgatggtgacatagacccaatgttcaaggtgataactctctctctctctctctctctctctctctctcttgatatttctaatgttgccacaaagtcggacttttactttgtttgcgtgtcaaagaaatatatgggaacaaactggtcaagtttaactgggtatactgaatgtgctggaaaggaacatttaaatgtctttaaaatgtgacttcaatattaagtatcaaggaacatttggggggaccctacccatgggataccctctccccagggattagtcctgattctcctgaacccttccataggttcagggatttaccctgaattaacaaaaaacaatatatattaagtatcaaatagctcaaccaattccaagtctgaattgatcctttatttcgttttgagatactagatgattattagtgctttcaagtgctctaggtggaaattagaaagtagatctcagagttcattgcactgtcactctgcttttttgagtttttccactcttatatgtggtgaacgtggcttttaatttcttgtgatttttcaggagtactggtgcaaaagattacacccaaaaaatgtatgtgaaaaggtttacagacaacctcccctacgtgaatcacttaagaagggtaaactgaaaaagcaagatcttgcaataaccaaacagaaggcgaatattcttcgttttgctgatttaataggcaagaggatccaatatgattgtcctggattcttaccaaacaaacgccaggtgactttcagcaaatttttggagtatctaccttttcaacattcttttttcggttaatttcttcttccctgtagtacatttaaacctcatagcagctctctttatttcttgcgccagaaggttcctgttgcatttaatcactagatgtctactctatacacaaataggcgtatcatagttctattccattgattatttgtgtttccatgattttacagcaccgtatggcaggattagctgtgatagagattgctcanaaagtttccaaagcttggcgcatagagtggaggaattcaaccaaaggcaccacaaaaaatggaaagaaaactcgaggagagagagaaccaacattctta

SEQ ID NO: 144768 - DNA, 532 bp, Arabidopsis thaliana landsberg
gaggttacttgtgggtgaagggagacttatgggttgtgaggtttattcttcttgtgatggtataagaaggaaaaatcggagctttaagcttaggtgtttggaagaatctgatgaatattgtggtggtagaagttgttcagatgatgtagaagctatgatttcgtttttaagtgaggaattgatagatgaggagaggaagtggaatttagttagtagagttaaagagaagaagaaagtggggaatgtgagaaaggttagtgttgaaggaagtaatagttatggtaatgggagagtttctcaaagagtaaagaaacctgaggggtttggtaggcgaaaggagattaaggaagatgtgaagttaaatgaaagatatgattgtgaacattgtgggaggagaaagaaaagttctgagttggagagtgaatctcggcgtggttctaaattggttactggtgagtatattggaaaaagttataggggggatgaagaaagagaagttcggccaagaaggaaaaagagttcgagttgttca

SEQ ID NO: 144769 - DNA, 1469 bp, Arabidopsis thaliana landsberg
atgtcgatccacatcctctataagttctgctatgacacataccacaactattatcccctaggttgcaaaaattggtaagccccaagcatatagaacatgctaatcaccaagaaccgcagctcatactttggtgttctaaattatacaaaacaaaaccattttctgcaatgtctctaaccaagtcacacagttttctttttttccagtatctctcggtcagttttagcagtgttaagatataccttagtccctagtgagctcaagagagaaggtagaaacttgagtggtctaaaaagtctttatctgtttccagcaactagacatacacaatttcaattcaaataagtcattttcagggtatggaagtcttccttaccagattctgtcatctttatcaacatcgttcagtttccgaggtaaatactaaagaatctttttcttgttccagtcttcattctgtccacataccatttgatgccttcacatttatctgaaactgaataagaaagttgagagtaaaagaagggccaacaacggtcaagtctttcttcatagtcgatttttaacccctttggagattttcttctatagtctagttttatctccttttctactttgcctggcttttccaagtaaagttcttgtgccggcacttgtttaggtcatcctacaaacataaaagaaattaattatttaatagcaaccactcaaaaattttttttttttattgaatatcttgattgtctattcgaagactaagtcctcctaacccacctaattccaaagaaatttcccattgaaaatattatcagataaacaacaaagaaaaaaagaaaccttaataatattttctttctttcaactcatataaaactatgacttagacaaacacaattcaccaattcctaatctgtcttttacctcttattctttgtcttcattttcttgttcatctccaagaaaaaaaaaaacaaacaaacagaggagatcaccatgatcaatctttctctgtctctgacaaaatcttggtccaatacaatcatatggatgctctttgtgatcccctcttgtgttttctcagttgttgatgagcaacacaaacactgcagtcctaggtttaaatgcggcaaccagtcagaactctattatcccttttggatatctgagagaaaagagtgcggtcacccagatttcgaggtcaactgcagcggagattttgcagagcttactgtatccacagttaagttccaaatccttgagatgaactatgagtttggaatcataagactagccagaatggattatcgcaacaatctttgtcctcagcatcctgcgaatgcatctatcaaccatgatgtccttccattttctcctgataccaagctgtcaactttttatcacgactgccaatcaacggtagatgtacatcccaatgattacattaaacagcttaactgtaggattatctg

SEQ ID NO: 144770 - DNA, 2924 bp, Arabidopsis thaliana landsberg
  unsure (1)..(2924): unsure at all n locations
gagggctgtcactggagtcgtcgcaaacgcagccctcagtggccaaattccattcgctaagcccaatggtgcaaacctccctgttagtaacggcgttccatcagacaataacaacaatggaatcctgaacaataacaacgtcccacttctcgtcgggcttggcggaaccacttccaacattctacagaacaatggaaacaacatgttgaacggtcttcccgtggctaacggcggccagctcccatcgggttcgtctcttcagatgctcatgtttgggacattgacggtgatggacaacgaactaaccgaaggacacgaactcgggtctggtctgctgggtaaagcccaaggcttctacgtggcaagtgcccttgatgggaccagccagactatggctttcacggctatgtttgagagcggtggatatgaagatagcatcagtttcttcggtgtgcatagaacagctgcatcggaatctcatcttggggtaatgggcggtactggtaagtatgtgaatgcgagaggctttcgcaattgtcaagacttttacgggttcctccgggacccagcagcagcagccgcaccagttcacagatgggctcgagactgttctggagtgcaccgtttatctttcttactagtttcttttccctcttctcttatcttttttgtctaccaagaaaacgtgaaaacctattaatttgacaaccaatcccttgttattccaacttttactcttaagaacaaaaacagagaaaaaatttagttaccactgtgactgatcatttaacaaactatacctctaaattaagaaagacaatgatgtatacatgcatgtgttttatccatacaacctgtaaatttcagtctaaatttaacacaaacaatttgttgtcccaaaatcaaagacttagaaaacaaaatgagagacataaacggatgaccagcgtgtacattttgacgaacttggaacggctccaacaaaaaaaacagtcgccgaaacaagaaaccgaagatggtaaataaataccccaacaccttaagacccatttcttcaaacccaagaaacaatggtgctcttgaaacccaccaccttatcaaaatcctctaaggtcgggccgcaacagcaacagggcttctccgagtctctaatcggcgatagtgtggaggcagctgacgccttcatatgccaatgggttactccacacctctgcgactcttcttcttcttcatgcagcctctcttccctcttctccgctcaaaaccgcctagaaggcagacgcttcctcgaggttctcggcaagttacaatacgcnnnnnnnnnnnnnnnnnnnnnnnntccggactccgctaagcttgctaaaggacaggatttgatgcggaaagctatgaagcatttggagaaggagttttaccgggttttgaaatcgaatcgccgctttctgagtccagaatccgtctctggttggtcttctgaatccaacataccttcgagatcaagtggaaccgcttcggattcttcattagatggagagctttactctgaatcctcatcggaattaggtaaagacataggaggaggagggaattctgatgctattgttgatttgaagatgatagcaaatcgcatgatctcctctggttacgagaaggattgtgttaaaatctacaagaagtttcgcaaaaagatcatcgtcgacacattgtctcatctagggttcgagaagctaacctctacacagatgcagaaactggaatgggagattctggagaagaagatcaaaatatgggtgattgttgcgagagtagcaatcaccactctgttcaacggagaacgaatcctttccgatcacattttctcctcctccgtcgctgaatcttgcttcgttgagataacgctacagagcgcgttaaacctcttcatcttctcactaaccgtagcgaaatccagaaaaactgcagagaagatcttccctacgcttgacgtttaccagacgatcttgcaactgactcccaaaatcgatcagatttttagctacgattcaaccgctgccgttagattacaggcgaatgaatctctagagaagctatcggaatcggtgaatgcaatgatgacggagtttcaatcgtcgattacgaaggaatcgtcgaaatcggcgatttctggcggcggagttcatcagctcgcgaggtatgtgatgaacttcatcgtcttcctcgcagactacagcgattctctcgccaccattctcaaggagtcatcgttacctttaccggaggattacttcagtagcagcggcgaagagaatccaggatccggtgatcgttctctgatggcggcgagactcgcgtggttgattctcgtcttgctctgtaaaatcgacgccaaatctcggctctacaacgactcggctctatcgtatctcttcctagcgaacaacctccattacgttgtgaccaaggtccgtacatcgaatctcagagtcgtactcggagacgattgggtagcgaatcacgaggttaaagtgaatcaatacctcgagaaatacgaaaaaatggcctggggggatgtgatagcgtcgctccccgttgattcaacggcggggacggaggcggaggagtctctgagacggttcaacgaggcgttcgaagaggcttacaagaagcacaagacatgggtcgtacccgacccgaacctgagagacgagatccaagcgtccatagcgagaaaactaatgcccgggtatacgggtttctataagaaacacccggtcgggtcatgcaatattgtcagatttacccctgaagatctaaataattacataaccgacctatatgttggtttaggaagatccgtgcccgtatccaaaactaagaagtatatggttagcccaagccatacgacggatttgaagtaatagctc

SEQ ID NO: 144771 - DNA, 976 bp, Arabidopsis thaliana landsberg; identical to SEQ ID NO: 59362

SEQ ID NO: 144772 - DNA, 320 bp, Arabidopsis thaliana landsberg
  unsure (1)..(320): unsure at all n locations
gtgaaaaaggaaatgctattagatccaacagaattgcaacagtttcagaaccattcatctcaaatggcagctctagatttcatagtatctgtagccagcaacacttttattcctacctattatggaaacatggcaaaagttgtcgaaggtcatcggaggtattatgaaaatctgattcaagctaattcccagcaagattcttgaaatgaacatctttttgcaggtaccttgggtttaagaaaacaatcttgctagaccggaagagacttgtggagcttttagacttgcataacaacaaaacgctgtntttagaggacggg

SEQ ID NO: 144773 - DNA, 517 bp, Arabidopsis thaliana landsberg
cgaaaaggtgaagacgacaagtgtttatatccgagactcgacaaatatatcagactatgcactccttatgtttggtggcaatcttatcccaagcaaaaccggggaaggtatagagatgttgggagggtatctccatttctcagcctcgaagaacatcttagaactgatacaggtaaaattggaatctctctgtcaaatctttcttgttcttcatgtgttcttgtgatgcgaagaggataatatgattgtgcagagattgaggggagaggtggacaagctactgaataagaagatagaggatccgagtttggacataacagtggaggggaaaggagtggtctcagctgtggtggagttgttacgtagccaaaaacattaggtattaagcaaaattccagtgagtcttatcgtagtgtagagggattaagaaacgttagttattggaaaacgaggtgaatagactttaaactctgcttaagttataaaaggtaatacaagttgtaattttagagctgtt

SEQ ID NO: 144774 - DNA, 878 bp, Arabidopsis thaliana landsberg
  unsure (1)..(878): unsure at all n locations
cataagccgcaagtctctctctataaacaccgccattgattagcttcctctctatttttactctcgtcacgtcctccacttttgggtcattattacttctcgaagctcaccaagatcttgaatttgccgacctctcaaggtacttctctcctcccaatttccacaatctcctttaaatctcgattagcaatcgagtcaactgttaaattacgtttctttgttcttctgtttccttcaattttgttagcacagtaccaaaaactgccattcttctttcgtgtttcttaagtgcgttttgattcacgccgatgtcggaannnnnnnnnnnnnnnnnnnnnnnnnnnattagaatttccgtaattagatcaattttatttacgaaatcaatgtttaaattctccaaattgttagtgttcttcgtctttgtttgttgaaatttatcaatcctcatagctaaaaacaatgttttgcagaccaaatcatgtggttagatccttatctgagaaatcttttatttgttgtagtaaaatatctcgtttacactttcacctattcacacaaaacattcatgatttgggtttagattcttgatggtaaaagcatacagacaagagcatgtttacaagcatccgtgggagcgggtgagtgctgcttcatggaggaagtttgcagaccctgaaaacaaacgcatcctttctcaaaaccttgaagtcgataccttgaacaggaaactcgacactgagaccgggaaactccacaccacgcgtgctctcaccatccatgctcctggtccatggttgctccataggatcattggtcaggacatctgtcactgtgttgaatcaacagttgtagatggcaaatcacgttctatgcag

SEQ ID NO: 144775 - DNA, 1864 bp, Arabidopsis thaliana landsberg
gcgagaagaaggaggagatgagcaagatccgttcgtctgcgacaatgccacatcgcgaccagccgtcaccggcgtcgcctcacgtcgttacactcaactgtatagaggattgtgcgctcgagcaagactccctcgccggcgttgctggtgtcgaatacgtcccgctcagccgcatcgccgatggtaagatcgagtccgccaccgccgttctcctccattccctcgcgtatcttccacgagcagctcaacgccgactccgtcctcaccagctcattctctgccttggctctgctgatcgcgctgtcgattcgactctcgccgccgacctaggtctccgacttgtccatgtagatacttcacgagccgaggaaatcgcggataccgtcatggcgctcatccttggactccttcgacggacgcatttactctcgcgacacgctctatcggcgtctggttggctcggatcgcttcagcctctttgccggggaatgagacggtgccgtggtatggttttgggtatcgttggcagatctgtatcggctcggtatttagctagtagaagcttggctttcaagatgagtgtgctctacttcgatgtcccagaggtatgtttgttggcaatgtctcgctaagcttttaatatcttagtgtaaactgactctttagggaccaaaaaaagtgctgagttcttagctactacattcctaaactgcttactatgatggctctctttcaagttcctctcccttggatgttatatttgttgtcaatagttgcgtttgcgtctgttcagggagatgaagaacgaatcaggccctcgagattcccacgtgctgctcgaagaatggatacattgaatgatcttctagcagcaagtgatgtcatttcgctacattgtgcattaacaaatgacacggttcagatactcaatgcagagtgtttgcagcatataaaacctggtatgagttttcttgtcaaatgaaatttgattctccatgaatgtgaattgaagatgaacttctgctttctcgcattcccttcaattctggttgattttatgtattaggggcttttcttgtaaatactggaagctgccagctgttggatgatcgtgctgtgaaacaacttctaattgagtggcactatagctggctgcgcccttgacggtgctgaaggtccacaatggatggaagcatgggtatgactttcttttccagtgactaaacttcacatttgcgcctgcctattctcttgtttcatcatcttcttctgttgtttatcctgcatccattatatcttgttttcattgcaggtgaaggaaatgccaaatgtgttaattctacctcgcagtgcagattacagtgaggaagtatggatggagataagggagaaggctatctctatcttgcattcatttttcttagatggtgtaattccaagtaacactgtttctgatgaggaagttgaggaaagtgaagcaagtgaagaagaagaacaatcacctagcaaacacgagaaattagcaatagtggaatccaccagtaggcaacagggagaaagtactctcaccagcactgagatcgtacgtagagaggctagtgagttaaaagaatctctgagccctggtcagcaacacgtttctcaaaatactgccgtaaaacctgaaggaagacgtagcagatccggtaagaaagccaaaaagagacattcacagcaaaaatacatgcaaaaaacggatggttcctcagggttaaatgaagaaagtacttcacgaagagatgatattgctatgagtgacacagaaggagaattaggcgtccagttctccaagagcttcaactgaagattccgtcagtaggagaac

SEQ ID NO: 144776 - DNA, 496 bp, Arabidopsis thaliana landsberg
ctccaacaagactttcataacttagtttctgctatcttgaatctttttctatttattttgtgtgcgctcacagagacgagtggggatctctggttgcggccatctgccacactaggagtgtcctacaacacttgtttccgcatctctgctcctttatatgcagactgatacctaaactaccaaactcctaaaaccacacaataccatgtcaaagaagagtttgatggaaacatctgcgagaacatcaggagctctctacacaagaatacgatttttcgtggttccatccatcagcgtaaatcaggcatcagtgtattcttaaagggattaaaactcccaccagatttgctacaaagaactttgcttcagaatcacatcgacgtcaactaggccaagtgaatattatcagcctaattttcttaaacacaaacctgtgatttttacttatgtatgatgtatatatgaattctatttagagataatacaaatcctttcc

SEQ ID NO: 144777 - DNA, 1298 bp, Arabidopsis thaliana landsberg
acagatttgtgttattttcaaacacaaaatcaaccaattccgatgaatcagaaacctccgccgtacggttatggcggcgctggtggtggaggagtcggtccttcttccacttccaacaccacaatcatcgggacgttgagtgcacgcgccaagcagacgacgcaatcgatgatcacgacgctccgtccatggcgagagattctcgatctgtccgcgctctctctccctcgcgggtatgatgaagccatggcgcatctaaagcacaacatctcttatttccgtggaaattacgctctcgccgttctcgccattgttttcctcggccttatttaccatccgatgtctatgatcgctttcatcgtcgtcttcatcggatggattcttctctatttctctcgagacgcaaacgattcgattgtgatttcggggaaagaagtagatgacaagatcgtgctggttttactcagcttggtaacggttttggcattggtatatacagatgtgggcgaaaacgttctggtttcgctgatcattggtttgctcatcgtcggagctcacggcgcttttcgtaataccgatgatttgtttcttgatgaagaaagtgctcgccgtggtggcctggtgtctgccggttctggtaaccggccaccgtcgagttataccccaatttgagtaaaccggtttggagaattactcgtaatttcttgggtttttgattgaagaagctaagggaatcaatttagggctttgtattttggaattcccaaagattcttgtatttatattttggcgtgtgtgtttcattttgtttgaatgtatacaacaaatttggaaaaataaaattggtgttatggtatttaatagaattgccaaaaacataatttcagatagaaaaagaaaagtatgcattaaccagatgaaatttcataatgaacaaaaccagtatgttaaattcaagaatcctttggtctacactcacagtagaatcatcaactgatgcaatagaagaaaaacaaagttgggaataactactaactagtcttcttcaagattgatagaatctttgaacttagcatacaataccttcttcaaagctgccatttgtgttacaattgattccttctcttgctcgagtttctcaaggcttttgcaggtcgcttctttcatctcttctatctttgtttctacgtcgtccctcggcacatgagcaaacacttctcctatttgaaaacgcaccatctcctcatcagcaaggatcaactcgttccctgcatcctctagattttcacacttttcct

SEQ ID NO: 144778 - DNA, 1651 bp, Arabidopsis thaliana landsberg
tcaagaaaagaaaaccagaaaaagccattttaaatagtatcgtgtttgattttaatttcatcaacataattattatataaacacccactcttcacgagtaaattcatcatcactcactagtgtcgaacaatggcaccatcaatgaaagaactcttttctaaagataatttcaagaaaaacaagaaacttgttttgctatccgccgccgtagctttgctcttcgtagccgccgtcgccggaatctccgccggagcttcaaaagccaacgaaaaacgaactctatccccgtcgtctcacgccgtgctaagatcctcatgcagctccacgcgttaccctgagctctgtatctctgccgtggcaactgccggcggcgtcgagctagcgtcgcaaaaagatgtcattgaggcatcggtgaacctaacaataaccgccgtggagcacaattacttcaccgtgaagaagctgatcaagaagaggaaaggactaacgccgcgcgagaagactgcgcttcatgactgtttggagactattgatgagacgctggacgagctccatgaaacggtggaagatctccatttgtatcctaccaaaaaaactctccgggaacacgccggagatctcaaaacactaattagctccgccattaccaaccaggagacttgtctcgacggcttctctcatgacgacgccgataagcaagttcgtaaagccttgttgaaggggcaggtacgtaaagaacctttgaaaatcaaaaattaaatatcgcaaaggtatacaaattgcatttgtttttacgtttatgttcgttcattaaattttatggaatagatgaatgttcaacataattaaatcacttgttttgataatgtttatagtaggaaaatttatatagagttactagaaaactagatatttcatacatcacatcacaattatcaaaaaaagaaaaaaaaaaaactttcttacatcacatcacatcttagtgacaattttttagagcttgtttattcttacattgagatattgttagctagtgctggtccatacatacgaatagtagctatctattttgttattagtatatacttgtaattatatatcaacttgttggtgtcacaattttttgaaaatatagctttataacgaaatgattaaatgcagatacacgtagagcacatgtgcagcaacgctctagcaatgatcaagaacatgactgatactgacatagccaacttcgagcaaaaagctaaaataacctcaaacaaccgtaagctcaaggaggagaatcaggaaactacggtggctgtagatatcgccggagccggagaactagactcggagggatggccaacttggttatccgctggagataggaggcttcttcagggttcaggtgtgaaagctgacgccaccgtggcagctgacggtagcggtacatttaaaactgtggctgctgcggttgccgcggccccagaaaatagtaataagaggtatgtgatacatataaaagccggagtttacagagagaatgtggaggttgctaagaagaaaaagaatataatgtttatgggagatggtcggacgagaactattatcaccggaagtcgaaacgttgtagacggtagcaccactttccactccgccaccgttg

SEQ ID NO: 144779 - DNA, 4114 bp, Arabidopsis thaliana landsberg
atggatctgaatggatcattccaaagggatttgctcctgctgtgttctctcagaggaggctctcaacttatcagcccgaaagagagtcaatgtaaaggtaaaaggtctaaccaaaaataggtaacttcaatagctactttagacagtgactattattaacatgaccaaaatcatagaaagattaggcaaaaagtaacttgaggatttgattgtaaaagtttaatgtcaactttttttctatatgtactcatggttccaaaagagtaagtatatatacattagttaatcctgtactccctcagataatacatacattttaaaatactttgaaattcatataaaggatatgtcgatatctataaagtaaaaaccacttatgcaacgagcactagacttatcccgtgaacctatcaaccctgaaaaaatatactttttcgtagctgaaaattctctagggggaccaattgaaacttggaatccatcttccaaaacttgtccaattcagataagtaaaaatgtattattgtattagtaaagacatgaaatggtggttgctcacaagcggcaatgatgcaaaccaaaccaagagtgatttgctctgctgtctaatagtgttgtcttagcactaaaattgaaaaacaacaaaagaatttaagacaaaaaaaaaagaaatgattgttaatccaataatccccggaaaaaggaaaaaaaagtacagtgagaaagcgataacacattctcagcgtcagaagcttacactgctctatacgacaaaaacctcacctgcttcctcctctatgagttagtgaatactgactgaataagttttcacaatcctttgcatacatcacaaaacggcatcgttttgatgtcgctctctccttcttcctcgccggctccggcaacttccccgcctgccatgtcattacctccggcagattccgtacctgacacgtcatcacctccagctcctcctttgtctcctcttcccccaccattgagctctcctccgccgttgccttcaccaccgcctctctccgctcccaccgcttccccaccgcctcttccggttgaatccccaccgtctcctcctatagaatcaccaccgcctcctctactggaatcacctcctcctcctccgttggaatctccatctccaccgtctcctcacgtctcagctccttccggttcaccgccattacccttccttcccgccaaaccttctccgccgccttcttcacctccctccgagacagttccgccgggaaatacgatttctccaccacctcgttcacttccctccgaatcaaccccgccggtgaacacagcttctcctccaccgccatctcctcctcgccgccgtagtggccctaagccttcgtttcctcctcccatcaattcttctccaccaaatccttctccgaacactccgtcactcccagaaacttctcctccacctaaaccaccgctctcaacgacgccatttccctcctcatccactcccccgcctaagaagtcccctgcagcagtaactcttcctttctttgggccagcgggccaattaccggatgggaccgtagcacctcctattgggcctgttatagagcccaagacgagtccagccgaatcaatatctccgggaacgccacagccactggttccgaagagtctacctgtaacgacgtcgtatcaccgatcatccgccggattcttatttggcggtgtaatcgttggggctcttctactaattctgttaggtcttctctttgtcttctacagagctaccagaaatagaaataacaacagcagctctgctcatcatcaatccaaaactccctcaaaaggtataaactttgagatcaatttgtttcagactgtcacttaaaatgtaatgtaattgtaagttatgatcttttttgcttggatcagttcaacatcatcggggcggtaatgctggtacgaaccaggcacatgttatcacaatgccaccaccaatccatgctaaatatatatctagtggaggttgtgatacgaaggagaacaattctgttgcgaaaaacatttcaatgccatctggaatgttctcctacgaagaactttcaaaagcaactggtggattttcagaggagaaccttttgggagaaggcggtttcggatatgttcacaaaggagtgttgaaaaacgggacagaagttgcggtgaagcagctgaagattgggagctatcaaggggaaagagaattccaagctgaggttgacacaatcagtagggttcatcataagcacctcgtttcattggttggttattgcgttaatggagataaaagactcttggtttacgagtttgttcctaaagataccttggagttccacttgcatggtaaaatagatatatgatttcatcctttttgattttgtctttagttcattatgttgagtattgtgagaatatgtgttgtagagaacagaggaagcgtgttggaatgggaaatgaggctcaggattgctgtaggagcagcaaaaggattagcttatcttcatgaggattgtgagttgtttctcttcataatgggaatgacaatggccttttttgggttttcgacactgatattgatttctggtgcttgtaatgcaggcagtccaactataattcaccgtgatatcaaagcagctaatatccttctagattccaaatttgaggcaaaggtgatctgctctttaatcttatcaaagtttggtttttagaacagagtttgcccattttcggtttatagtcacaccattttgttctatttaacaagattacatgtagcttagagttcttgttctcttcaggtctctgactttggactagccaagtttttctcagacaccaattcatcattcactcatatctctactcgagtggtaggaactttcgggtaaaacaccatccatccatgctttatatgttgcgtcattgtgtttaaaaatattaatttacggtttcaagtttcaagtttcaagtttcttccttgttgtatcgtaaatccagatcaaaagatttattgattactaaatgccttgtgcaccgtctatttggtatgcatttaaacagatacatggctccagaatacgcgtccagtggtaaagtaactgataaatcagatgtatattcctttggggtcgtgcttctagaactcatcactggacgtccatcaattttcgccaaagattcttccacaaaccagagtttagtagactgggtaagtcaaagtacatgatgatgatgatgataccattaggttttctttttcccactagttattagatgaaaatgaaactccagtataactgcaagcttgaaacttcattagactgtaaattttgattattcctcaggcgaggccattgcttacgaaagcaatctctggagaaagttttgactttcttgtagactcaaggttggagaagaattacgatacaactcagatggcaaacatggctgcttgtgctgctgcttgcatacgccaatcagcttggcttcggcctagaatgagccaggtctgagatttagtttaaatacatgtattcgtccatatatccgaaaggaacaagcctaatccatgaatacatttatatcttgaaaaaaacttgaataggtagtacgtgctcttgaaggcgaggtggccctgagaaaggtcgaagagactgggaatagcgtgacctatagctcttctgaaaacccgaatgacatcacaccacggtatggaacaaataagaggagattcgacacaggttcaagcgatggttacacttcagaatatggagttaacccttctcagtcgagcagtgaacatcaacaggtgaatacttagttcacaggttcaatagggcaagtttcaccacaattattgggttttcggatacagtcatcttgggttaacataaaatgttgtaagaaattagactacttcattcatttgtagttaaggggtccgaagaacactgcttgtgttttgttaaatgtataaattggttgtaatattggggcacaagtttaattatgttgcaaatactttgtttgcttctgatctaacttctatttctctgatttccagtttttagctttatga

SEQ ID NO: 144780 - DNA, 1594 bp, Arabidopsis thaliana landsberg
atgccccctgcaacatcttggttaagtaagtctgaatttcctcatccaaaatacaacgagtataaataagtttctcttatgcgtcttatattcatttactagattttggtcatatatcccaaacgtgttactcatctcactctgtttttgtttgcaatcataataggtcagaaaggcttcctttatgtgtagaacccgagatgttgcctacatacatgttacgtaagtttcctacttttggttccgttttgaggatcatagtagatagagttagtgagaagcaggccattcactgtcttcaacctggtcaacacgtgaagcttctgaaccttttctttcaagtaaatatgggattatggaacgccacttttactccctctacaaagatgcagtacacaatgagcagagagatggaagcctttagtcctcaaaggtttctgctgacaccttttcttatcctgtgagttgatgttctgcttcgtccgtttgttcttcagtttaaaacacactttcttaccatttcagaatgtgtggggagaagttttcaccgagatggaacccaatcgcgcgttgcattagtcgttcacattctgaaatcacaggtaataaccagctaattgtttggaattgtggaaatttgacataacgtttaatataatacttatggtttaatcttttctaggggttgcccatgacgatgctccatttgtttctctgatggacatcctgacctatcacaatgtaatgtatccaaaaaccttggatttatcataagttgtaggaaaagagtatagtgaaaactttcttgaattgatgttttactgatgcttattatgcaggtgactgctaaattcaggtgtgttgttcggttcatacaagtgtatccccgagacgtcagaaaactccgtgatatcaacggaaatatcaaattggtagctatactagaagatgcaaccgccagaatccatgcttctctatatgctgatgaaggggtaagtaaaacacgattaattattagtgttcattgaaggattgtctaatacttatatctgtaaatctttttacaggaaaagtttttcgggtgtgatgaatctgatgaagaggctctagtcaagaagctgaatagattgttgggaggtgaagagatggagaaagtgccaagaaatcctccatgggtacaatgttgcttgttctcattctacaaacacaaaatggatcagtgggaaagcagaagattccgcatttttgatagttgggtcaatgcttcatgagacaatcaaaatgctaattgtatagttattattagcattaaagaaaatgtgattatttatttacatggaagcatacaataaaatattacataagaaaaatatctctctccaacgatatgtatgaagataataaagcaaaacaatctaaaataagaatcaataaacaagtgtaatatgatgaactcgaagaagactataatagcattgactcttgactagcaatcaaaagtctacgtcacacttggtcggctgaaaaacaaatccgctggttgaattagaggtaagaggaaccttgagatcgcacttgatcttgggcttgaacc

SEQ ID NO: 144781 - DNA, 3864 bp, Arabidopsis thaliana landsberg
ccgaaatctttttgatttttaaacgtttgtgtcttaggccattctctgtgtggctctgtccagagagaaatgggggcatcatcagtactactctcgtgcttcaaatcccatcatcaaccaaaccttctccatggctgcaactactcatctaaccaaacactcctcagattcaacttttcaaccccaaaacctctcctgatctcctcacggagctgctcacgacgattcagagtcttgtcagagaccatcaccgtcaaattggaagaggaggagaaggatgatggtgcaagtgctgttcttgatcctcctgccgccgttaacactaagctctacttcggtaacttgccttacaatgttgacagtgcaactctggctcaaatcattcaagatttcgctaaccctgagctcgttgaggttctttacaacagagataccggacagagtcgtggattcgccttcgttaccatgagcaatgtcgaagattgcaacatcatcatcgataacctcgatggaactgtaagtctcttgcagccttattacaaaacacataaaaaaaaggaaaaaacacattttagttgatctttgttattggtctttctcaggagtatcttggtcgtgctttgaaagtgaactttgcagacaaaccaaagcctaacaaagaacctctgtatccagaaacagagcacaagctctttgttggtaacttatcatggactgttacttccgagtcattagctggagcgtttcgagaatgtggagatgtggttggggctagagttgtgtttgatggagatacagaaagatcacggggttatggctttgtatgttactcttccaaagcagaaatggaaaccgctcttgaatcgcttgacggatttgagctggagggtcgggcgattcgagtaaaccttgctcaagggaagaaattttgatatcatacaacaacattgtgtaatcatttagagttttgtacattagagttatgtttacattgaactatttaactcaaaagatcaataaaactttttatgctagaaggtcatgttggtccaaattattaacttgtgtgtctttgccagaaaatacaacattagaatcaatcaaaagcattagtcttgtaatcttgttccttctctcgataacaattaacaattaacaagaaaccgagtgacttctctctaatctctatacacatgtaagaaaaatcacacagagactcttcgttcattagtggtgcgcttcactgaaccaaaacagaatctaaagatttaacagaaaccaaaaataaggtgacaaaataaaaagaagccaaacactatagaactctaacttcacaagtgaagagaccgtaaagacccaccccagagaggaagagctaaacggtggcgacctcatccgttaagaaattctatagacactcagatcgcacggtcatggttgatcaaccagtgttacagaggtacgagcctatgacagttcaggttaggtcgtgaccattcatgatatctatcaatgtataaacagtacaacttatcttcactttagacggtgtgagacaaagaaaagactaaagtcacttaacaaagcctatacgtcgtcgttgccttcctcaacgtactaattgctaatatgtcgtcgtttcttacatcagtgagctaatgaagagagagactgaaacagaggtttcttactttcttctctgtatctctcatattttgcttaaaccctaaaaccctttttggattaggttttctccaaatcttatccgccgtgataaaatctgattgctttttttcttcatgaaagtttgatttgtgaaactcgatgattctctcacgctctgtctccgtgcttcatttgtgtggagtctcttcttcagcgccgtcgaagctcttatctcagaggttcaaggtctcgttcgctctcgcttatggttcatctgtttctttccgtttaagctctctcaatcaatctgatagaaaatgggttcgtgggtttgcgtctgctactgaagcagaagtcgagaaaaagggtaatgatactttttttgctgaccataccgtttcttggaagtctcttgggttatcagataatgtctctatagctcttcgagattctgggttcgatagaccatctcttactcaggtaagttttcaaattttggtgaaatctaacagaagaacttagagaagcatttgttgattgggaaatgataagttagagtttctgtttttatgtaaagtcttgagacattgtttagtgaatgggaaaaaaggaatcatttttgcgtttttgattctgaaatgtttgattgtgaatctgattttatactgttttcttacctgtaggctgtttgcataccgtctatattgtctgggaaagatgtgattgttgcagcagaaactggtagtggtaaaacacatggttatcttgctccaataattgatcaattaacaaacaccgctcttgattccgaggttacgaatagagaggaaagaccgtttccgcttaagaatatctctcttattctgtgtccaaatgtgatgctttgtgaacaagtggttcggatggttaatggtcttgttgatgaagatggtaatccacttcttagagttgaagctgtgtgtggatctcaggtaacattttcatattgagaagcaatatctaactgttcctttgtaactgtttgaatatagctgaatatggaagttgcatttgctgcagggttggccagatagactccctgatataattgtttcgacacctgctgctcttcttaataatattgagccgaaaagaaataggcgtccggaccttctacgatgtgtcaaatatgtggtaaggaaaacttgtttagagttgtgttgtttggatcacttgcaggtctccttttgaatgtttggattgctttcaggtctttgatgaagctgatatgcttctgtgtggaagcttccagaatcagattatccgtctgataaatatgctgcgtttcgatgagaaacaggtgtctcgtttggctaaatccaatcttggcagaccaatggagattgatgcctctgtaccccaaattgatctagaaaatgaggatgatgcagaattcgatgaagaatctatttctgaggaagaggatgaagaagaggaagaggaatatcttgatgatatagcacaaatgcctagtgttgaagctgaagttgggtcagatactaaaaagggctggagaagagtgagaaagatctatacccgtagtaagcagtatattttcattgcagccacacttccagttaacgggaagaagactgccgggggaattttgaaacatatgtttcaagatgctgtttgggttagcggaaactttcttcaccgaaacagtccgaggtgaaaacttctctctttcatcttctttgaaatactatgaatcatttcccccacccctttaaattgttgattaagttatatatatgtatcattatgaggtcgaaaatgtgtatagggatgattataagctattggtttgcaagccattcatatatagataatctccttctcttgattgaattacttagtagtagttagcaagccactccaactcagattttgttattgtctttgttatgttgcagactaaagcaaaaatgggttgaagtcacaatagactcacaggttgatgctcttatagaggctgtaaaaaacaataacaacaccaacacagagaggacaatggtgtttgcaaacacggtcgaagctgttgaagcagtggccgatatattggagaaagctagtatccagtgttaccgttatcacaagaatcacaagctagacataaaagctaatatattagctgatttcagagaaactggtggtgtc

SEQ ID NO: 144782 - DNA, 688 bp, Arabidopsis thaliana landsberg
agatatttcataggaagaatgaagggtgagtttttcacattgatggcaataatgtctctcctcttagccttctcgttagtccatggagaggagagtctggacaccttctaatgcagccgctaccccgactagcccaaccgaaggatccagtggttcaagtggttcagctcatggacctaattggggatatagttggggatggggttcagccccgggaggtggttatggctatggttctggttcgggttcgtcaccagatggaggaggaaaaggggctggattcgggtttggttcggggtcaggttcaggaactggatttgggtctggctcgggaggaggaggagccacagacggtggttctggccatggaagtgggaccggacacgctggtgaaggcggtggctcaggaagtggaaatggtgaaggatctcctggtcgtagagagaggagccaacaccgctaaaagaagttttcttgttattattactaccttaacataatcacacatgcgtaagatgataagactaaaagaaggaaaaagaaaaatactatagtagcagcttaattaattaatgcataaataaggaccaaaggaataagtagttgggctttaattaccgctgtactttgtaatataactaaacctataatatattgtgttcttgcgccaacctagtatgctaatatt

SEQ ID NO: 144783 - DNA, 1367 bp, Arabidopsis thaliana landsberg
atggcgacaaacttgaaatccctattaccagctatcggtacggatgaaaccctaaattcattattttcagcaaatgtcgcactcatcatcaaagttttcatattaaatctcaaggaaactaaaatgcatgagacaatggtttttgtagacatcagtcctttagtggtcaaatgtgatgatgccaacatggcggaggatgccggcgtggcggagagttgtgggaaagctggacagggcctgtggggacgcaggattcttctacgtagtaagttaaaaacactttctataatggagttttatttgtttggattttgttaaagggtttgatattggtcagtgatttttgagcagataggccatggaatatcagaggatgttattaacaaggttagagagatcactcgtgagttctttaagcttccttatgaagagaaacttaaaatcaaaatgactccagctgctggatacaggtttgtgtgtataattgttttcccccctaaattcgaatagttttgagactgttctgttattgtgaacagaggatatcagagaattggagaaaatgtgaccaaaggaataccagatattcatgaagccattgatgtaagtgttttgtgtcctttaggcattagtaatgtaaccatgtaattctcttgatgtattttattctcttatggatagtgttacagagagattaagcaggggaagtatggggatataggcaaagttatggaagggccaaaccagtggtaatttatattcgatgtcttatccggttatgttgtttagtcttatgaccatttctatcatattttgtggtgttttcattgaaggccagagaatcctcaggagtttaaagagttgatggaggagtatattaagctatgtacaggtggtgtgtttttccatttctctgtttcttatgtgttatgtttccaagagttcttagtttgtaatttcatttcatatggtttcagatctttctagaaagattttgagaggaatctccttagctcttgctggatcaccttatgagttcgagggaaagatggctggtgatcctttttgggtgatgcgtcttattggttatccaggtgctgagttcacaaatggccaacctgaaaatgatattggatggtaactttctgctacttctcctcctttttcacttatcagctcaagtaactaaccttttccgatcttctgcttacaacgatatgtttcaagtggagctcacactgactatggtaattaagtttaaccctgaagtgaaatcaagttaaacttttgcttatgtctcaatggggtaacacttttctctgcaggcttgttaactcttgtgaatcaagatgatgacaaaactgctc

SEQ ID NO: 144784 - DNA, 1455 bp, Arabidopsis thaliana landsberg
gtgaacaagatcttgccactgatcttgactttagcagacaaggccgtgtcaatgccatgcttgttcggcgtctggaactcctcagtgaggttgagagactagcaagatctcttcagcttccagaggatgtaggatatacttgtgaaacagctggatatttctggttgcttcatgtatactcgcgttgggagctgtttctcgcagcttgtgcaggaaatgaagacaatcaatcttttgtgcgagatcgcttcccgttcaaagatttcttctcagacacccctaaacctgtttttaatggggagtcatttgagaaagacatgagggcagctaaaggttgtttctctcatctcaagactgtgttccaagagctagaagagtgtagggcctttgaactactcaagtcaactgctgatagagcaaattatctgatgaccaaacaagcaaagattgtagcaatgacgtgtactcatgctgcattaaagaggagagattttcttcagttagggttcaaatatgataacttattgatggaagaaagtgctcagattttggaaattgagactttcataccaatgctgcttcagaggcaagaagatggtcatgcacgactcaagcgctgtatattgattggggatcaccaccagctgcctcccgtggtgaagaatatggctttccagaaatatagtcacatggatcagagtttgtttacgaggtttgttcgtcttggtattccttatattgagctcaatgctcaaggaagagccaggccaagtttagccaaactctacaactggagatacagagatttaggagacctttccattgttaaggaagcaccgatcttccaaagagcaaatgctggattctcatatgaatatcagttggtgaatgtgcctgattatgaggggagaggagaatcaacaccatctccatggttttatcaaaatcagggagaagctgaatatatcgtcagtgtctatatatacatgagattgttaggatatcctgcgaataagatatcaatattgacaacatataatggtcagaagctcttaatccgtgatgttatcaaccgacgatgtgttccgtatcctttcattggcccgccgagcaaggtaaaatatcctgctcaaagttgtttttgttagttgctgatatggtatggattgtattgagagctacctgtataaataaatttcggtttggtttcgatctaggcatttaggtttcgattttggttttttggtatgcaatacccccctaagaaagttatcacagagttagttttgtgttttgactgttctaattttatttcctcaggtgactacagtggacaagttccaaggacaacagaatgatttcatattgctctctcttgtaaggacacacatcgtaggtcatctacgtgatgtaagaaggttggtagttgcaatgtcacgtgctcggctaggtttg

SEQ ID NO: 144785 - DNA, 385 bp, Arabidopsis thaliana landsberg
  unsure (1)..(385): unsure at all n locations
tggcagggacatagctgaagccaaggaacaggagtacagggcttgggctcatgttcagagtttgaaatcatcccttgatgagcaaaatctggagttgcgcgttaaggcagcaaatgaagctgaagccgtttcccaacaaatgttggctgctgcggaagcagagattgctgatttaaggcagaaaatggatgattgtaaaaggtaaataagtataagtagaagtctgcaatttatagatgcaatcacgcagttcttccataggaattctttgagagttttttgtttgacaaggataagtcttttctgtttcagggatgtcgccaagcattctgatatctngaaatctaaacatgaagaacatggaacatatctttctgaaatacag

SEQ ID NO: 144786 - DNA, 449 bp, Arabidopsis thaliana landsberg
gagctatctgtatctttaggaagtgacgaatcagaacgacttcctggagggtttgtgcacaatgcatcagaaaagccattgcaatcatccattcagttcccaaccatgggcactgatttgaatagtcaatacgacagttctgagctccctacaataccttatcaggagtgcatagaggattttggttctgaggagaacaatcttttggctgaccatgcagctcagaaccacgagctcgtttactctcaagcgtcgtcattgcagctgcctcaggttaaacccgaagatttcaaggacgatgctgatgtgcatgaatctcaaagttcaagcgatgatcaccattgtcctgaaaccaaatccctgacgccaactcaatcaacaaaggtagaagataagggtcattcggttcctgatgcttcaaatgcagaaactgcagaatcatcaaacac

SEQ ID NO: 144787 - DNA, 1394 bp, Arabidopsis thaliana landsberg
atgttgccaaaactcaagtttgattccaatttcaatcctgtgtttgatgatgataacatagatcccactatgttttcagagaatgtttacaagactttgtctttacataaagctccggttctagagagtttgcatttgtcatttgaaggtagaacagattgtttgcatgttggaatatggattgcaacagcatttgctcgcggtgtgcgtaaattggtattggatagtttctatcaagaggagcaaactgtcacgcttcctagtgttttgtttagctataatgattcacttgagatcttgaaactcaagtgtgctatagatttagactttccttctcgggtttgtttgaagtctcttagaaagctgtaccttgaccaagtacatttcaaagacgaagaatctgtttgcaaccttttatgtggctgccctagtcttcaagatttggtcgtgcatagatatagcaatgccgatgtggcgactttcacaattgcgtcgccgtcattacagagattgaccatagaagatcttagacaagaaggaggttatggaaatggaagctatgtgataaatgcccctgctttgaaatacttgaacatcaacggggttattgatattgagtcttgtttgattgacaaggcactagagttagtggaggcaaaaatcagtaacgtttctggtataaccaatgagaacattatggagtctctaacttcagccaaacgtcttatcttacacttatcaccccttgaggtaagcttaagattgaacattttcgcttggttattttctctgcaaattgggctaacactgtttttgtgtatctaaaatgtatgtaacaatgttacactgttttgtggaaatgtacctaggttaaatttcctactggtaaaatcttcgatcaactagtttgtctagagctacttacatacgaaagagagtggtggaatctgctttcgatcatgctcgatagttctcctaaactacaaatcctcaagctcacggatgtaagcagtttcactagttgtttgtttccacaactccactttcaggtaatttgttgatttagatgacataaactgcattgttcccaggtatatctgcatgacaacaaaacaaatccggacgaacgaaaatggaatccaccaaaatgtgcaccggaatgtttgttgttccatcttgagacattcttgtggataggatatgaatggcaacgaggtgatgagaaagaagttgccacatacatactagaaaacgcaagactgttgaagaaagcaactttctccacaaaacgcattgatctggaaaatctcgaaaagagacgtgagatgctcaacgagttggctagtgtggccagagcttcagattcatgtcatcttgtgttccattctatataa

SEQ ID NO: 144788 - DNA, 2804 bp, Arabidopsis thaliana landsberg
atgccatcagtagcggctggtgtgagagggcctcacatgggtggaactgtaagcactagtaaccaacaagtagtcccaggccaacagaaccagtttactgggatacctccatctcagacacagcaaaactttcaaagcccgggaatgccagctggagggactaatgcacctcgtcctgcaaaccaacctatgccatctgattggctcagcggcagaagtgttggtccctctgggaacgtgaattctcaaattccttcgagtcagagtacatatggtttgacagcacctaattcaactgccaaccatataacaaaaccacatataacacctgcagtaacaagctctacaacaaccagaccccaagagtcagcccctgtgcacaatccccaagaatcatctgctactttcggttctcgtgtatcaaatgttccatccaatcaattggtgcccaaggatcccaaggaactggctgcatcaggaaacgggtttacctctgactcacttttcggagatgtcttttcagttacttccacgcagccaaaacaacatcctacgggaagtgcatcaacaacaggcatctcatcggttactactggaactgtcgcgggccctgagatcacacagtctgtagttaggcaaagttcaatcccacaacagggttcattgagccagcatgctgttggtgttcagacccagcttactggaaactcagggcaaccatatacttcctcaggtgcggcttctggtccacctggctctactgttggagttggaatttcagctaccagtcagttggcccagcgtccgccccacccccactctcaaccacaaccccggccccagggccagtcccaacctccttggccaaaaatgactccagctgatgtccagaaatataccaaggtttttgtgcaagttgacactgatagggacggaaagatcacagggaaccaggctcggaatttgttcttaagttggaggcttccaagaggtaggctacacttacttttttgttactttctccgttaacaatggtttagtttcaattttatcttcttagaatggtgaacggggattataatttagtggcacttctgaatatttgtttggatattgattaactgccgtttctggttcatcttgagtatttcatgttttggtcctcctgtagactatactatatgtggatagagatttaatgttcctctagcacaatttgttgaaatttccatggggaatattgaggaatgttttatgtgtctcatgctggtccttggtgttacagacgctttgaagcaggtgtgggatttatctgatcaagataatgacagcatgctctccttgcgggagttctgtattgcggtctatcttatggagcgttacagagagggccgaccacttcccccagtgttcccaagctctataatacatagtgagagcatgttcacctctcctggtcaatctgtggcaccacatggcaatgcatcctggggacatcctcaaggtattcaattgcacatactgtattacttacctttttttccgttacactagataaattcatatgtaccaaatattgtagggttccaacagcaaccacatcctgggggcttaaggccaccagctggtcccaaaggaaagcctccgaggccagtgcctctgtctcctagtgatggaatggtccagcccactcagccaaagcgtaaaatgcctgtgttagaaaaaccgctggtggatcaacttagcaaagaggagcaggattcactcaacacgaagtttgaagaagcaactgctgttgataaaaaggcactctctggtttctctctgattttcatttgttaatgtggtgaattgcattagttatcgtgagttttcttttttcgcattttctatccgaagatatcttttaccccttccatatggcatttatatgaaatatttgtggatttgcgtagccatagtcaagattagaagatattctctcaacttatgattggcagtggcagtgaatcttaatttcattggcatggaagaaatcacatcgccattgagaactatgaataatttccttttctaatcctgttttgagtttcctttctctatcacatatcatccgtacctttcccgcataattgatcagttatccatgcaatatttgctggcgtaacttaaaaacttgcgtggctgcctttcatttttttaattcttgtgttttggtgtttaggtggatgaactcgaaaaagaaatagctgattccaagcagaaaattgatttcttccgtgctaagatgcaagaacttgtaagtatctctgcttcttcagcttggtctttccttttaaattgttttctggaatggaatccgcttatttgataaccagaagaagggaaaattgctcgaactacggtcgtatataagtgtgttgtttgatctggccttttttgaagtaatctcaaaagttctaggaatgtagttgtcttcaggttcctcctacatactatcaatcagtttgtttctctaacctcatcactttggttccgtggattacaggttttatacaagagcagatgtgacaaccggtacaatgagatcgcagagagagtcttgggtgataaacgtgaggtatacagtttctgttattgagcctcttttgtgatggtattagagatctagattgattaactaacataatcaacatgtactccagcttgaatctctagcaaaaaaatacgaggagaaatacaagaagtctggcaatgtgggctctaaattgactattgaagaggccacattccgtgatatacag

SEQ ID NO: 144789 - DNA, 1052 bp, Arabidopsis thaliana landsberg
gaccagattcttcgattccagcatattcctaagttaaatccgacacaatcggataatctcgtcaaccactcacaacacgccacgtaatcaatgatgtggaacccatgccacgttggacacggtctcacgggagaaggcttcagtaaagagcgcctatcgtccgtccgacttgtttattttccacgtgttaatcttccagaataatcagaaagagaattaaaaaaataaaacaatccaaattaatctcagccgtcaatttctcttcttcttcttcccaaattctctcaacagatagagaaaaccttattagcagcactctcacgaaatcgtcgtgacgaaacgataaaccctaagtcatggtaaaggaaactctaattcctccgtcatctacgtcaatgacgaccggaacatcttcttcttcgtctctttcaatgacgttatcctcaacaaacgcgttatcgtttttgtcgaaaggatggagagaggtatgggattcagcagatgcggatttgcagctgatgcgagacagagctaactctgttaagaatctagcatcaacgttcgatagagagatcgagaatttcctcaataactcggcgaggtctgcgtttcccgttggttcaccatcggcgtcgtctttctcaaatgaaattggtatcatgaagaagcttcagccgaagatttcggagtttcgtagggtttattcggcgccggagattagtcgcaaggttatggagagatggggacctgcgagagcgaagcttgcaatggatctatcggcgattaagaaggcgattgtgtctgagatggaattgcatgagcgtcagggagttttggagatgagtagattgaggagacggcgtaatagtgatagggttaggtttacggagtttttcgcggaggctgagagagatggaaaagcctatttcggtgattgggaaccgattaggtctttgaagagtagatttaaagagtttgagaaacgaagctcgttagaaatattgagtggattcaagaacagtgaatttgttgagaagctcaaaaccagcttt

SEQ ID NO: 144790 - DNA, 667 bp, Arabidopsis thaliana landsberg
gaagcgacataaagagaagctagaagaagaataagaagaagaatcaacatcgacgcatgacagaagaaacaatgtctactttgaaatcatcgaagaacctagagaggagattagagtcactcctcaatcggattcgtcgtcattggagaaggcgaaacttgtggtggatgagaagaaagaaatgcagacgataagagatgttatgtttaagactgagaaaagcaaaagcgcgaagctgaaatcaaagattgtgaagaagattgtgccaaagaagctaaggagttataagaaaaagaagaagatgaagaacaaagaaaaagaagaagaagaagttgaacttgaaactgaagaagaagggtctatgacagaagtttctagcttgtattcagatgagagaatcgggagtgaaatctctgagagggatgatttaagttcgaatccgccatttttagagagttgtacagaggttgaagaagaagaagagactggaccaaaagaggatctaacgaaagtgattggtttgatagtgattgttcttgttggattgctgtgtgggaaagtctttgctattggtctgacactctcttggtgtctgattctcagagttttctgttgcaaatctcaaaccagtttctgaaacagaggaggggatcctctagagtcgact

SEQ ID NO: 144791 - DNA, 4160 bp, Arabidopsis thaliana landsberg
atggcgacgctaaacatggcggaaaccctagaaaccctaatcgctaattcccaagaagttgattactcctacgatcccgaagaagatgacattgatctctccctcctccgtctcaacagcttcggaaactcctctgatcgccgccgtgcgaattcctctcctccgcaattcaaatcgtacggatctttcggttcctcttcaaccaccgcaacaaccagtcccgtgaaacgtccatcgccggaatcgaagcaaggtgacgagccgagacgcaagaagctgtttattccgagacctgaggaagaagaagacccgaatctcatgggatattcaaagattccgcttcctgtggttgaattcaatccgacgcaaatccgttctcctctttacaagcgatctttatccgatacatttgcttcgcccgttggatctacattcgggtcgggtgggtcgggttatacccgtaacagcgtcgctcaagaaacatcacctccttcgggtaatgtcccttctctcccgccacgtccacggatgttccggaggtccgtctctgatctttcgccggcaccgtcctccaagtctcttcttggatcttctcgctccaatgcaattcctgaaggtgatctcgcgaatccagaaagctctgatgccaataaggttcgaaagcttctattgccttttggctctgttcatcttttgctatgttaattatctgattcgtttgagaaattctgcgatttgagaacgaagtttaagtttcttgttgatgtcattgatcatacagagataaaattgatttgtgtctttcgaagtagagatctgttgtgtgtaagcttactcaagatggtgataatggcagatgctgtatattatcaaggatggagttcgtgaattggatcaatggtgtaacaagcttcttaagtacggtgaagcagtctcctctggctctgtgaaacaagacgacagtcctaaggttcgagaatcttcttgacacacaatctcaatggaatcttgctggtgaaatgcatttggaacaatcgtattggtctatcaaacatgtccttcattgagttgttcatttacttggctcttatctaatctctgagttaaagtcctgtttttaagcacaatgattgttgctcacttacttgtctcttatgatcttctgagtttaagtcttgtttttgagcacaatgattgtttgttgcggtgcaggcagtagatgaggtagtacaacaagaggagcaaccaaaagagtgcaaagaaggtgtgaaggtcaacagactcggtgaggcctttgtggttgagatcaactgtccatgtggaagaaactaccaaactctcttctcaggccgtgactgctactacaagctcttgtagaatggtgaccgctacctttttgcagttgttagacattcacattctttgatcatcatcaccattagttgaaggatctatcatgctgcatattcatcacaaaggttttctgtagataagaagacattcacactctgtttcatgcttgtatagatactaggtagctatacgttccattgtcatatactctcttgtgcattcgcttacttgtaatactcttaaatatgtttcattcgttaaaatggaagtgatttcttgtgtgtttgttatcattcttcttttaatgttttatgcgctaaacaatgttgtaaacacaagacggaaccatgaccggtctgggttttatctagatcagtaagtttgtaacccaaaatcaaaattgacaagccgaaaaggagaaagaaaaaacccaatttttaaaaccctagcgttttcttctaaagccctaatgtgtaaatattaggccgtttttgggcttcacaggatagaaataaacagagtacctaaaacgacgtcgttagaaagtagcatccaaaatctctatcccatgacactcttatatctcaatctattaaccttggagataatccatggtgaatcctgaaggacaagctgtgtcgaccaaagtcgtctttttatcttttccaattttcccaccagaaagaaagtttctctctggttcgatgtaagttctttttctcaaaattcttatgtgttgccttcaacctgttcgacgatattacccaatgaacaatttccatgtttcttcacatttctactcctttttatcgactactaactcacattcttacataaccaatatctaaagttttgttcttggactttgtttcggatatattgtaaattgcccgtatatcaaaggttttcaattttgtcttctctgttgttattgctctttatttctcgataatgtatagactatagagcttttagatgcttagactaagtgtaaacagctcatttttttaattcttgaatattttcttcctgtctcttgcagatgaattcgactgagaattaattcttcaacaagcttgagagcaaagttatgctgcgtttaacttgttttacaccttctttttctcgagcgtgttgtcctttatttgcaatgatgctcaaagtcccatctgttcatctccaccatcctagattttctccatttcgtttctaccatacttcctcacttgtgaaaggcaccagagatagacgtcttatacttgttgagcgtagcagacatctatgtacattgcctctcgctgctgctaaacaatcagcagcttctccttctgaaaacttatcgaggaaagcgaagaagaaagctattcaacagtctcctgaagcattgctgaaacaaaagctagatatgtgctctaagaaaggtgatgtcttggaagctcttcgcttgtatgatgaggcaagacgcaatggcgtgcagcttagccagtaccattataatgtgttgctttatgtatgctcgttggctgaggcagcaacagagtcgtctccaaatccagggcttagtaggggttttgatatttttaagcagatgattgttgataaagttgttcccaatgaagctacatttacaaacggtgctagactcgcagttgcaaaggatgacccggaaatggctttcgatatggtgaaacagatgaaagcctttggtattcaaccaaggttgagatcctatggacctgccctttttggtttctgtaggaaaggtgatgcagacaaagcttatgaagtcgatgcgcatatggttgaatcagaggtagtccctgaagaacctgagcttgctgctcttttgaaagttagtatggatacaaagaatgcagacaaggtctataagacgttgcagcgattgagagatttggtgagacaggtttctaaatcgacttttgatatgattgaggagtggtttaaatctgaagtagctacaaaaactggagtgaagaaatgggatgtgaagaaaataagggatgcggttgtgagtggtggtggtgggtggcatggacaaggatggctggggactggcaaatggaatgtgaaaagaacagagatggatgagaatggtgtatgtaaatgttgcaaagagaagcttgtttgtattgatatcaatccggttgagacagaaacctttgctgcatcgttgacccgattggcatgtgaaagagaagtcaaggctaattttaatcagtttcaggtaacaattattgtctaaaagattgtattaaaactatctaaaagaaaacctgagaaatgtgttgttgttttttgcttgcaggaatggctggaaagacatggaccgtttgatgcagtcattgatggagccaacatgggcttagtcaaccagcgcagtttcagcttcttccaggtggttttgactctttctcattctaatgccaatctcaagaaccattgtttgactactttatctaatgcgactctttatctctccccactagcttaacaacactgtccaaagatgccaacaaataagcccgtcgaaaaggttaccacttgtgatcctgcacaagagtcgtgtaaatggaggtccagctacataccctaaaaacagagccttgctagagaaatggaaaaacgctggtgctctctatgctacccctcctggctcaaacgatgattggtatttgcatttgcctttttttctgggtctatgaattacattgaccatgaataatccaaaaaagacaaccatttcttatgtgaaatcaaattgttctaggtattggctttacgctgcg

SEQ ID NO: 144792 - DNA, 2814 bp, Arabidopsis thaliana landsberg
attaattatgctgttgtatgcccggatattgatcctttaacttgtgctgctactgatttcttccagcagcttggaactggtgagtcaacgagtttatcttttgtgaaagaggttatgctcaaacatgataggaactggtttctgttaaaaaatgctaacaagttctgataatgtctcatcattttcttctaatgtaccctttgttgcatagtttatgaaacgtgcaggctgggaacacatttgccacagagcctgggaaatcaaatggaaaaggacgttgggagattatcctcatctggatttgttctgcttgattgccctcaatcaatgaagattgaaagcaataacacatcgcttctgggatctctcagcgattattttctatctttatcaaatgggtggaatgtgaatagctatctgaagtctttatcaaaagcgctgaaaggtctaaagcttggatcaggcctttacacaaaccaaaaagaaggatcaggaagtccttgtgtggtaagtatgagttagaaaatacatatgttaagtatttctatactcacttctaccaagtgtagctgttgatacttgttgactctacttttcttataggtagtgtacatagtgtgtccatttcctgacccttcggcagttttaagaacgatcgtcgaatcgtctatagcacttggatcagtaatacagtcagatagagacaggagatcaatactcaacagtcaagttgcaagggcgtttagtagttctactgctgttgacgaagcatcaatatctcacattccagtgctctcagggtttagtgtccccaaattagttctacaagtggtgtctgttgattcaattttccggataacaagtccaagctttaatgagcttgtcattctcaaggatactgctttttctgtatacaataaagctaggagaatttcacgaggaatgcctaatgatgcatttttctcatcatctttaccaagcagatcgtcttcagcgttgacaccaatgaactctatttcaggaatctggaaagactgcggtggttctcgaatgacaggttctacacatccaagagatggtgaaattgatgttagtttgagaacgagtggttgggatacctctacttcctggcagataccaagatctggaggattaagctgcgacccaaacagaaatggagatttttaccttaatgatgaaattttctatttatttgaaccacttttcattctttccgagcctggttctgtggagcgtggagtttcacctactttcaccagcttgggttctgagtcttccaagccaatacccgaggatggtggcagaggttctggacctggcatgaattcaatggaaggtataacatcgggatcaagctcccagggggatgtatcccagcttgaaggaaaggctattccaagtttacattgctgctacggttggacagaggactggagatggcttgtaagcatctggacggatgccaggggtgagttgcttgacacacatatatttccctttggtggaattagcagtagacaggatacaaaagggctgcagtgtcttttcgttcaagttctgcagcagggatgtcaaatactacaggcgtgctcctcccctgacaatggatctttcaaacccagggattttgtcattacacgcattgggaatttcttcgagcttgaataccaaggtaaattagcttcctttgcccttacagtcaattcttaatctgatatttcttcccgctcttattccagttgcacctgggaatataattctctagtattatatggtacataaccctggtattgttgtctgcttgcggctggtataacagagtggcaaaaggcaatttactcagctggaggtcctgagattaaaaagtggcctattcaactgcgacgttctgcgccttctggcatagccaccaacagcaacggatcttccttgcaacagcaggatctgagtctgattcaagagagagcctcatcaactagcacactctacagctctcattcaaaacaatccacctttgtgaaaggcagtatggggcaatccgctggaagaaagcagataatgggtgggcagaccatttctggtactccaaggggattgtttcagtgggttcacagcatcagttttgcttctatttcacttgaccattccctgcattttgttcttccagctgagttggtatccgctggtcagttttctgatttgttttcctttgttcccacaatttctctcatatctatgtcctgtatgatcaattataaattcttatttgatatggagctagacgctcacttacatggttatttgcacaattatgtaggtggtggccagagcagtactggtatgagttccgttaattacattgaaggtttcactcctgtcaagtctcttggttctaccgctttctcttacatgatgataccatcacccaacatgcgctttcttcacccaagtcctcttcagcttccgacatgtttaactgccgagtcacctccacttgctcacctccttcacagcaaaggctatgcaatccccttgtctactggatttgttgtttcaaaagctgtgccttccatgagaaaagactcaaggataaacgtgaaagaagaatggccatcagttctttctgtaagtctcatagactattatggtggttatgacaacgctcatgacaaaattcttcagggaatcgtgaagcagggaggagggaccaaagaaactagagattttgaggttgaaagccatcttatccttgagtcaattgcggcagaactccatgctctatcatggatgact

SEQ ID NO: 144793 - DNA, 1285 bp, Arabidopsis thaliana landsberg
gctataggactctatggttactgctactcaggacatgctgttttccccaatatttatacttttatggccaaaccatctcaataccctgctgttctcttgacatggtaagcttatgtcgctttaaacaagttcttatcttctacaacgcttcgactttcgcttatgcaaacttcaagaaaatattcaaccattttgatagcagaaagattgataattttgtgcagttttggtatttgtactctgatgtatgccggcgtcgctgttatgggttatacgatgtttggagaatcaacacagtcacagtttactctcaacttgcctcaagatttaattgcaactaagattgctgtgtggactacggtaagtggaccaaatatgttttctttccactacgtattggttcttgcatgttggttggaagtaaaaccgttttgttttaaccgtttcacaggtggtcaatccatttaccaaatatgctttgaccatatctccagtagcaatgagtcttgaggagttgataccatcaaggcatatcaggtcacattggtacgccatcggcattagaaccctattggtcttctctactctgcttgttggtctcgctattcccttctttggtaagttcctctttactattttgatgcaaagctccttttcttgaaaatcatacttttgctagttgtgagaacactcaaaaatcttgcaggtcttgtcatgtcattgattggatcgttgttgactatgctcgtcgtaagctgtcttttccttctatttttggtatatctactacaaatgaggatcttaagtttggatatataagttcatcttttgttttgtgcagactctaatacttcctccagcttgtttcttgagcattgtaaggagaaaagttaccccgacccaggttagcctctcacaaaaacattgtttctatgtgttataagacgattcattaacaaagttttggttggtttttgtagatgatgttgtgtgtcttaatcatcatagtaggagcaatatcttcagtcattggctcatattcagctctttccaagatcgttgagaaattgaccaactgaaaatatttctctgtttttttcttacaaactcttatacccattttgtctttcaggggaatactttttttctttttttctttttctgttttgacttttgttttcgtatagcaaaattcattcttgcattcaaagcttttgtaatatctgagtgatgatctgcatcttaaaactggtttgaaagctgattaataaagattggtacaaca

SEQ ID NO: 144794 - DNA, 4938 bp, Arabidopsis thaliana landsberg
atttatgagatagtcaacctagcgaatgagctcctccctccattgccagaaggagttatctctcttcctactagcacaaacgctcttgtgaaaggttcatgccaaaagaaatttagtccaagtacttcaggaaaacaagaagatattctaaaaatttcaccaagagaaaaattacttggtgatcaacctgaacttctgcagcagtttggattggatcttcttccagttttagtgcaggtaatttttctctgcgttggctacaagataatgctcatactacctgctgttttgtctaattattcttgttttcttttgcaacagatctatggttctagtgtcaatggtacgattcgccataaatgtctctcagtcattggaaagttgatgtatttcagcagttcagaaatgattcaatctctaattggtgacgcaaatatttcgaggtatgctgtttacgatataaattaagtttgacacgacagtgtgtgcaacttcttacatttttttcttcttatgtagcttcttggctggtgtcttggcatggaaagacccacaggtcttggttcctgctctacaagttgcagagattttgatggaaaagcttcctgaaacattctcgaaagtgtttgtgagggaaggggtggtccatgctgtacatcaacttgtcttggttggtaaaccatcccatgcctacctactgataaggacaatgactgtgtacccggatctgcacgatctaggcgttatagacggcgcagtagtaatgccaattccgatggaaaccagtcggaagagcctaagaatcctgcgtcccttaccataggggcaaaccataattcccttgatactcctacagctagcttcatgctaagggaaacagttagttcctgcgccaaagcattcaaagacaagtacttcccgtctgatggtggggatgttgatgttggagttacagatgatcttttacatctgaagaatctttgcacgaagctaactgctggtatagatgatcataaagtgaaaggaaagggaaaatctaaagcctctgggccattccttggcgatttctctgctagcaaggaagagtacttgattggtgtcatttctgagatacttggcgagataagtaaaggggatggtgtctcaacttttgagtttattggcagtggtgtggttgcagcattgcttaactatttttcttgtggatacttttccaaagagaagatctccgaacttaatttgcccaaacttcgccaggagggactcagaaggtttaaagcttttctagaagtcgctcttccttttgatggtaatgagggaaaggtccctcctatgacagttttgattcagaaacttcaaaatgctttatcgtcactggagcgctttcctgttgtccttagccatccctcaaggtcactaagtggaagtgcccggctctcctcgggtttgagtgctttggcacatcctttaaagttgcgattatgccgagcatctggagagaaaacactacgtgattactcctccaatattgtacttatagatccattggcaagcttagcagcagtggaggaatttctgtggccccgagttcaacggagtgaatctgctctgaagccggcagcgcctattggcaatacagagccaggcacgttacctagcggtgctggtgtttcatcaccatcttcgtcaactccagcttcaaccactcgtcgtcattcttctagatctcgatcggcaattaacatcggtgatacttcaaagaaagatcctgtgcatgagaaaggtaccagctcatcgaaaggaaaaggtaaaggcgttatgaaaccggctcaggcggataaggggcctcaaacaaggagcaatgctcaaaagagagctgttcttgacaaagatactcaaatgaaaccagctagcggagactccagttctgaggcatgttacagtgctaagtttttgataacataaatgttttacttcgttacatcatgatcttgtggtgtgatttacttactcaacacaatcttacttgtatgccttgcaggatgaggaattggaaatatccccagtcgacattgatgatgccttggtgattgaagaggatgacatttctgatgatgaagatgatgataatgaagatgtaagttgtcctttggttttcttctccgcgattgttgtttttgctaacaccgtaatagatattgcatttggcaataaagcttgacagctttcatattttcgaattatcttgccttggtgagtctgttttgttgataagccgaactcacttggaaccttttctttttagaatagaccaagtagatttactagcttatgcccctatttctcatatttatctcgctgctatcaataactttggctttgtaccttacttgtgctcttgattttctttcaataccttcacaatcatatatactttcatgtccaggttttggatgacagtcttcccatgtgcacgcctgataaagtccatgatgtgaaattggtggactcagtggatgatgatggtctagcaaccagcggccgacaaatgaatccagcttctggaggcactagtggagccgcagcagcaagggcatctgattctattgatactggcattgggaattcctatggttctagaggtgcactctcctttgctgctgcagcgatggctgggcttggagctgccagtggtagaggtatcaggggaagtagggacttgcatggacgtaccctaaatcgaagttcagatgagccctctaagttgatatttactgcggcaggaaaacaacttagtaggcatttgacgatttatcaggctgtacagcgacaacttatgctagatgaagatgatgatgacaggtttggtggcagtgatctagtctcaagtgatggaagcagattcaatgatatttacaccatcatgtaccagaggccagacagccaagtgaataggttgtctgttggtggagcaagttctaccacaccgtcaaaatccacgaaatctgctactaccaattccagtgtagaatctcagtcacatagggcatctcttttggatagtatcttacaaggggagcttccatgcgaccttgagaagtcgaattctacatataatgttctggcactgttacgtgtattagagggtttaaatcagctttgccctcgtttaagagcccaaactctttccgatcgttttgcagagggtaaaattacaagtctagatgatctgagtacaactgctgctaaggttcctcttgatgaatttgtcaatagcaaacttacacccaaattggctcgacaaatccaggatgcgcttgctttgtgcagtggaagtcttccctcttggtgctaccagttgactagagcatgcccatttttgtttccgtttcaaacccggagacagtatttctactcgactgcttttgggttgtctcgtgcattgaatcgtttgcagcagcagcaaggtgctgacggcagtgggtctacaaatgaacgagagatgagaatagggagattgcagcgccagaaagtccgtgtatcccgaaataggatattagattctgctgcaaaagttatggagatgtattctagccagaaagctgtgcttgaagtagaatattttggtgaagttggtactggtctaggccctacccttgagttttacacacttctaagccatgatctgcaaaaggcttccctagggatgtggagatcaagttctggtgacaaggtatctatgcaaattgatagagatgagattgaagacggaaaaccatctgcagctaacagagatatagttctggcaccacttgggttgtttcctcgaccttggccctcaacagctgacatatctgaaggtggtcagtttcataaagtcattgaatatttccgccttttagggcgtgtgatggccaaagcacttcaagatggacggctattggacgtcccattgagtacagcgttttataaacttattcttggtcaagtgagtttttttttttactactagtgtttgtttagttaaaagtgaaatagtggtttctactttttcacttctgtcggcctttgctaataagttcgtcctctttcattgactaagcaggagcttgatttgcatgatattgtattatttgacgctgaacttggcaagaccttgcaagagctgcgtgttgttgttgcccgcaagcactatctggagggagtaggtggtgacaatagcagcacgatttctgatttatgtttacgtggatgccgaatagaagatctctccttggaattcacgctacctggctatcctgagtacatcctgagatcaggagatgaaattgtactgtcttagcttacaccccacctcttactattcttttagaacatgtccatgattgctgatgacgtgctgttttgttacaggttgatattactaatcttgaggagtatatatcccttgtcgttgatgctactgtcaagagaggagtcactcggcagatcgaagccttcagatctggattcaatcaggttaacagtctcgcagactttctgtctctttctttgtctattgcctttggcttctaaacataatatagaaaattctgtagattagagacttgcattttttctttttagggcggaccttaaacttttaccttcatttgttaacttacaaaacctttctgtttctgcacataattatcaggtgtttgacataacatctctacaaatattcaccccttctgagctggactatttgctgtgtggtcgtagagagttgtgggaggtgaatttttcacttttcaatttccataaccaagagacttgaatcccttagatgtaagaaaatatcatttctaaaactttcttttcttgcaggtggagactcttgctgaacatatcaaatttgatcatgggtataatgccaaaagtccggcaatcattaac

SEQ ID NO: 144795 - DNA, 653 bp, Arabidopsis thaliana landsberg
agtcaccattcttccctccgtcacagccaccaatattcgtgttaccgtcacagccaccttctttgcctccgtcacagtctcagtcaccttctctcgcttgcaagtcaactccataccctaagctttgccgtacgatcctcaacgctgtcaaatcctcaccgtcagatccttaccgttacggcaaattcactataaagcaatgcctcaagcaagcaagccgtctatccaaagtcatcaccagttacgcgcggcgcgtggaaagcaaaccaggctcggccacggccgaggaaataggggcggtggcggactgcggcgagttatcggagctgagtgtgaactaccttgaaaccgtcacgacggagcttaagacggcgcaggtgatgacggcagctctcgtcgagcatgtgaacagtcttctcagtggtgtagtgacgaatcagcagacgtgtcttgacggactcgtggaggctaagagtggtttcgccgccgcgattggttcgccgatggggaatctcactcgcctttacagtatctcgttaggacttgtgagccacgcacttaaccgtaacctgaagaggtttaaagcctccaaagggaagattcttggtggtgggaactcaacctatcgcgaaccgctcgagactttgattaag

SEQ ID NO: 144796 - DNA, 522 bp, Arabidopsis thaliana landsberg
gcttctgcttcttctcttccatttccatatttacacttcataatatctcttcacccacttctcttcttccccatttataactcacaaatatatacatactcttacatttatatatcttgggctagctaagtagctatagtaattttctaatatctctttccatttcttgaaatggtcctcctctcaccttaactttataagaatctgaccacctctcaggtttccagtttcttcactttctcgttctctggacactgaatgtgatacatatatagaagaagaaagctataagagattgatcgatggaggtgaatgttcttgcatccaagagaagtcttctcctttttcttcttattgtaagtctctctttgagccagaaggtcagacatatctctgcctttaacgacaccaaaccatacagacaagtcagtagcttgagacttgcgagcatccaaaagcacttgaacaagatcaacaagactcctgtcttcaccattcagagaaaatatatatgtacatgtt

SEQ ID NO: 144797 - DNA, 2357 bp, Arabidopsis thaliana landsberg
ccttctttccgtgtttacatttattatcatcaaactctaattgcattgcagcattacttggatccttagctgcagcctcctttttagctaaagatttctccacaaccaggctttgagctccatcagaactgacatctccacaattttcatctactgctacattctccttcacttctgcagagtgaatccatatatctttcttcacagtattgtttgctttggcgccatcttcttttttagaaactttcgcctttttgacactaggtgtttgaagcctattttcttctacagtggcctgctttctgcgtttacctttctttgtatcaacctctaattgcgctgcagcatagcttggatctttagtggcagcttcctttcttgttaatgtttcccccgcaacaaggctttggtctccaccagaactgaccttcccattttcatgttccaatgctaagttctccttcccatccgcagagttatcccctccatctttcatcagagtaccatttgctttgatatcattttcttttctagatattttggtcttcttgactctggattttcctactttggctgtaaaagaacttcctttcttccctctttgaaggctatttttacctacaccaccctcccttttgcgtttacttgtattcttatcaacctcggattgtaatgcaccatcacttggatcttcagttggaacatcattaagctcccgttctagcaccgtaatttccacctctgcattttctgcttctggggtcttagcctgcagcttatcttggttcaccatcagatccaacacaagatggtctttctcttctggggctaaagatttattatctacagagtcaattccctggagggcttcagtctctgtgtcaatatgttttaccatgtcttgtacaacctcagtatttaggacagggcttgatatctctttttgattgctattacctgttactggcgctgaaacttttcctttgtttagacaaacattgcgctcgtccgttggggaaggttcgctcaagtatattgatcccttttggttaatggggttcttcttcctgcctctggtgcctaggctcttttttggagctgttttcttcgtggtcagctctgtttcttgcttgtctttcattccgattaaacccgatccaggagaggtgctagatctcctcatcacagggtcagttacagatctttcaggtacttcatccaatgcacccttcatagtagaattttctggagttctgatatcagcttccatgggaacaacacctgaattgaacaacctagctgctgaatcactcagatccaactcatgtgcagcttccctgaggtttggcacaacactaaggttttgcttaggtgagcctgatctttgttcctgcaataagacattttctgtcattctctcagtcaatgatttctccggtatttcatcccacgcacaatttgaaatgatattctccgcagttgaaagagcatcgaccatgggtaccacattagagctcaacagtttagtgtttaactcactcgtgggtgatttatggccagcttcctcactttcagttgggtcactaatgctcatcacaggcctaaggttgtcgttaggcgaacttggtcttagttcctgcaataacaaactagacggtggtggaatacttgcctcactgttgtggtgtactctcagtgaatctttcctactgacagatccatctgtaaattttgcctgaggcatcatcggagggaactcctcgccatgcaacatatcaatcttgccaagatctcgaaagagtgacgttctttccatggaagaaccagattttgatgcagaggtattaaaggcagacgaagcttttaggcccttgtcatccattctcaaggaacggttttggccacttgactcttttcccaaagtatcagtctctggcgatctctgaagtgttttccttgaataagtggctagagaagaatgccttctgatactcctgttaatagacgtcgagccatcagtctccattttgctcatcccttgctcaggagtcttgtttgcaaccctaatgggggacacgtaattatgctgctgagcaacacctagatcagtagagaccattgcttcaaaaggtctgtccgtccttttaggagttaaccaattatctttggacgtattacataatgatgacccttcctcaagagggaaatcttttcctcccggcttagagatttcaactgcaggcacggcaccaaccctaagaccaagaggactggtatttgcaggcttgacagaggcatcttctgcttcgtcctcagaatccctagctgaagcctccattatgtccaactcatagcca

SEQ ID NO: 144798 - DNA, 400 bp, Arabidopsis thaliana landsberg
atggtatgtggtccagttttttgaatatcactatatatatttttctgattaacttttatggtagacgaaattcgaaacgggataagcttggagaaatagaagagaaagacaaaaaaaataagaaatggattaagaatgttggggataaaagaagaaggagaagaagtgacagtgatgatgataagattcgattttaatttaaaacgggtcccgaaatacagctggtgtggagaagtacaaataataatacaagtttttaagactatcggaaatgaatttatagagagtttgggtgggggaggagaagacaccaagtacaagtttatatccaataacaaaattgaggtcttggactgtggaaaatggaaactttaatgaccttaaaaagcgacgtgagttc

SEQ ID NO: 144799 - DNA, 1529 bp, Arabidopsis thaliana landsberg
atggtttttgaatttactttggttacgattccggtcaagtggattggattaaaccgaattggagagcttgtggttatgatccatggcttcatttggcatgtctctcacaccagttcttcttctcagggattacttactacctcttgtaagttctcattcgattctatttttgcttgaattctgtttcagctgatgaaacgcttgttatcatcttagccgtttcgttttctactctttctagttataaaattttgacttcttcaagagaattttttttgggttccaatcaatcagattgctatgatcctctgaatagaattttcttgttgatatagggacttgtgttgttgagtttgagcctatagtgatcaaatgggattctcatatgaattttactcaaattttgttacttttttaatcttataactgtagacaaaagcttatccttttattggttacaaatcgtatgaacatttgattctatgctttttgctttgccattaagcaattgattttttttagtttgcttgtttccggattatgggaatgaagcttcactgggattaagaatctgtaagtaatatgtttttgtttaataagctttaggcttatagatatgtttttttaaagttctaagttagtgttgtgtttgttactcttaaacatacttaaaaagctactaaatgagtgctattcaataatgttctgtttgatttcgatggaataatttagtgtgactgatgttgcttttatgtcgcttatgtattattggtgatctatgtgtaaaacatgtgttgcaggatagtaatgaaccgaagtaaagaagagaacgttgctccgacaatgaaagatgatagtccatttggaaagcttacagaggatctcttgatagagatatttatcagaattccaataacaaattgggaacaagtatcgtgtgttagaaagcagtgggctaatttattccgcggagaatgcttatggctggctgctcttaatcgggcgtatccacttgctagcaaaactaagagctggattggaccaattcgtcaaggattaagcaaacggtgactggaaacacacttgatttctatgaaaaaagctagcttaataatgtcttagttagattcaaggaacttaacagccttttagctgcaggagatatgtggctttatacatcagcagaaacatattaggtgtggatgatacagacatagatgagatgcttggacatatttacgtgttcttgaatgatcagcttcaactttccactatgcctgcttcaggcattttgcatggaacccttatcggtaagctagtttggtatatgcatttgactctgcttaatgaatcattgctaatgacggcattcatcttatattctggtggcagaccaattgattgtttgtggccaatcgaaagaagaagctggtgagcttgcaacaaagatttggctggctcttcttgacaatttagaggacacaaaacatacatttaccgtgctgaaatcaatcgcacaagaatatgat

SEQ ID NO: 144800 - DNA, 901 bp, Arabidopsis thaliana landsberg
tcgagattataaattaaattgttccccgggttttttgataataaaaagttacacgctttctggttaaaaatccattgcattataaaattcaattatgatacaatgccacgtcactggaccacaatgttgccgtacgttatattgttgccggagtaaggtacacgtcgtcacggtgtcaggccgtttctttaaagagttgtcacgcatttaacggcgcgtgcgtctcacgtgacactctccttgtttgttggtgatttgttcattgattacagaaccaatcgtcggtacctaccaataaccggtcggtttggtaactcttctcaaattaaattttgaaccgttccatattaattggtgctgtcttttgtgtatttcagtacgatgtgtatggcaatctctttggattactagcggctcacccggtggctccactggttacgcttcatcacctcgacgtggtcgaaccgattttcccaaacatgacacgtgttgatgccttgaagcatctacaagtcccggcaaagctagactctgctggacttatgcaacagtcgatatgctatgacaaacgccgcaaatggactgtttccgtctcttggggattcgcggttcagattttccgcggaatcttttcggctcgagagattgaaatgccgtcgagaactttcttaaattggtaatctatatcaaaacattagtaaagtacataagtaaactccaaaatgtataaatatatggtcattttgttttacattgtattttttttttccgttaggtatcgacgggcggattacacggcatacgctttcaacacccgacccgtgagtcgtcatccgtgccagaaaccgtttgtgttctatatgacatcaaccagagttcatccggtgacaaatatgacagt

SEQ ID NO: 144801 - DNA, 1648 bp, Arabidopsis thaliana landsberg
tcatcttgcatcagagatcttcaactgcgaaaaaactcgagtctccgatgaatctgtaaatccaaatctgttcttcgattcatcaccattctgaaatatcgagttcgtactaaacgaatcactcaccatcaacctcggagcaaccaacgaaccaccggaattaatcgccgtactatcttcttcatgagcctctcgacgattcgtcatcatctgtagctgaagaacatactcaagatcccaaatcacatccctcatactcggtctctcatctccatactctttcaaacatttctcagcaatttccatgaatttcttcaacgaattcgtctcaatttgacctatcaaactcggatctaagatctcatcgattgtaccttttgatttgcagaacatcacccattccgatagattcacttcttcgtgaggaagataaggatctatagctggtctcgcgaacagtacctcgaggaggacgactccgaatgcgtaaacatctgatttctctgttaatttatgtgtttggagatattctggatccaagtaaccgaatgttcctttgatttttatgctgatattgctttcatcttgattatgaattttcgataatccgaaatctgcgacttttgctatattgttctcgtctagtaatatgtttgttgatttgacgtctctgtgaatgattgctccttctgagccactactgtggagataatctaaacctctagctgctccaatgcatatctctagtctttgtctccatgttaatgaggggagtcgcagcgtatagatgttctttgagtgtacctttcgccataaactcgtagacgaggatcatttcggagttttcttcgcagtatcccgttagcgagacgaggtgtctatgtcggattcttgagaggacttgaatctcggtttgaaactctaagatcccttgtcctgagccggttttgcctcgtttgatagcggctttggttccatcgggaagaatagctttgtaaacgtagccaaacccgcctttcccgatcaacaactgctcgtcgaagttgtttgtagcgcttagaatgtctgtgaagggaatcgttaagcctaagtgtaggttgcgtaatggggagttgtggtattgagagataggtctattgtctgaactcccacctctgtgcaatggcaaaggagaccatacagtgccctcaacctctggcttagtcttcttcgatctcctccgcttcaagaataccataaacagcaaactgaagaccaaagctgatgcagcagcagcagcaacagcacaaccagtgatgatgtgaacccgggaactgcttctatttgaataatcagaaccagatttactcaaaacctccatcatctccagaccattcagaaaaccagcatccttattggcctccttggtacctatactgatattcaagagtccagaaccatcagagacattcacgaaatccttaaaaaacggactcgccaacctaggctgctctgaaggctttacatctactcgccaatacccatttacaaagagatagaaatcggagtcggagtttgataagttgctcaaaatatcagaaaaatgaatcctgatgaagtgtctatggttacttttgaccttgaacgaccatgtaacattcatcaacat

SEQ ID NO: 144802 - DNA, 486 bp, Arabidopsis thaliana landsberg
agagtttgtattgggaatatccgacatcaactggagaaatcatcggtgttcatcatccgagccaagaaggtttattagcagaccgaaaaaaagatgcataatggcaaagctcttgcggaaatgtatcttttgagtttgacagataatcttgtgacaagtgcttggtctacatttggatatgtagctcaaggtcttggaggtttaaagccttggatactctatagacccgagaaccgtacaactcctgatccttcgtgtggtcgggctatgtcgatggagccttgtttccactcgcctccattctatgattgtaaagccaaaacgggtattgacacgggaacactagttccccatgtgagacattgtgaggatatcagctggggactaaagctagtatgattttttgtgtgctttactctgtttttgattatttgatgtatcattttaacttcttaaattagctttaattaagtcaatttttgtgct

SEQ ID NO: 144803 - DNA, 502 bp, Arabidopsis thaliana landsberg
aaaattgtcatctcattcttctatctttgtgtgaatgatgtttggtatgtagcttttggatgagctacaaagtgatcagtggcctgttaagccaggtcatcggtcccaacgatgtacaggcgtggcattgagtgtagctgcaggattgcttggagcttgcttgcctggaactggggctagaattgtagctttgatcggaggtccatgtacggaaggccctggaacggtaagtatatgttgatgattgttggcattgtgagctttgatcacaccatgtgtatgaagcatatttgtaatctcttttgtacagattgtctcaaaggatttgtcggatcctgtgcgttctcacaaagatttagataaagatgccgctccgtactataagaaggctgtcaagttttatgatagcatcgcaaagcaactagtcactcagggtcatgttctagacctttttgcttctgcacttgatcaggtattactgcgacgtaattataaatcgttg

SEQ ID NO: 144804 - DNA, 965 bp, Arabidopsis thaliana landsberg
atttgttgcagaaggagaaaggagaaagcttcttctcatttgccagggacatgactattacatcaacaaaagcaatgatacagccagctttggtaactgaaggtcgtgatacttggaggtcaaagcttctatgggtttcacgggtttttcctatgcctcttgtgggtcttttcctaatcggggctttttgtgctgactttggagatcagacctcagactatccagaattagaagcactttcacggcttgactttggagctgctatgaaggttttccttgctaagagattgacatccgagtaagtccggtcttattcatgattctgaagttgtttttcttttgctgatctaaacttgggatatgtgctctacttgacacatttcttaccatttgaattgtgtatgtgcttcaaagatagggcaaggcagagtagttttttcttattttcttagaacatgcaaatatatgtaaggctagtaggaagttaactattctattattttttgttgttgttgtgaaggctaacactagagacatcagatatagaggaaaaatctgtcatcattggtgagagaaaccgagcagctacggaagctttaagaagagcaatagagcaaggacacaagagaattggaattctatatggcggaggccacatgcccgacctgggaagacgactgagagaagagtttgatcttgttccttcagaggtaagatgggtaacagcttggtccatcagaaatccaacggacttggagactagttcatatccgattctgaggaaaatggcagaggctttgcgttggccactaaaccggtaccaaacattggcattgctaatattttcatctgtacttgcactggatctctgcttttgggagctcttctttggttcgacaattgactgggctacccagataggtgcagagttataccagtttatagataatacaaaaattgtatga

SEQ ID NO: 144805 - DNA, 717 bp, Arabidopsis thaliana landsberg
caatgcatttaagaagttctttcacccagtgttagaagaaatgacagctcgccgctcttcaactgccaaacagttcaacatagatgattgtcttgagaattttcagagattgttatacaaaagtgctgatgataaaacaaagacggacaattttctattgcagcttcaggaggaacttgagtcccttataatccaagtaacaaagcaatttgccatacagagaacagaggtaaactcttatgatacttactcgtttctgtaacataatggaagtttttcacggattcattttgaagatgttacattgtgtgtatattatattcaattgtctcattgttgtccaggtattcccaatcatcagcaagaattgcaaccatgaaatgcagaagcagctcctatacacaagcattcatgtcttacctcttggattactaaagtgtgtcatactttggttttctgctcatttatcagaagaagaatctcaatccattcttcatttcttaagtttggaagattcttctcccaagaaatcatttccacgcctcttgctacagtggcttcgttttggctattcaggcaaaacctctgttgaaagattttggaaacagttggatgttatgttcaaagtaagatgttcctgccaaaaggagcacactgaagaagcatcaggatcattttccaaccaaacacagctgcaactatgtaaagtatctaaag

SEQ ID NO: 144806 - DNA, 667 bp, Arabidopsis thaliana landsberg
atgatttactcacggacacatgaccatcgtactgcagggtgctgtatatatgaaatggcttatcttaagccggcatttaaagcatttgtaagttgctgtgtaatagaaacatatccatcttagatgcattttcatttttaatacttatttaattatcttggttaggatatgcaagcactgattaataagataaacaagacgattgtgtctccgctccctgccaaatattctggtccattgtaagttttgttttgcttgtaccttcgtatatatctttgtttgtttacagtaatattttctgaatcttgtttttagccgaggtctcgtcaaaagcatgctgcggaaaaacccagaagttcggccatctgtatgtataactttacctagctagttgatttacttcattggaaatgtttgttaactgctaacaagtatgaaactatcacaggcctcagatttacttagacatccacatcttcagccttatgttctggatgtcgagcttaggctcaataatcttagacgcaaaacattaccgtctgagttgccgagttccaagaggattatgaagaaagctcatttttctgaaccagctgtcacttgtccagcctttggagaacgacaacataggtctctcttgaatgacagagctctgaatccagaagct

SEQ ID NO: 144807 - DNA, 2435 bp, Arabidopsis thaliana landsberg
gagaaacgattctctccgactaagagagagaagcgaatttgttttttttcttttgtgggttcaattcgaattgttttccctgagactcaaggtacgtttttggattttggttttcgttattttcttcaatgaatatctgagtgattatatatgaacgctctgttttctcgagaaagtgtgtattgagtgaagaaaattactaggaaagttaaaggtagattgaattgtgtaactctactagttggtgatagttttgaacttttgacagaggaaaaaacttcaactttgaatcttttactggtagatacagtggtgctatacttgatagttactcggatctctgttatatttacagtttgatgtccacaattgcaagatctaggtgtaattgaatactgttcttttagatttatgctttacagaggaactgcttaaagatctgatcttttttttttataaagttactgtgtcattactctgcattgagcaatgggtagcaacgaagaaggaaaccccactaacaactctgataagccatcgcaagctgctgctcctgtaagtaatggaatcaatggaaactgattggttttgtcacagatttgtgtttagtcaaagtttgactgttgttgttgttttactttgtatatatacaggagcagagtaatgttcatgtgtatcatcatgactgggctgctatgcaggtgatttttctttgaccttgttttgtttctgctgtgtgaattgtgtttcgttagcctgagtgattttagcttgtttctcatgatatttgtaggcatattatgggcctagagttggtatacctcaatattacaactcaaatgtggcgcctggtcatgctccacctccttatatgtgggcgtctccatcggtacttatatttcaaacttgttgaatgtatgtatatatgcttatttgttactttggattgagtttgacttttctttgttattgtagccaatgatggctccttatggggcaccatatccaccgttttgccctcctggtggagtttatgctcatcctggtgttcaaatggtaatcctcccttccttttagtggttacttatatcaacaaatagttgaaaagaccagatttactgatttgtgttttcctactttactttaccagggctcacaaccacaaggtcctgtttctcaatcagcatctggaaaagtcattttcttgtgatgtttctatgtgaaatgtgtagtatgatggatattggatatgaatgtatgagaatgtttgcaggttacaactcctttgaccatggatgcaccagctaattcagctggaaactcggatcaagggttcatgaaaaaactgaaagagttcgatggacttgcaatgtcaataagcaataacaaagttgggagtgctgaacatagcagcagtgaacataggagttctcagaggtttgtcaaactagcctcaactctttcttattcaatagatacttagatatatagaatctaacgtggttttgatatcaactagctccgagaatgatggctctagcaatggtagtgatggtaatacaactggggtatggactcgtcctctctgctctgaactaggtttagatttatcttttgcgatctttattcatattcttcttttttttattaccacagggagaacaatctaggaggaaaagaaggcaacaaagatcaccaagcactggtatttcttcctgaaaaataacacaacgcaaataattgtatgcttttaatgtttacaactatttaaagctaatggcttttgtacttggtaggtgaaagaccctcatctcaaaacagtctgcctcttagaggtgaaaatgagaaacccgatgtgactatggggactcctgttatgcccacagcaatgagtttccaaaactctgctggcatgaacggtgtgccacagccatgggtatagtattcttgtgccactctcgttgacttcatttattcgtgacatccccttttgtttgtttattggtgttagtgtgtgtttatctgcagaatgaaaaagaggttaaacgagagaagagaaaacagtcaaaccgagaatctgctaggaggtcaagactgaggaagcaggtgattgctactaaacattttgtaactaaagactaatgatgagagctgatagattttcatatttacttaatggattgtttgttgttcacataggctgaaacagaacaactatctgtcaaagttgacgcattagtagctgagaacatgtctctgaggtctaaactaggccagctaaacaatgagtctgagaaactacggctggagaacgaagctctattggtaacaatctactcgcattttgaacagtaatcataagtctattgatcataataacgctagttattcaaatgatggttcaactgaaagcgcaagcaacagggaaaacagag

SEQ ID NO: 144808 - DNA, 509 bp, Arabidopsis thaliana landsberg
cagcttcttctgctttcaattactctcgccgacgattttctcaccggaaaaaaacaatatcattgcggatacacaaactataatggacctcctcttgctggagaagtctctaatcgccgtcttcgtggcggtgattctcgccacggtgatttcaaagctccgcggcaagaaattgaagctacctccaggtcctataccaattccgatcttcggaaactggcttcaagtaggagatgatctcaaccaccgtaatctcgtcgattacgctaagaaattcggcgatctcttcctcctccgtatgggtcagcgtaacctagtcgtcgtctcttcaccggatctaaccaaggaagtgctccacacacaaggcgttgagtttggatctagaacgagaaacgtcgtgttcgacattttcaccgggaaaggtcaagatatggtgttcactgtttacggcgagcattggaggaagatgagaagaatcatgacggttcctttcttcaccaacaaagttg

SEQ ID NO: 144809 - DNA, 265 bp, Arabidopsis thaliana landsberg
ctttgctatttctcaaaaaaaaatgagggacgacagagaaagaggagagggtgatttgtcatggcctttgatgggagagaaaagtagtgtcaaggaagaagtgaagaagcagctatggctttcaggcccactcatcgccgtgagtcttcttcagttttgtctacaagttatctccgtcatgttcgttggccatcttggctctcttcctctctccgccgcatccatcgccacctctttcgcctccgtcaccggtttcagcttcctc

SEQ ID NO: 144810 - DNA, 610 bp, Arabidopsis thaliana landsberg
agccggttgggttaagaaaccgatccttttctgcgaatgattgtctgcgaaaaacccgagttctgtctcgatccaagttgggacaagaaggagacttcccggggagtggttctgacaatgctttctcctctgaggatgatatggaggattacacttgtatcattgcacatggtcctaacccgaaaaccactcatatctatggtgaccgagttttagagtgtcacaagaatgagttaaagggagatgaagataataaagagaagtttggttctgtgttcccctccgataacttcctcggcatctgcaacttctgcaacaagaaactcggaggtggcgacgacatatatatgtatcggtgcgtgcttcttttccaataccaatactatctaccatatataggatgattatgagttgcgcaagctagaggatgttaagtacatttggaatacaatgctaaacttgtgatgtttgtgtggttatgaatttgcacttttgcagagagaagtcattttgcagtgaagagtgtcgttcagaggagatgatgatagatgaggaggatttggaagagccgtgcatagatatgcatgaatctttaaagaagctcttctga

SEQ ID NO: 144811 - DNA, 552 bp, Arabidopsis thaliana landsberg
atggcggttgagcaggctgcgccgctactgtgcgctggtgtgactgtgtacagtccactgagccactttggtctgaaacaaccaggcctaagaggaggtatactagggttaggtggagtcggtcacatgggtgtgaaaatagccaaagcaatgggtcaccatgtgactgtcataagctcatcaaacaagaagagagaagaggcattgcaagatcttggagctgatgattacgtgatcggatccgaccaagcgaagatgagcgaattggctgattcgttggattacgtaattgacacggtgcctgttcatcatgcacttgagccatatttgtctctgcttaagcttgatggtaaactcattctcatgggagttatcaacaatccattacagtttctcactcctctgcttatgcttggtgagtcccttattaaaaaagttaaccctttcttaatgattgtgatttagaggattactaattgggaatgatgatgatgatggtttgattagggaggaaagtgataacggggagcttcatagggagcatgaaggaga

SEQ ID NO: 144812 - DNA, 618 bp, Arabidopsis thaliana landsberg
acaagattcagtacctaaatcaaaccctaatccggaactaatcaatgaaaccccaaaggtctctctttacgaacaatgcagggaagagaggatcaaagagaatcttcagaggatgaacaatctgggtctcttaaatctctctcgcaaactcaaaccccagacccgacccgttaaaagatcttacggtaaccgtaattctgttcagaatccgactcctcctcttcagccttctcgccgatcttctcggtaatctcttcctttctctgtctccgtttctctcattccatcatattttggggttttggatttgaaagatgagtttgtggaattagggattatgattcgatttgtatcagtttaaaggagagatttttctggaggaattgggtttttgaggcaaaactagggtttaagaatttggattttaaagtaagaatttgggtttattattgattcttttcttctgtgattgttagattggagaacacaactccagttatctacactgatgggatcaatgagaagggcaagaaagcatctaaacgagagagtgttgtgattggtgaagggataagagctgagatttacacagaggaacatgagaagctttttgggata

SEQ ID NO: 144813 - DNA, 1576 bp, Arabidopsis thaliana landsberg
  unsure (1)..(1576): unsure at all n locations
ctctccccgcaggtctgttagctgctctcgtagtcgtagtcgaagctactcatctgatcggggcagatcttatctccaagctatggagaagaggaaggtcatcctcgtactcacccttctatcgacgacgcatattctactctccttcgagatctccttcacctgatgatcgttacaacaggagacgcgacagatcatactcaccttactacaggcgaagggacgggtcaagatcctactcacgtaactgtagagcacgggacagatcaccttactacatgcggaggtacaggtccagatccaggtcatactcgcctcgctacagagcacgtgaccgatcatgctcaccctactacagnggaagagaccggtcttattcacctcactaccaagggagagacagatcctactcacctgaaagtcgttactacagaaggtatggtgcagtcaacataaatatacagatcagctganactgcttagtattgttgtttctgaaaatacgtatgaaatcaggcacaggtcggtatcgggaagcgtaagccctggagggagaagcatgtcacgtagcatatccccaaggaagggaaggaaagagagcagaagcaagtctcggaggcacgacaggcaatcttcaatgtgtcattcgaggagcgcaagatcaagcacctccagatccgtcagcccataacagtctctacttacttgaagttgacatcaatcactcacttctgttgttgtattaagtattttgggacttgtctattccttgtatttggaattgatgacagtacgtatgttatgttggtttggtgttaggatactttattacttctgtggaaatgttgctttggcgacgagtcgtgagagaaatggaatctcttctttgttacaaaaaatctattttcatgtctttctactccaacaaatttctgttgttgtataattgttccacttacttttccaactttttttcataatcaatagacgattttcagaaatatcaacttttagggatggactcattactcactttgtggcattcttctttcaatgttgttgtatttttaaaacaaaattttgttttaatttttttttttactttgtcttagctcaaattatcaaaacaataaaaaattgtcttaacctttttctgtttttcaacattttacttaattatatgtaaaacaaatttacgtttctttccctctgaattattttctagttatattttgtatttcatacacctatgtgtaagtggtataaagagtaaatttaacttcttcttcttttcaacaagagtaaatttaactttaaaactaaaaattacatgattttattagttatatatatagttatttttgaatagttaatatagattatattgatatgcacaaatctcttagtgatttgtcccactttattaggaatcttaaaaactgaagttcgagaatattgtcgtttgcttagacaattcaatccccaaactataattgtgcctgattatttgaataccagaactgaaaatattaaacttctccaactgattgataaacatatccaactgaatctttaa

SEQ ID NO: 144814 - DNA, 1186 bp, Arabidopsis thaliana landsberg
cactgacgagacaaactcgacgaagcaatgtggtctcttgcgctaacgttaccatctccgtctttggtgtcggtgaggagcactaaactcggacgaagtgttagtaatggtggccggaattggtcgggacttactaagttgtcggagaaatcgaagactaaacgaggtaatggtctctgctgcaaggcggagctgtcggagctagctccagtcgtctctgctacttatggtgtacttcttctaggaggcggtctcttcgcttgtaagttactactgatctcataattcaaattatttatctggatttttggctcaatacactaaaaaatttgaactttgtattccgaaattgaagatagcaaatctggaagcaaaggttctctctttgggggtttgaccggttctgttcttatggcatctgtacgatcttgctctctctgtctctattcttagtgttagtttcaagttactacagagttaaaaatctgaactttgtcctttgaggaaggtagttaggaacttagtgcaatattcaggtcattgtttcttcttgatgtggttctcttgcaagctttatttcaattccttgacaacaatggtgtttttgtctctttagggagggcttaagaaactatctacaacagttgatctgctagaatcttctcctattgttgcataccttagttccttcaaaacatatgattgtgttcctttttactctttgtgctttccatctcggttttatgatccacgactgtatcactgaaagcatccacatcttcttgttcaactgttgaaatgattacacttattactgagcatgccaatgtttgaatttcttctttataggcctacttccttactaaatcaccagagacaagagttctcggcgataccataggtcttggtgctgccttcctcttctcttctgtcttcggtaagcttgacttgtgaagatgtgttttgtgtttgcatatatgccatatgaatctcttctcgttgcactgaattttctgtttttttctacaactttcttgcaggatttcgtttggcatcttctcggaaaccagttccagcaggtccactactactcctttccatcggcatgttgtccttctttgtcatggcgtatatgcacgacagtttacctgctatatccatacccgaccctttacctctaccttag

SEQ ID NO: 144815 - DNA, 1196 bp, Arabidopsis thaliana landsberg; identical to SEQ ID NO: 5341

SEQ ID NO: 144816 - DNA, 2984 bp, Arabidopsis thaliana landsberg
cttgcagaagaatgcgtctttaagacggttttcgttacaaggctgcaaaggggtaagaggtgatagagtattggaggcaatcactgagacattgcagattaatccattgattgaagaaattgatttagcgagaactccgcttcaagattcagggaaagcagatgagatttatcagaaactgggacacaatggtaggaagatagatgaagcagagacggatgattcactcaaggatatgccacttactgagccaaagagcgttagagctttcctctgtggacaaaactatgcaggaaagacaacactctgcaactctatactgcaaagttcgtctgcttccggttttccttatgtggagaatgtgagaaatttgatgaatcctgtggagcaagtggttaaaacagttggtgggatgaaaataaagacattcaaggacgaggagacaaagatctcgatgtggaatcttgcggggcagcacgagttctttgctcttcatgatcttatgttcccaagcccgtgcttcttcttgatcgtattgagcttgtttaggaaaccgagcaataaagaacccaaaacaccagcagaagtagaggaagagcttgaatactggcttagattcatcgtttccaactcgagaaaagcggtccaacaatgcatgaaaccaaatgtcacaattgttctcacacattccgaaaaaatcaatctacaatctgaaagctttcaggcaactgtgggttgcattcagagactgagagataagtttcaggctttagtggaattttatccgactgtattcacagttgatgcaagatcatctccttcggttagtaaactcacacatcatattcggatgactagcaaagccatccttcaaagagttcctcgggtttatcagctctgcaatgatatagtacagctcttatcagactggagatcagagaattcaaacaaacctattatgagatggaaagcctttgcagacctctgccagtttaaggttccttccctgagaataaagtctcgcaacgagaacattcagattgtggagacaagacggcatgctatagccacatgcctccaccaaatgggagaggtgatttactttgatgacttgggctttttgatactagactatgaatggttttgtggggaggttcttactcagttgataaagcttgatgtaagaaagcaaagcactggggaaagaaatgggtttgtgagcaggaaagagctagagaagactttgagaagtagtttacagagtccaattccagggatgacctcaaaggtacttgagcactttgatgcgtgtgaccttgtgaagatgatgaagaaagtagaactttgctatgagcaagacccttccagtccagactcttcattgttagtcccatcgattctcgaagaaggcagaggaaagacacagaaatggcagataaacacacatgactgtgtttattcaggccgtcatcttcagtgcgatgattcaagtcacatgtttctcacagctggattcttccctcgtttacaggcaagggctcaaaatcacttttctgtttctttcatctctttaactcaaaccttaccaatttttcatgttgcatgcacaggtgcatcttcacaacagaatcatggaactgaagaaccaacacggggcgacttatagtcttgagaagtacctcattgctataacgatccatggtattaacattagagtggaacttggaggacagttgggaaattacattgatgttctggcttgttcatcaaagagcttgacagaaactctgaggctcattcaccagctaatcattccggctatccagagcagctgccgaggtgtaatcctccttgagcacatcataagaccacaatgcgtccaggacttgactccaccgcgattccgacaaagccagtttgtttccctccacagactaaaagaagcattatcatcagttcctgcagagactatgtatgactatcaacacacatgggactctgttctagattcaggtaagactgttctaagagccggatttgatttagcccgcaacctcctctctgatgatgatttcagagaagtcctgcaaagaaggtaccatgatctgcacaacttagcacaagaactacaagttccaacagacgaaaaccccgaagcagataatcatgtaccggtgaccaatgagctggaaaaagttgatcctagcttcggtggaattgctaaaggagtagaagcagtacttcagagactgaagattattgagcaagagatacgcgacctgaaacaagagatccaaggactgagatactatgagcacagacttctgatccagcttcatcacaaagtgaattaccttgtcaactataatgtccagatggatgaaagaaaagttccaaacatgttttacttcatcagagcagagaactacgggagacgactgatcacatctatggttcctggcatggtcgctctaaggatacacatgttatgcgaatttaggcgggaaatgcacgtcgtagaggatcagcttggttgtgacgtaatgcagatagacaaccaagctgtgaagtgcttggctccatacatgacaaacttcatgaaactggtgacttttgcattgaggataggagcaaactgggcagctgggatgggacacatgatacctgacttgagccatactatcgctcacctagccaacccagctgtcatgactggagcggccggagctgcaggagccataggggtcgctgctgcattgggtaggaaccgaggcagagatagagatattcaggaacaagaacaaagagcagctcaacagtggctcatcgattacttgagggaacagacttgctcaaccgggagggatattgcagaaaaatttggcctctggcgagttagatacagagacgatgggtccatcgcctggatttgcaaacggcatatgatcaccagagcccatgaagtgatccaagttcctctctaa

SEQ ID NO: 144817 - DNA, 448 bp, Arabidopsis thaliana landsberg
atgattaatgataatcacatgggattttccgtcttttctctttaccgtctaaatcccaacaacaaagcctttggagaagctattctcagattcacgacaccagttcgtcacaagcttcgagcccaggtattctctctttccctcaaaaaccctaatctcgacttataattcgatcgataaagtagaagcttcacgcaattcacatgttctctatcttctttctaactacagctcggaaaacaaaattggaacttgctgcataaagtttagtttttttattgaatttggaaggatgattgggaatccagtaattcaagttccatcatcactaatgccatcatcctccatgattgcttgtcctcgagtttcacccaatggggttccttatcttccaccaaaacctagaactaggcatttagtggtcagagctgcatccaattccgatgct

SEQ ID NO: 144818 - DNA, 1658 bp, Arabidopsis thaliana landsberg
  unsure (1)..(1658): unsure at all n locations
aacacatatgtgtctactacatctattcctccagattttgcctttgctatcaaggacggccacatctgcaagttcgatttcccattaatatttgcagaagaagaagaagacaaagagatcccgccaaattttattggaagtttcatacgatttcagaatgtttggggtcgaataataataaatcagaaaataagagcacttaatttcacgaaatccataaaactaaaaccaaatcagaatgtttggggtcgcataagaataaataagaaactaagagtacttaaactcgcaaattcgataagttcaaaacggcctagtcggaaaagacgattttatcctctctctctctctactcttaacggctcatgtgtttcgtattagcaacctgccgccgacttagtgtgctaattcacgtgactgatcggcgcgatttcgccgggaaattgcagaaattaaattccggcgacgttacgaaacttctagatatagacggatcggtgagaacggagagagaattacctgaggagtgctgcgagtataatggattgagccggagaaaaggatcttatgttcgccgtcgatgatcagcgagcgaccgtcgtatgttacgtttgcgacgtctccggcaactataaccgccatgagaacgagaaaaactagcgagtactgaaaagtcgtcatttcttatgtaaacactgacgtttgaagattctagagagtttttatagtttgggactatgcacaactaactgtgcagtgtatctcaccatcgtctcgaatttatgcgacccaatcataaatttcttctttattttttcttaaatccggtttatatatgattcaatggaaattgcaattataaagtaaaagcccaatagcgtcaaaaaaaaagtaaaagcccaataatagtgaggcccatcaataatctggagtcaaacaatggtggataatggaaatctctcaaaatccaaatccggttttagccggttataaatggatttgactggtttcgggtcacaatcgaacggttgacgtcgatcatcattctggtagttgaaaactttgtcgtcgtcgtcgtcgtcgtcgtagcacgtgttgcacgtgagaaatttcccgcacaaaatcttactcttttcgtcttcttccccaatctgggattgaatctccagaatccatggatcgtgctttaactccgcgttttgatactccagctactctctcccctttccgataccgacatgggagctctctggccatcactcgacgattcgcgccggcgattgtttgcgcgaaacgatctccgatcgatggagtgagcgacgagctgaatctgattgcttcacagaacttagatcaagctcccgcacgaagactagcccgttccgcttttgttgacttgcagcttcagctggatcactgcttgttcaaggttgcattgactcatacctttatagcaaaataattaacataatctccgttctaatcatttgtatctggtgacagaaagctccgagtgggatcagaacagaggaggtaagcagtgattttgtttatttggtctcttcgaaggagatacaaagtcgntgaatcttcttctctgaataatgatagtggtatgagagacattcgaaaggggaagatattttctgcaagagttg

SEQ ID NO: 144819 - DNA, 352 bp, Arabidopsis thaliana landsberg
ggaccggaaggggtggctgaaaatgtcgatattgagcacagccgggtcaggaaagttcagcagtgaccgtacaatagctcagtatgcgaaagagatttggaacattgaggcttgtcctgttccctaactccttataccgttcgcatagacgctacctgcctttataaaggcatctccacatccacgcagctccaaagtcgatatatatcatatagatctcataagaatataaccaaaataaaataaatgataaaccttttcgtatgtatatgtttttgatgtatgcaatattttgattttgttcaaagaaaacgttatgtaaaatgctatatgaatgaatgaatttgggtta

SEQ ID NO: 144820 - DNA, 609 bp, Arabidopsis thaliana landsberg
cgacgacggcaatggcgtcagcttccaagaacattcagcaaaaccctttctcctcgaaaccaccacggcctccgtattcctccggcgctgcatcaacaaccgccgtggcttccacctcagccgagcccctaattcgaaactctaccttaaatcctaaccctagcaccagcggcttaccgtcgacatcgaattcaccgattacgatgtcacaagaagatgaaatcctcgcacgctccagtcacataacccggtcggagcttctcaaacgccgatcacacaacctgaagcagctggccaagtgttatagagacaattattgggctttaatggaggatgtcaaggcacaacacagggattattggtggaagtatgggattagtcagtttaaagacgaaaataatcaatcgaataagagacggaggcttggtcaagagggagatatcggagatggtggtgatgctgttgaaggtagtggagacaatgttactaacaatgatggtgttaagagtgatcagtatgcgaatagtaattgtgggagttgtatgtatggatgcaaagctaaagctatggcgcttacgaaatactgtcaattgcatattctcaaggata

SEQ ID NO: 144821 - DNA, 534 bp, Arabidopsis thaliana landsberg; identical to SEQ ID NO: 10082
  unsure (1)..(534): unsure at all n locations

SEQ ID NO: 144822 - DNA, 478 bp, Arabidopsis thaliana landsberg; identical to SEQ ID NO: 14656

SEQ ID NO: 144823 - DNA, 483 bp, Arabidopsis thaliana landsberg
taaacaaaaagcttgcgaagaagaagaagaagaaaatggcggatttgattttgagttcctcctctgcacaatcctctctccttcacgtcagacctaatctctatctactcaatacctccactgcttcaccgatccgaagtgtcagattccaaaattccaacggttttcatcctctggcgttcgcatctggtcaccgacgacttcctctcggtgcagtagttccctctgactccactaagacgatcaccagtacgattactgctaactgcgttgattcgggagtcaaagctgttgaagtcgagcctacgaacgattacggaggtggtggtggaattggaggtgataaatttggcggcggtggtggaggcggcgatggaaatgacgacggaggggaagacgataaggaggagagtgacgggaagaagagcacgcctctgtctatgtcgcagaagttgactcttggttacgcttttctcgtcggag

SEQ ID NO: 144824 - DNA, 1706 bp, Arabidopsis thaliana landsberg
atggtggagaaacttacatatgttgacaaagtgcaggtttgtctcattcctcttttaggtatatggtagcttgtgaagcttgtgaagcagttttcccatgtatccttcagattttaccaaaccatatctacaatcagagggacccaattatccttggagttaaagtcaatgatggaatactaaaggtatatggtattttctcattcaggatctgagtacacttttctgctggatcacaaagatctaacaatacgtcttgttgatttaggttggaactcccatttgcattgttaaaaggattgagaatgtaagagtgtttatggacattgggcgcgtcgcatcaattaagaatagcaacaacatgccagttgattatgcaaggaaaggacagtaggtggctattaaggtatgagatccctctttttgtcatcatttttctagtttttactgcctttccttaaaaactaatgtttgttttcgtattagatcattgcttctaacccagaagaacagaaaatgtttgggaggcactttggtgtacacgacaggcttatcagtcacatttctagtcgatccgtggacgtaatcagaactaattactgggtaagttgtatacagtctttcatgccctgggttgtcaaaaatgttgttttaacattagcttgtgttttagtaaagcttaaactgatattcgaaacctgattgcagaatgagttatctaacgacgagaaggatcttgttttgagacttaaaaggatattcaagatacaatgaagatttttgagatttgagagtgagggacttaaacttatgtattttttttctttttttgaagtgctgatttttttatttttttttcgtttttaataatatagacaaacaactcctttaatgcccctaaatactttatggaagcaattgtcttttgtttttggctaccaatattttacaaaatattttgatatacatataatttacaagataatacccagactggcttattgtgtaacttaataacatttgaggcgaatctatgaataaagagaaataaaggacctattcacagattcagacaacatcgtcgcattttgattttgaatcgattattttacctacactcgtgtatgagccactcctccggaatatgacaacatctccaggagtctctacgaaattcttcggctctcaaaggtattcacgacggtcttttagctctattctctattgagaacctgatttttccggcgaattttgattattgcaaagttggagaatttttgagatttagaagagatactggcttaggattcgtattcatgtcgagcttattacactgtagaaatgtcgtagattgtgcgtttacttcttccactgttcgtcgcattgtcaatttagggtttttagtgggtagaataagaacgttgtgttcagtgtcacaagtgaaatcagagaatctcgaaaagcaaaaaccatgtttggaatcttttacagtttcttatctcgtggattcttgtggactgtctttggaatctgctaaatcgaattccagattcgtcaaattggtttcgtccaagaaaccagactctgttcttgctctcttcaaggaccatggcttcaccaatgaccagatcaccagtgtcatcaaatcctttcctcgagatctgtcactgagcccggaagatgtaatctcgcccaagctcatgttt

SEQ ID NO: 144825 - DNA, 2902 bp, Arabidopsis thaliana landsberg
  unsure (1)..(2902): unsure at all n locations
cagaattgtagagtctatcagtgatggtgaagatagctcaagtgaaaccgatgaagaggaagaagaaaatcaagatagtgaagataataacaccaaagataatgtaacggtggagtctttgtcttctgaggatccatcttcatcatcatcatcgtcatcatcgtcgtcttcatcttcctcttcctcctcgagtgacgatgaatcatatgtaaaggaggtagttggagataatagagatgatgatgacttgagaaaggccagttcaccaatcaagagagtctctttagtggaaaggaaggctttggtaaggtataagaggtctggttctagcttaaccaagcctagagaaagagacaacaagattcagaaactaaaccaccgagaagaagaaaaaaaagaacgacaaagagaagttgtaagagtagtaacaaagcagccgagcaatgttgtgtacacttgtgctcactgtggcaaagagaacacaggaaaccctgaatcacacagctctttcattagaccacattcaataagagatgaaattgaggatgtgaacaactttgcttctactaatgtatcaaagtatgaagattctgtttccatcaactctgggaaaacaactggagctccatccagacctgaagtggagaatccagagacaggaaaagaattgaacacacctgagaagccatccatatccagacctgaaattttcactacagagaaagcgatagatgtacaagtacctgaagagccatcaagacctgaaatttacagttcagagaaagcaaaagaggtacaagcacctgaaatgccatcaagacctgaagttttcagttcagagaaagcaaaagaaatacaagtacctgaaatgccatcaatacctgaaatccagaattcagagaaagcaaaagaggtccaagccaacaacaggatgggtttgacgacacctgcagttgcagaggggttaaataagtctgttgtgactaatgaacatattgaagatgactctgattcttctattagctctggagatggatatgaatctgatcctactctaaaagacaaagaggtcaagattaataaccactcggattggagaatattgaatggaaacaataaagaagttgatctattcaggcttcttgtgaactctgtttgggagaaaggtcaattaggcgaagaggatgaagcagacgaactagtttcttcagctgaagaccaatctcaagaacaagcaagggaagatcacagaaaatatgatgatgctggacttctaatcattaggccaccaccattgatagagaaatttggtgtggaggagcctcagtcaccacctgtggtttctgagatcgattcagaggaagataggctgtgggaagaactagcatttttcactaaatctaacgacatcggcggcaacgagcttttttcaaatgtaatttcttgttttctccaaaacagtatattcatctccttttgttaggaacaaggtaaatctaacttgaaatgtttgcaggtagagaaaaatatatcagctnnnnnnnnnnnnnnnnnnnnnnnnnnnnnnnnnaaacacgatctatgtattgatcttgaggttggtttgaagtgtatgcactgtggcttcgtggagagagagatccgaagcatggatgtatctgagtgggtaaggaatttggagtattcagtaaaatgattgaaacgttaaactaaaaggtttgatggtaactctagtgcatgtttcttcatgtagggagagaagactacaagggaaaggagaaaatttgatagatttgaagaggaagaaggcagcagcttcattgggaaacttgggtttgatgctcctaacaacagcttaaatgagggatgtgtttcttctgaaggaactgtttgggataagatcccaggggtcaaatctcaaatgtatcctcaccagcaagagggttttgagtttatctggaagaacttagccggtacaatcatgttgaacgagctcaaggactttgagaacagtgatgagaccggaggatgcatcatgtcacatgctcccgggactggaaaaactcgtctgaccatcattttcctgcaagcctatcttcaatgcttcccagattgcaaaccagtgatcattgctcctgcgagcttgcttctcacatgggcagaggagttcaagaaatggaacataagcattccctttcataatctcagcagtttggactttactgggaaagagaactcggcggcgctgggacttttgatgcagaagaatgccactgcaagaagcaataatgagataaggatggtgaaaatatactcttggataaaatcgaagagcatactcgggatcagctacaatctgtatgagaagcttgcaggagttaaggacgaggacaaaaagacaaagatggtgagagaagtgaagccagacaaagaattagatgatatcagagagatacttatgggaaggcctggacttcttgttcttgacgaggcacacacacctcggaaccagagaagttgtatatggaaaacactatccaaagtggaaacacagaaacgaatcttgctctctggaactcctttccagaacaacttcctggagctgtgcaatgttttgggactcgcaagacctaaatatctggagaggctcacgtccacactcaagaagagtgggatgactgtaacgaagagagggaaaaaaaatttggggaatgaaatcaacaaccgtgggattgaagagctgaaggctgttatgcttccatttgtgcatgtccataaaggaagcattcttcaaagtagcctccctggtttgagagaatgtgttgtggtgttaaacccacctgagctgcagaggagagtcctagaatccattgaagtcactcacaaccggaaaacaaaaaac

SEQ ID NO: 144826 - DNA, 725 bp, Arabidopsis thaliana landsberg
cccaattatctcctcctacgctcccgactagcgtttatcctattccggtcgccgccggagaccttgtatctccatataatggtgtcgccgaaagatttagtggcgatagtacactcttcgctgctcggaacatcccggccaactccaacgcagcgtatcgaactcactcatgccattcgcaactcatttccctctcttcagaacctcctctctttcccggtacttgctcaatttccttgtactcgatgatgcgtccttctgttttctggatacagtaacgaattttgttttaatctctggcagcctccgaagccgtcggacagagcgcaagttcagtccaaagaaattcgactcccggattcgctgccaatatctttggatgaccaagatatcgctattgtaagtgtttgggagacgagtgtgtttgtttctccttagatttctagatgaacattctttggtctagtgaaggattagattttaaaatttagatatgagaacaactgacaccggctaaagcaagttttgattcaatttgtggatgcattgattcagagaaaggtgcctttaacgactctctgttcattgatatctaacagcctatgatcttcttgtattgttattgattgtagagcttgaaactgagtgatgagcttcacctaaatgagatagattctgtttgtctgcttgtatcttcgaatcaggaggtgcgattcctttcattt

SEQ ID NO: 144827 - DNA, 2813 bp, Arabidopsis thaliana landsberg
cagattttatttcctggcaattggcgaggctgttcttccttcaggagagagttgattcacagatacagttcaggtgacaatgccttctttggtatctctaatggaacacgcctgcagaagagtttcgtacctcaagccactgggagtttcttgaccggtactatcgaaaaaacagaacaaccagtatcaacattcggaagtttgtgccagaatgagttggacagaataaactacatggtttatgacatgagtgaagcttttgtagcgagtgatgagggactgacatatgtagaaaatggagaagatgtgttccctgttgaagctgttgcagcagatgtttctcctgttgaagctgttgtaccagatgtttcccccattgaaagcctttctgctgagactttaaccgataagaccagtagccttatagactctgttgaatcgggaaccaatgcgactgttaaaatatctccggatagttcagtctcacttcctgatgcgaaagcaagcgttgatgacttttcttctggggtcaaggagtccttcagctcttcacttaaccaaggagaaaatgctgtaaagaacactttggagtccttctcctcgtctgtgacatccattacaaagaatgcttctgaagttgtagatagtgcagttaacagagcgttttctacgctagaccaaacggaagatgtagctggagacaagttttcgagtttttctactggcttgaaggaagcttcaaacagagcagctgttattgccattgatctgctgaggcaatcagttagtcttggagagagatctgtaacaaatggagtttcttttgttgtgtactcttatggatcagcaaaaaaattacttcctccagatgtaaagagtgcccttaactcgtcagaagatgttgctctaaaagtattgagtcccgtgggagctgtattgcagcaggtgctttgtcttatatactgaaggttcattcatattttcgtagaagaaaattaattctttatggactacagttgctaacagtatcatgatgaacaggtatctgttgccattggaggtttggagagaaatatcggtttggatccagatgacccaatccttcacctttttctcttcgtaggcaccacaggaaccttttggtacacggcttttcttaccctagaaggatattaaacttgcttttcttgagaggacaatgtagtatagaagaatttatattttccaccagatatttgcagggttctatatcgggtttggacatatggtggatatgctggagatttgtctcccaagtcaactctggaccttttaaaatcaagagacaagtcagtgctcatagatgtcaggcctgaagtaagacgctcttaagtttctaacaagttcccatttcatgatatataacttttcaaaacccaccacaatttgattatttctttcacataatgttcatcaaggagtttgggttgaaataaaaatgctcattttggctactgtctttttgaaggccttgagagagaaagatggaatacctgatctgcggagatcagctcgatttcgatattctagcgtgacactgcctgaggttggttttagcatcctcattattgttgaccacagcgaatatagaaactctacacatgtaatctatgaacacaacgaggtttcagcaatcagtgcaacagaagtaggatataagacttttctttattcacattttttatgggttcttgttcttgattcatgtttaaggttgacggtgatgtcaaacggctactgaaaggtggaagtgaagtagatgatatcttgacagcagttatcatcaagaacttgaaaatagttcaggtgtgctaccttcatgcttcttttgtaacttactatggttttgtggctcgagctgtttcagtttctaagtatgctgacatctcataattttgcttactctcccactaataggacaggtccaaggttgttgttatggatgctgatggaactcgttcaaagggtattgcaagagccctgagaaaagttgggattaaggcaagtcattcaggcataattcactttgaacacaataagttacctttaaacattttcgaataagctcttctttggttgcctatgatgtgacagaggccatacttgatgcaaggtgggtatagatcatgggtacaggaaggtcttcgtgtgaaagagccaaaacctgagacaacacttaccatcctcaacgaggtaataccatatgaatacaaatatgtttggactgtttcttcagctagatgaaattgaaactgctctcaaatcttttcatcagtaagttaaacatatcttaaatgcttttcaggaagctgaggcgatttttgaggacataaatccctctccattgcaactatttggagttggtgtggtatgcttctagttctatttttctatttccgtttaataataatcccatcctgactaatataagaagatatatgcagggttttttcgcagcattgtatgctttgtctggtgcgtttaattctttctcatttcccctttagaatatctcatattctccacaacacacaagctcctcacatccacgttttgcactaacatgattgctctatctctcgcagagtgggagaaaacactccaacttatagctgtcatcggccttagtctggtatatactagcctttccagtttctaagttttgtcaaattatagttgctttgttttgtttttcaagtttcaaacattatgcagactatatacctacgactttcttcatatgatgactccgaagacttcaaacaagacgtcag

SEQ ID NO: 144828 - DNA, 782 bp, Arabidopsis thaliana landsberg
gttaaaagcaaattcgtttcgagaaattaagcgacaagtgagtgaagcaatcagacctgtaattgctatctgacgaagcggaaagaggtctgaagacataactaggatcacagagtctcccgcgaatcagatttagggatttctccgccggagtctctttgcccatcggactggcgggaaaactgacaagccaagcgagccctctgtgtgaactgtgaagtgaacacccatcatcactactagtataaacttactctatgggccgtagtaatgggccttataaagcaataaaaggcccaataaagctcctttgctttctcctaataacgacgtcgtttacattgtgttagcaagtttgtgatggaagaaggtttaacggagaaaaaaaaaaggattgggttgttttggaaaatatcaaatgtgggcaacgaaactcgaccggaaccaatcgttccttctctgaagctctctttgcaattgaaaatcaacaacatacgatacgagagaggattcttcgagagatgagcagcacaagcactagttctgctcttatccaccatttccgcctcaccactcgcaacttgggttcgcctacaaagcaacggtgtccttacgctgtaactttctgcaattcggggagggaagctggactccgatactccgtcacgcaacgccggagcaaaggctttgggccggtgtcagctctcaatgacgacgattcaccaacagagaccacccccggcgttggctctgctgtagaagacagaccaccaggtatttat

SEQ ID NO: 144829 - DNA, 707 bp, Arabidopsis thaliana landsberg
catgtatattcagcagatattcagagacctgtatatcttacgttagctgtccatggcggttgggctttggaaaaggttggcttttatattctgcacaagaaactacctacacttgagaacattactgaatttcagtttgcttttgtaggatcctattcctgttttagatatatcttcaaacgacagcgtgtcatcattttggttcgtccatcaacagagcaaaaggttagtcttttatctgcttattacccaggtatttgattatatgcatatttgttgtttaaattgaatatatgattgttaagaagtggggttaaggttatggctatatcagtatctcttttcaaactaagcagtatccctcggaaaatcttgtctagctgaacattctttattgatggaacctactatgttgagagttatcaaatgaagattttttctttcttttacataaacctaatatcatattccatgaaatgatttttttccaactctattttttggagtttcaggagattgcgtgtaagtatagaacgtgatgtgggagaaacaggggctgcaccaaagactataaggttctttgtcccatactggattacaaacgattcctatcttccactaagctatagagtggtggagattgaaccttcagaaaatgtggaagctggctccccctgtctgactagggcttccaaatcttttaagaa

SEQ ID NO: 144830 - DNA, 1315 bp, Arabidopsis thaliana landsberg
ccatgatttggatttgacattaccctcagataagctgattgctgagggtaagactgcaaacattttttccatttttatcaccacaaacagatgaatttaacgagaggggattttctttttctggttccgtgcagaagaagaggaggaaatcgaaatgctcttggagaactatctgcaaaggtcttgacttttgctcttgaagcactctgatatgtttcattgttatgtagtgaaactctatggcttcgtatgtgcagatgtgagtcatgccatggacaagcagaaagacttctggattctgcaaaggaaatggaagactcaattgctgtcaatctaaggtactgaagataacaaaatactcctttctcttaaattcttaggcactcttaccatggtccattgtttgtttccagttctcggaggcttgaggtcagcaggttcgagttgcttcttcaggtcggtacattttgtgttgcagttggtgctctcatcgcaggtatattcacaaacttttgatgatttgtatgcgctttctctgaaacctttgaactatagtagagcctttgcatttaaactaccaactaccaagattgaacggagtgtccacattctccattacatatgtgctatttgaatttgactacaaagaaccatttccctatgaacatgatctcaaagccaacaaatcctttttttcccctgttcattgtaaatggcttataccttttgttttgggtacctgcaggtatattcggcatgaacttgaggtcctatcttgaagaacaagctgtaagtcctcatcaagcaaccacatatttacaactattgtgccatcattttaccattaacatctcgggttttgcagtctgcattctggctaacaacgggtggaatcatcataggcgctgcagtcgccttctttctcatgtattcctatctcagtagacgcaaaatcttttgaaccttcaatcctaaaagacgaaagaagaggtaaacctgtttcttcttcttcccatttccatatcccctttaaatttgataaagagcgctcaaaatatacgtaaatattacaggtttaaaatccgtgaagaaagtgaatttcattcatcacagttacattatggcattaggcccctactagtagttagagcgaggtgagttcatcaaatgtctgataaatatttattgttgtggtctccattgaaccccagtgacttgtgtgctatgtcctcattgcttggtaatgttgtaagatcaatgtatcatttaataaactggttcgaaagcaaatgaaaattcaaatatagggtttatc

SEQ ID NO: 144831 - DNA, 942 bp, Arabidopsis thaliana landsberg; identical to SEQ ID NO: 6427

SEQ ID NO: 144832 - DNA, 934 bp, Arabidopsis thaliana landsberg
gtatttattttgatccagaggcgtcactacgagcaattaaaggttgcagttccaattgtcctgaacgttttgaaggacatttcattggaaacagacgtgcaagttgaagatttatttgataaggctctaggcattgcctcttcaattcgagacgtttcttcaaaactggtctgtaagtttgataaattggcaattaggattccctaaatcactacccaaagtgtaaattctctaatttgaatattcgttttgcctgatttgatctcttttctttgttttacagaataacgaagaagaagcaaaagtccgttgtctactttgtctctatgtgatacagataacggtttgtacttgattccaactttgtttcgatatcatggaacttttctgacttttctcttttattatgagcatatagattttcttcaataccttagatttggtctggttttgcaggctattatttcagttagcatcagagacaaagcggcctcttgtattcctctggtgattcagttagaacagttcttgacatcctgtggtttaacacatcttggtttaatcacggggaatgacactgaaaaattaatgagcacggttgctggaggttactctcaatactcaaaaacacttcttcctgatttctcaataacacgcatctgttctcgtatcacatgtctcatggttgtaaaatgaacagatgatgatgagtttatcacctctttccctgacatcagcttgggtgcatcgcttttattcatctgtgcaaagatctcccatgaggttgcagaggcggctattgcggctttaggaagtgttgttgatgagcttcaaaacaatccagtgaaaaggtggcaagcttatgggatgttgaaatatatactttcctctggagatcttggtctgggaattcaaaagacatgctatcgagttc

SEQ ID NO: 144833 - DNA, 3405 bp, Arabidopsis thaliana landsberg; identical to SEQ ID NO: 30250
  unsure (1)..(3405): unsure at all n locations

SEQ ID NO: 144834 - DNA, 757 bp, Arabidopsis thaliana landsberg
cttgcgtatttcaggctgattagaaacttgaccgcttgattctcttaaaggaggtcttgcgatggattccgctattgatatcagttcagatagtgatgtcgagatacaagaaactagaaccaggcctcaacatcccccacggatagctgaaggttgcatttctgacctatcaattgttttatttgttttgctgtgaggttagctttatggagttgttgatcttggtgcaggatctcatagaagagatctctctacgctgagaccgcactttcttagtgggagttcttccggtgcaaatggccacactaaaacaggacttacaaatctcgactcacgtaatggttttgaatccaagccactgcctcgggcagaacaccatacacatattccgggaaatgggagtatcgtaacttccagaattcccaatctctctgttggtgattatgagaaattttcatctcaacaagcttttaaaaggacacatccaccaacctttagtcgacctccttttcctcctagacctgatattggtacaagtaacgggaatgcgagtcactttcgtggtggagcacatgatgatctaggcatggggcgtgtgactaacggcactcggatcctacctccatctgtggcgcacggaacatctgcgtctccttcacattttaatggattaagtgatccaatgcataggaatggcataggcgaagaaaggaattcggaaaatgacgagaggctgatctatcaggctgcactacag

SEQ ID NO: 144835 - DNA, 1202 bp, Arabidopsis thaliana landsberg
caaattctttgctgaacaatgctgggctcactgaagtaattgttgcatcgtcaaatcagctcaatttgaacttaacagaatctctttttgaggtaagaaggatataatttcttccctgttaaaatcctctgtagtaattgataatggcagggattggttagtttcggtcagcttggtttaatactgttgttttggtgctaaatcctataatcaaatttcccactagttttcagaaaggatgagtagcttccaactttctgtctacttgtataattgataagacggtatataaataatctcacatcagatgggagggaactaaatcaaaactttagaaaacctcagggcaccaaaacccttgagctagtttttgttgtcagttctacccaatggtctttgtgttcatggtttggcaaactcaatatttgtaaaccgtcagttccatatatgttaattttgtcttttctctgctgaagtgcattttcaggataattgagatgttgaacattttggaattgatggaaacagatgccattcctgataataagggattgtcagtttactgcaccaacagtaccaggacagaacgatattccccatatgtacttcaaaatttaacttctcttccgttggggtaccaagttttccaaggacatggttcagatgtgctaaatatatcagctccagtggctcagaactttgtgcaaccaggttgctctgttcccatttatatcgataatagtgacacactacttattcctgatagacgtcgaagtcaatttggttgttccagcagtgaatctggtgatgccatacatcattatatgaaggtccaacttgatggaacatcttttgcttctcctcctcattcaatggatcgaattggcctttcctattttgaggttgatttttccaaaacatcaaactccagtgataatgttgagaaagcaagtaaatctggttatggaagcagctttgttgttcctgttgtgtacgaggtttcattgcagcagcagagcaagttgatacgagtatactctactgtatgtatgacgtcattataatgtatatttgttgaggttttgttcttataaatgttgattctgcgtttgacctttcccttttttcaggttataattttgaactccacatccatgccattggaacttcgctttgatattccgtttggcatctccccaaag

SEQ ID NO: 144836 - DNA, 546 bp, Arabidopsis thaliana landsberg; identical to SEQ ID NO: 50935

SEQ ID NO: 144837 - DNA, 973 bp, Arabidopsis thaliana landsberg
gattatcaagccatggtggcacaattggaacatcaatttcgacttggaagactttctatccaaggattatggttttactgtcaggtctgtctttcttcaaataatccaagctacaagttacgtaaacattatgctgatcgattgtttttcgtatctctcagcccatgatgggatccatgcgcgcattggctgcagtaattcagcaggcttcaacgaagcagtttgtgggttctggtgttcttaatctcttgcaaagtcaggtagattcctgctttggtcattaaaagtttttggatttttttggtactagaattagcttttttattaaatgtcctaatcttgaagactatcatgcctaggctaaagcgatggctggtgataattcagtgaggtcattgttagagaaaatgacggagtgtgcaagcaacgcatacctaagcatattggaaaggttgattaccatgcctctttctttcttgctcgtaactagactcccatcaaaaaaacattgtgctacaatctctgccctttcccttttgttattgcttggaatgctcagataaatctaagtccaacctgtgactatgtttttcctttgtttggatggagtgattagcgaacatgtttgttatcttttggtttggcagatctgtacatggttaccctatttgctagatcgcttatattattattctttgatgtgtcaactaactttaaatagtgtttaattaaggtgggtctatgaagggatcattgatgatccgtatggggaatttttcattgccgagaacaggtctctcaaaaaggtacttcgattgctcagctcgtctgcactattgttaattgcttgatctaacaatgtcaatttttttttgtacaggagagcctcagtcaggactctacagctaaatattggagccaaagatacagccttaaggatactattcctggcttcctagcaaacattgctgcc

SEQ ID NO: 144838 - DNA, 4646 bp, Arabidopsis thaliana landsberg
atggctaatcaagaactgatgatggctaatacgatgaatcaacttcaacaacattcaaaccaggtttccatgtatctgtggaaccatggaaacggtgctttctcacaaatcccagtctcagcattggcttcaaaccaaacgcaatctctagctccgattccgcctgaactgatgatttacccgaattcggatgcgggaaattactcggggtctctcggggtacaaggaactgggatcaatgggcttcagaacatgaacatgttaacctataacaacatcaacagcgttaatgatttctcaaaacagtttgaccagaattccagagcggaaagttactctagcttacttggggtacacgaagacggaaacaatgagtttgagaaccctaacatgtccagccgcaacaacttcaatgttcaagactatgcagggttacttgggatgcaaggagctggaactaacgggttgcagagcatgaacatgcatgactacagtaacaacaacagcattaactctaatggtctttcgcatcagtatgttcaatttccaacacaacagccaacatcaggaccgggttttcaatttggatcaaacggaaacaatactaggtctctctaagatctatcacaatctctcttatagctttataatttttggtttttaatatctcctagttatataactaagaagcatatatatttataacttttggttagtgcaattatcagtttgagacagtatatcgatctccaagttttcgattatgtctacttttatttattagtgtaatgtgactaaaagactagtaatgtctcccatgctagtgactcttttcttatactacttcttttttttgttatcctgagattcttttgtttgttatatttaatgctgagaattaagactagtaatgtctcccatgttagtgacacttttcctatacttcctcttttgttattctgagattttttttggtttgttatacttattgccgagaatttgattatacgattaatgtttgatgaataaaaaaaccctaggcaagcttttaagttttaagacgggtaaagtaaaacacaatcagaaattacttaagctaaaaaaatactttagcagctctctccaatcatatgtcctcgcattaaaaagggaaaaaggtcaaagaaatgaaaaatagaaaaaagtacaaaagatccaactggacaataaagtgttgtgttcggcttatttaagaaataatcaacgggtgagattaaaaggattttagtcaacggttggatttaaactgaagagtacttaccttcaagtgggacctattaaccacacagaagcaaaacctaagcgaaagaacgggttttttctttcctcttctttttggggtgcgagtcttttaatttacttctccgaaaaaaaaaccatagaacctagaacttggaaaatttgaagaaccagagctaaacaaactcgttgtcgttctactttctttcaaaaccctagaagaagaagcagcttggttttagggtttggtgatgaagagctctattcgaattcaagtgagttctgtctatcttcttgtctacttctcaattttagggttatataattttatctattaaactctaattaggttcaatttagtttgactttttttcttcccttttgctcaatttaggttctatttgggtttatgtgagacattgtgtggttttatttccagggagaattggtaccagttttagtttcgggttaattcttctcattgtttatctctacttccatgattggtcttcttcacttatgatccaaagatcaatcttttcaattgctcttggattctgagtttaatggataacaagatttgctatgaatggtttcacactactgttggaagatctatagaatgagcaatattgctcgttgagcagagaatatataaaatatataacaaagaaacttgatagattaaaatcaaatccaatttgttgttatttttcagttaggaggtttaagtctagttattattacagtttcttttttacttgtttgctaactttactctatttcataaacttgttatctgcagattttcttttgatgtttggtgcttactagttggggatggaaatgagtggtctgggaagaaaacgtgtttcaaagtgggactctaaggaagacacacaccatcatcattctagcgtaaatgcaaactcggcttcttattaccgcgacaaagagtctgagcctgtccggttcaatgcagagagtaatggtgaagctagggctagaagcagagtttcacagaataacgataacagttatttttctgaacaagatgatactaggcaacagtttgtccgtaggttagtgtttacgagttattacagagattcttatttatatgttcttcagttgttgttacttaacgtctctctctttttattttctttctaggagtggaagtagaagtaatagcaggagtagaagccgtagtagaagcccagtctatagagctagacgagacgcgggatcttatgacagacacaagacgagaacacaagtttctcctacgccaatcagagaattcaataagagaggcagtgatcatttgtttgatcaaagcagaagtgatcattatggttgggaagataacattagaaagccgagggagaccaaatatcacaccgatgatttcagagaagaggcaatgatggaaggtgcaaggtcttctgactataataatactgattatcccgaggataattcgagaataagaaggcgaagaagcgagtttacgggagagaaggaaacacaaagaagggatggtggtgatggtgaaggaggattccacaggagttcgaatattccgtgtaagtttttcgctgcggggacggggttctgtcgtaatggcaagtattgcaggttttctcatcatgttgctgatagaaaacagcctcaagacaacaacaacaacttttatagacaggacaataacaatcatactagtggtcataataaatggaatgatgttgaaagattggacaatggaagagtaggttgaatcgaagtttctcgtgccagtaagaagggagtttctgaatctaaagggaatggtagtagtagctggattgatgacatggagatgtctcctgattggaattatggagtccaagctttaaagaagcctgtgaaggaagaccatagtgttggtattattggtcagagttcacaatctcgagttcttaaagatgatcagaggagtagtggtatgttttcacatggtggcagaactatggctgagaaacctgtagctgcttcacatcagagttacagtaattcagtgaatgttgcgccagttgaaacattcaatcagaatcataatgcattaccgtaccaaagctcactaactgctggaggaagtcaacaagtgctagctgctgctgctacaaatttctcagtaggctccaacttgagcaatcttgagagtggaaaagtttatcaagataatcatcactcaactgtggagaaacctgttttggtccaaaatacagtaagtagggaacaaatcgatcagattactaacatctcagcatctctagcgcagtttcttgcaaatggtcagcccattccacagcttgaacaggcattgcagctgcctctgcattcagaatctgttcaaccaaatcaggctactactcaaagtaatgtagtgagtagtaatccaaatcagctatggggattagggatgagcactggcgctgaaggagtccccgcggttactgcatcaaagataagcaatgtcgaagagattcaagaagtatcgctagatcccaaggaaaacggggacaaaaagactgatgaagctagcaaggaagaagagggtaagaaaactggagaagacactaatgatgctgagaatgtcgtggatgaagatgaagatggtgatgatgatgggagcgacgaagagaacaagaaagagaaagacccgaaaggaatgcgggcgtttaagtttgctttagttgaggttgtaaaagagcttttaaaaccagcttggaaagaaggtaagctgaacaaaaatggttacaaaaacatagtgaagaaggtagttaagaaagtgactggtacaatgcaaagtggaaacgttcctcaaacacaggagaagattgaccattatctatccgcttcgaaaccaaagcttaccaagctcgttcaggttccttcatatacattactcttttgctttgttgaacttaaatcaactgcaaaacatacacatgttgttaactcttgttttgtctctccaggcatatgtcggcaaaatcaagaagacctaatatgaattgtactcccatgttgtcttaatacaattccttatctttccatcatcataaatcttgagagctgcagtgaaaaatggttgttaatctttggaggaagattagaagagcaggtgatgctttgttgtccccattagagagattttgtcccaattcttttttcttctttttcgacataatgtgatatggtccaagtctgataatagaccaagattgcgtttatgtcctttgttttttttatatagaaacttagaaccaatttcagtgatctctttgtgactattatatatgttgaatttgtcttatagccct

SEQ ID NO: 144839 - DNA, 795 bp, Arabidopsis thaliana landsberg
tcgttgtaacagcagagatttttatagttaggtttctttgaccggagaatctcgattaggttacgatggtgtttctctcgattccaaacgggaagactttatcgatcgacgtgaaaccctaattcaaccaccatctccgccttcgaacaattggcccaccaacgtagtgatgttccacaatctttccttcgttactctctccgtatgcgaaaccctagccgcgtgtttgtagattcaaaggattccgattcgatcttattgtccgatctcggtgtttctcgtttctctactgtgattatccatgtcccgcttttgggtggtatgcaagcggctccgccgaagcctcgtcttgatttcctcaattctaagcctccgtcaaattatgtagcgggtttgggtcgtggtgctactgggtttactactcgatctgatattggtcctgctcgtgctgctccggatcttcctgatcggtctgctttggctacagcggctgctccaggagtaggtcgtggagcagggaagccaagtgaagcggaagcggaggacgatgaagaagctgaggagaaaaggtacgatgagaatcagacgtttgatgagtttgaagggaatgatgctggtttgttcgctaatgctgagtccgatgaggatgataaagaagctgtcgccatgtggaagtctattgagcataggagggatacaaggaggacagatcggacagaagcgaagctgctggacgacatcgagaaacaccgagcctcgcaccctatgagtactgagcagcatgcagactcgtag

SEQ ID NO: 144840 - DNA, 4034 bp, Arabidopsis thaliana landsberg
cttccttaaattcttccattttccttctctgcaccgggctctctctcattccccaaacttctccttcaccaaatcccttatcctcaatccaaaccacctctccttcaaatccaccttaaattctctttcaccgtctcagtctcagctctacgaggaagaagacgacgacgacgaagaagaagaagacgaagatgatgatgacgaagctgctgacgaatacgacaatatctccgatgagattcggaatagcgacgacgacgacgacgatgaagaaaccgaattctccgtggatttgccgacggaatcagctcgggaacgagtggagttccggtggcagagagtggagaagcttcgtagtcttgttagagattttggtgttgagatgattgatatcgatgaacttatttcaatatacgattttcgaatcgacaagtttcagagattggctattgaagcttttcttagaggttcttctgttgtggtttctgctccgactagtagtggcaagactttgattgctgaagctgctgctgtttccacggtggctaaaggtcgccggttgttctacactacacctcttaaagcactctctaatcagaagtttcgtgagtttagggagacatttggggatgataatgttggtctactcacaggtgactctgctattaacaaagatgctcagattgtgattatgactacagagattctccgtaacatgttgtatcaaaggtattttgcaactgcagctctctctgtgtgtattttatatggtttgctcaggagcttctttttaacctcaatttttgtgttgaaatcttttttagtgttggaatggcttcttcaggaactggactttttcatgttgatgccattgttttggatgaggttcactatttaagtgatatatctaggggaactgtgtgggaagagatagtgagtgtgtttttccactgtttctcttctttcctccaaaggctttatctgttgagttttctaagtttctgtgtttcaaatacgatcaggtcatttattgcccaaaggaggttcaacttatatgcttatcagctacagttgcaaatccggatgaattagctggttggattggtgaggtgagtttgttgacattttccctttaggaatagctttccattatcatgttcctatcataaggagttataacaatgtacgtagtgccttgttcatcgtctcatttatcttctatcgttaagcaacataaatattgtttagctgatgaagtatctcaattttctcagattcatggtaaaactgagttggtaacatcgacaagacgcccagttccattaacttggtacttttcaacaaaacattctttattacctctgcttgatgagaaagggataaacgtgaataggtaactggttcaactctgtgcttttatcaccaacatttattgtaaaatctttctctttgataataattggaggatgctttttaattggagcaggaagcttactctcaattatttgcaactgtctgcctcagaagctagattccgtgatgatgatgacgggtataggaaaaggaggtcaaagaaacgaggaggtgataccagctacaacaaccttattgctgattatcctctttcaaagaatgagataaacaagattcgtcgatcacaggtcttacaatatgctttctaacaaccctaacaaactaggcatttgtcgtttcttatatattttgaatatgatttttaacttctcatgataatttaatgactgctgagttttgacttctaggtacctcaaattagcgacacattatggcatctccaggggaaaaatatgttaccagcgatatggttcatttttaaccgtagaggatgtgatgcagctgtacagtatgttgaaaattttcagcttttagatgattgcgagaagagtgaggttgagttggccttgaagaagtttcgcgttctttatccagatgcagtgagagagagtgcagagaaaggactgcttaggggaattgctgctcatcatgcaggttgtctacctctttggaaatctttcattgaggaactttttcagcgaggacttgttaaggttgtctttgctactgagacacttgctgctggaataaacatgccggctagaacggctgtaatctcgtctctttcaaaaaaggctggtaatgaacgaatagagttgggtcctaacgaattgtaccagatggctgggcgtgctggacgcagaggcatcgatgaaaagggctacactgtgctggttcagactgcttttgaaggcgctgaagagtgctgcaaacttgtctttgctggagttaaacctctcgtctcacaatttactgcttcatatggcatggtgctgaatctggtagctggttcaaaagttactcgtaaatcaagtggaactgaggccgggaaagtcttacaagcagggagaagtctggaagaagccaagaaattagttgagaagagttttggaaactatgtgagcagcaatgtgacggttgctgcaaagcaggaacttgctgaaatcgacaataagatcgagattctgtcatctgaaataagtgatgaagcaatagataagaagagtaggaaacttctttcagcgagggattacaaggagatcactgtacttaaagaagagctacgggaagagaaacgcaagcgtgctgaacaacgaagaagaatggaactcgaaaggttctcagctctaaaaccgctcttaaaagggatggaagaggggaacttaccatttatttgtttggagttcaaggattctgaagggagggagcagtcagtccctgctgtttacttggggcatattgattcatttcagggttccaaacttcagaagatgatgtctttggatgagtcttttgcgttaaacttaatcgaggatgagctggcggctgatgaacctggaaagcctaatgttaaaccgtcttactatgtggcccttggctctgataactcatggtatctctttactgagaagtgggttaggactgtctacagaactggtttccctaacattgctctagcgcttggagatgctttgcctcgagaaatcatgaagaatctcctggataaagcagatatgcagtgggataaactagctgaatctgaacttggaagtttgtggagattggaaggatctctagagacatggtcctggagtttaaacgtacctgtcctaagcagcctttctgacgaagatgaggtgttacatatgtccgaagagtatgataacgcggcgcaaaaatacaaggaacaaaggagcaaaatttcgcgattgaagaagaagatgtcccggtcagaagggttcagagaatataagaaaattctagagaatgctaacttgacggttgagaagatgaaacggctcaaggcgagatcgagacgccttataaaccgtttagagcagattgaaccgtctggttggaaagatttcatgcgcataagcaacgtgattcacgaaagcagagcattggacattaacacacacttgatatttcctctgggagaaacagctgctgcaatccgaggagaaaacgagctttggcttgcaatggtgttgcggaacaaagccctggtggatctcaagcctcctcaactagctggtgtatgtgcaagtttagtttcagaaggcataaaagttcgaccttggagagacaacaactatatttacgagccatctgatacagtagtagacatggtcaatttcttagaagaccaaagaagctctcttataaagcttcaagagaagcacgaggttatgattccatgttgtctggacgttcagttctctggtatggttgaagcttgggcttctggattaagttggaaagaaatgatgatggaatgtgcaatggacgaaggcgatcttgctcgcctgttacgacgcacaattgatctcttagctcagattcctaagttgcctgatattgacccagtcctgcaacgtagtgcagcagctgcagcagatatcatggatcgtccaccaattagtgagcttgccggttaa

SEQ ID NO: 144841 - DNA, 1965 bp, Arabidopsis thaliana landsberg
gggaaggcttgtacagagagtaactctgagtcgtagttggaacttacctcggatgagtcagattgctcaagcgtgtagcttgtctttagcccgttcgcacttcttgttacctggtttattggctcttacctatagacaagtggcgtatgcgcaaagggtggttccaaatcctgtggtctattctccttcacacatttctccttataggagttcgataaacttccctatcgttctctcgtctttagtgttttctgcggtcaagggtgttgttctgatcgggagagctctttatttagcaattttgttttctccaaatgttattatggcgttgttgggatttgcttgcgggcctcgttacagacagctgcagtatgaggtcctccatcgaactctggagaaagcaggtcctgcttttatcaaatttggtcaatggattgctacgcgacctgatcggtttaataaggatttgtgtttgcagctttcaaagcttcacagtaatgctcctgagcacagttttgcgttcaccaaaaagagcattgaaaatgcatttggtcgtaaactctctgagatatttgaggaatttgatgaggcgccagtggcatctgggagtatagctcaagtacaccgagcttccttgaagtttcagtatgcaggacaaaaggtgaagtcctcggaagttgctgtgaaagttagacatccttgtgttgaggaaacgatgaagcgagattttgtgataattaatttcgtggcgaggctaaccacttttattccggggttaaattggcttagattggacgagtgtgtgcaacagtttagtgtctacatgttgtcccaagttgatctctcaagggaagcttctcatttgagtcggtttatatataacttccgtggatggaaagatgtctcttttcctaagcccatctatcctctaatacatcccgctgttttagtcgagacgtatgagcacggagagagtgtggctcgttatgttgatggctccgaaggacaagaaaaacttaaggctaaagtagctcatatcggaactaatgctctcttgaaaatgctcctggttctgtctctttcttcacagtgtatctttttattcatttcggttacttatgtaacttatagttgctttgattcttgtttttcaggtcgacaacttcattcatgctgatatgcatcctgggaatattcttgtccggccaaacaatactagaagaggtctattcagatcgaggaagccacacatcgttttcctagatgtgggcatgactgcagaactttcaaaaactgaccgagataacctactcggatttttcaaggcagttgcacgtagagacggccggactgctgctgaacgaacacttaaattatctaaacaacagaattgtcctgatccacaagcctttatcaaggtaagatctctgctctgtgtttctcttagatcattcagagtttcttcatttttgtagtgtttatacatacatacacatttcgacaggaagtagaagaagcatttacattctggggaacagaggaaggggatctagtccatccagcggattgtatgcacgaactattcgagaaaatgaggagtcatagagttaatatcgacggcaatgtgtccaccgtcatgtttacaacattagttctcgaggtgagtttaaatctcttatcatcccatagaaccacgaagaacactcgccttttggattattattgacctatgaactttagctagagttgattacatcagtattttagagccagtctcttgatggtttaaagtttgcttcaaatctaacaacactgaggtttgtgcttaactttccacgttttcagggttggcaacggaaactggatccaggatacgatgtgatgcgtactctacaaacaatgctgctgaaaacggattggatgaaatcactttcttacacgatcgatggacttatggctccgtag

SEQ ID NO: 144842 - DNA, 2671 bp, Arabidopsis thaliana landsberg
atgagtttggcaacttgtatcatcctttctgctgatgccactgatgagccaccgaatttcattacacaggtcaattttttctcagttttgtttaacttgaaagtctctgaggcttttctctctagcagctccactcttcccgcttcacaagtaactctcagagcgatgttcttacaagaacgatctacgtttctagagaatacacgagcagaggacacgagtgctgagaagttgagcccctttgagctaaactcaatcctttttgagtttaaggcaagttctggtgttttaactccgtagaactgcattgaagccgccattactcaataagctctgaagaagaagattgtgatagaactcagagagactggctggctcttgtgatttcgacaaataatagagtatgcttgcttagtgcgcacacctgaaacgaagatccgtagaagcaaaacagagtcaaggctaaatgcatgaataaataaaaaaaatggatcttgcagagaggagattgagaattggcttatataccagttgacagggctcacgattgcttgatacaaagccggacaagctccgagctatgtatcaagacgagtatcgtagacggtcaagatcccaagctaaaaagattagacggctgcggagtgaactcggtctcggatgttaaatgtttataggcaaaggaaagaatcgaacgatcattcgacttcagtgttcttttccaaaatatgaatctgcttaataataattcaaactcctggtttagcacatatatactagtcgttttaactaaagttttgtttttttttttggttggaaaacgtgacatctacaaattccattagtgaacccttaggaggttgagggggtgttagcaaatggtaaatcgaaaaaacgtggccacctactcatagatatacatattttgtttgattaaattagcaataatatacaaactgcataatacgtggcatcaggtgtatcgtcaataatttccacatttagtgtttccttatgcaattacattcactagaggaataaacaatcgatatcagaaatactcaaatagataatggacgtccaatgtcaatgatgagatctaacaaactttgacggtaaagtcgagagacgaaaaaaaggaaagtagcaaaattttattttatatagtgattattgcatgaattaaatattgaaggtaataatgattcatggcgatatgtatatagttagtatttaaacagcgcgggaacaacaagaggcagttggtttgtatgaattgagagacaagggctttaatgggtcattagaaaaacgcccatgggccttaatgtcatatgtgggcattatggagaatagtcaagagaattccgaataaggccgaagaagaaagaaagatctctcactcactcagctctttggatccgccatagcaactctctcctcatttctcccggccatggagtctccaaagagctatgtaaatccgttctagcttttattctctcgctaattgccaaacagagatgtactatttctttcctctctaactcctcctgaaatggtgatatttgtttctccgtctacaacaagtttcatttgtttgaagacaaatggagtcactcatgggccaaactaaaagctcattaaaggccgaaatcaattattcttgagcctctactctcttgcctaagtgtatgtatgtggtttagctatataagatagcaactgcttgctgtttgagaaagcttgaaacatcacacattcgcctcgttgaaaatgaaaacagcacgacaaggggggagagagagagaccgttaagtcatgagatcttcgtttcggctggaaaaaggaaaagaaaaagaaagcacaaaaatctttggtttaaattctttctccatggacgaaccaccacaactactactagcttctctttgcctatggcggccaccggatttcacacgctctctgccgtcggattattcaacggagagaagcacaagcacccccttggagtaaccctacccccggcacgccgattctccgcttctgtcaccgtttttagctcgaggcttgtggactacgagcagccattcgttaagagcttctggaactacctcgaggcggctaaggatttcatcagaccggaagacaacggcccatctcgctggttctctcccctcgaaagaagcaaggatccatgtcacggtgccccgctccttctcttcctacctggttagtcccgattaattgagttagttagaaatgtgcaattgctttctctaattcggaaatgactgtcgttaggtatcgacggaaatggactcgggctaataaggcagcaccagaaacttggacagtgagtgatcaaaggacgtttctatcctttagtttttcttatagcggtggttgttgattcggctgagcgatgtttgtttttacaaggatgtttgatatctggtgcttgcacataccagcgagcaatcgctcttctttcacaggtatttcctctatttcaactcttttagatctttttatctgattctctaacactttggatgcttttagatctagtcgccatggttgaaagcactgtcaaatctgaaaatcaacgatcacctgagaaacccatatatcttgttggagaatctctcggcgcctgcattgcactcgc

SEQ ID NO: 144843 - DNA, 2344 bp, Arabidopsis thaliana landsberg
gttaagtgatttcatcaaagctctggtggatcattgcttctccaccaccaataccaatggcttccctttacctcaattccttacttccacttcctccttctcacccccagaaacttttagaaccttcttcttcctctttgttgagcacttctaatggtaacgaacttgctctgaagccgattgtcatcaatggagatccacccactttcgtctctgctcctgctcgtcgtatcgttgcaggttcgccaccattaatctgaaaagtttcaatctttttgataatttgacaacaaaattgagtaggttttggttttggatatgcactcacagttggagaccttcatggcgatctgggtaaagccagagacgcacttcagttggctggcgtcttgagctccgacggacgagaccagtgggtcggccaagacaccgtatgtacattatctcttagtggttcagtatcgtgttaaatggtttgcttgatgatattattgacagtatctgctagagttcaacattacgcatcttgaggttcattatgatgactgattcttttgagttaaatgcttatgagttgtgaaatcataatgaaaatacaggtactagttcaggtaggagatatacttgatcgcggtgatgatgaaatcgcaatactctccttattgaggtcacttgatgatcaggccaaggctaatggtggagctgttttccaggtttttgattgctatcatacttgaatttcataagtaaattttacacagagaagcttttgcactctacacattttaatttgctagttctagaatgatgataattgataggactaacaaagagtaacttcttgtcacattttaaaggttaatgggaaccacgagacaatgaatgttgaaggggatttcagatatgtagatgcgagagcatttgatgagtgtactgattttcttgactacttggaggactatgcacaagactgggacaaagcgtttaggaattggatttttgagtcaagacaatggaaagaagataggaggagttctcaaacctattgggatcaatggaatgtagtaaaggtacttcattttgccgtgtcctctctgagttttcttagttttggtattcgttggttaaccaaaagtcggtgggaaaaccattaggacagaggcaaaagggagtaattgcaaggtcggtccttctcagaccaggtggtcgtttagcatgtgaattgtcgcgtcacggagttattctccgtgttaataactggctcttctgccacggtggtctccttcctcaccatggtaaggacagtcaaatctatctcaacatttcctctcggtgatcttttggatttgatatatcatatgcttataatgtccttgcacagttgcatacggcatagagaggataaacagagaagtctctacttggatgagaagccctactaactatgaagacagtcctcagatgccgttcattgcgactcgaggatatgacagtgtagtctggagccgactttactcaagagagacttctgagcttgaggactatcaaattgaacaggcaagtagaattttaatcaccaaaatctcaaaactgctaagacagatatcatcatcagcttggtttaatgtgtttcctgacttctttttcttatcaggtaaataaaattcttcacgacactcttgaagctgtaggtgccaaagcgatggtggtcgggcatactccccagttatcaggggttaactggtacatttatcaaactcaaccccaaaacttgtaatagagaaacttcacgacaatcttgaaacatgagtttttgttgttgatagtgaatatggttgcggcatatggagagttgatgtaggaatgtccagtggtgttcttgactctagaccagaggtatctagcaatattggttcttgactcgtcgcgtttcatgtctttcttacataagtccacacagagattctgaaactggaattgtttcttcaggttctggagataagaggggacaaagctagagtaataaggagcaaccgtgacagacttcatgaacttcaggttgcagattacatttaaaaaaaagaaccagactctcatgttcaagattcaaactttatcaccgtatttgtcatcatacacataataaagcatcagaaggtttcagtctttcagacaaggtccagatgcagttgagcgaggccatactttgaactctatgtacgtatctatgtatatatgtgtgtgaatcatcagatacaacatactatactcatcaagtaaaggttttgtatagcaaaaacactggttagtgttacttaaagagtggtgaaattctctggttttt

SEQ ID NO: 144844 - DNA, 3477 bp, Arabidopsis thaliana landsberg
  unsure (1)..(3477): unsure at all n locations
ccgccagaagaactgattggtgtaaaatccaattttcttgctgttgtgagttttcacttctccgaggtaaaaaaactaatcccggcggtgagaatctcttgggaacttgctctgaacgaaactttttgttgcaataattgtaaccaaaaaataaagaagacaaaatctttttgtccttattgtagattccatcgccggagcctgtccgaaaataaaatttaactaaacttggcaaaattcattcaaaacgagtccaaatcaaatcaacccctatttcaacgcctctttttctccctgatttatatatcggagagatttcaaggcaaagctttctcatttcctcgtaattgccggcgaattctactaaaggtgagacctttttcattttcccagaaagtgaagcaatctttttggggttttattctctttagctttcttaactgatcaaactaaaaaagcaattctgttttttctttcttccctcctataggttagttactctgcatttttgattactgtttgatgatttttatgtttagggtttttaattgagcaaattcttctgggtttatcagattttatatttttgtgaattggttaagatttagatctggatttagatttttctttgtttcatggttgactgaaagtttgaaacttcaaatggagaatcactgaatctgactgatttgaattttggtggtgtttctagagtttgttgagcaatgaagggagcgactctcgttgctctcgccgccacaatcggcaatttcttacaaggatgggacaatgccaccattgctggtttgtttcttttttcactcttgttggtgcaattgtgttttgttttgatcaattatcatctgagatttgaaaaatgttacaatgatggtgaattggatttgattgcaggaactatggtttatatcaacaaagacttgaatctaccaacctctgttcaaggtcnnnnnnnnnnnnnnnnnnnnntcggtgcaacggtcatcacgacttgctcaggaccgatatctgattggctcggcagacgccccatgctcattttatcatcagttatgtatttcgtctgcggtttgataatgttgtggtctcccaatgtctatgttctgtgctttgctaggcttcttaatgggtttggtgccgggctcgcggttacacttgtccctgtttacatttctgaaaccgctcctccggagatcagaggacagttaaatactctccctcagtttcttggctctggtggaatgtttttgtcatactgtatggttttcactatgtccctgagtgactcccctagctggagagccatgctcggtgtcctctcgatcccttctcttctttatttgtttctcacggtgttttatttgcccgagtctcctcgttggctggttagtaaaggaagaatggacgaggctaagcgagttcttcaacagttatgtggcagagaagatgttaccggtaaggtttcttctcgctatctttggtggtgttatcacctgaatccacttttgaccgttctttttatattaaatgcagatgagatggctttactagttgaaggactatatataggaggagaaaaaacaatggatgatctcttagtatctttggaggatcatgaaggtgatgatacacttgaaaccgttgatgaggatggacaaatgcggctttatggaacccacgagaatcaatcgtaccttgctagacctgtcccagaacaaaatagctcacttgggctacgctctcgccacggaagcttagcaaaccaaagcatgatccttaaagatccgctcgtcaatctttttggcagtctccacgagaagatgccagaagcaggcggaaacactcggagtgggattttccctcatttcggaagcatgttcagtactactgccgatgcgcctcacggtaaaccggctcattgggaaaaggacatagagagccattacaacaaagacaatgatgactatgcgactgatgatggtgcgggtgatgatgatgactcggacaacgatttgcgtagccccttaatgtcgcgccagaccacaagcatggacaaggatatgatcccacatcctacaagtggaagcactttaagcatgagacgacacagtacgcttatgcaaggcaacggcgaaagtagcatgggaattggtggtggttggcatatgggatatagatacgaaaacgatgaatacaagaggtattatcttaaagaagatggagctgaatctcgccgtggctcgatcatctctattcccggaggtccggatggtggaggcagctacattcacgcttctgcccttgtaagcagatctgttcttggtcctaaatcagttcatggatccgccatggttcccccggagaaaattgctgcctctggaccactctggtctgctcttcttgaacctggtgttaagcgtgccttggttgttggtgtcggcattcaaatactgcagcaggtaagataaaacttttgattgttcagacacgagtactcttggatctatcatttgatcacttctctgattatctcgagttttattttgtatgcagttttcaggtatcaatggagttctctactacactcctcagattctcgaacgggctggcgtagatattcttctttcgagcctcggactaagttccatctctgcgtcattcctcatcagcggtttaacaacattactcatgctcccagccattgtcgttgccatgagactcatggatgtatccggaagaaggtaaatatcaaaacctataagatattttaacatgtttccttgttttctcatgatactaaagttatctctgtttcattttgcaggtcattacttctctggacaatcccagttctcattgtctcacttgtcgtccttgtcatcagcgagctcatccacatcagcaaagtcgtgaacgcagcactctccacaggttgtgtcgtgctctacttctgcttcttcgtgatgggttacggtcccattccaaacatcctctgttctgaaatcttcccaacaagagtccgtggtctctgcatcgccatatgtgctatggtcttttggattggagacattattgtcacgtactcacttcccgttctcctcagctcgatcggactagttggtgttttcagcatttacgctgcggtttgcgttatctcatggatcttcgtttacatgaaagtcccggagactaaaggcatgcctttggaagttatcacagactactttgcctttggagctcaagctcaagcttctgctccttctaaggatatataacttgtaactttcttcttcgtcaattgctctgtgtacctaaagattctcttcatcccctttttgttttgtttttcagataccttcatatcgtttttgtttctttttttttttttttttttcctttgtttcgttgtcaaaatcaatctaataagtactcaattttctctctttccttgaccaacac

SEQ ID NO: 144845 - DNA, 230 bp, Arabidopsis thaliana landsberg
  unsure (1)..(230): unsure at all n locations
gtatttgaacgccgggatattcgctaccggcaacgaagatgacgacaggtcaaacacgcttccccggccggctactagagcagcgatgctcatccgtgtaaacaccctcctccaaggctactctggtatacgctttgagatcctcgaagccatcacaacactcctcaactgcaaaattacaccgctccttcctctccgaggcaccattaccgncttcgggatctcgttcc

SEQ ID NO: 144846 - DNA, 402 bp, Arabidopsis thaliana landsberg
ttgttaaggataaggaaggaaaaactcagatcctgggttcacctacagaaagggcgatactggaatttggtttgcttttgggtggtgacgttgacacgcaacgccgagaacataagatactcaagatcgagccattcaactcagacaagaagaaaatgtctgttcttacatctcattcaggtggtaaagtacgtgctttctgcaaaggtgcatctgaaatagtcttgaaaatgtgtgagaaggttgtggattcaaacggagaatctgttcctttatctgaagaaaagattgcaagtatctctgatgtcatagagggatttgcttcagaggctcttaggactctttgcttagtttacacggatcttgatgaagctcccagaggggatcttcctaatggtggct

SEQ ID NO: 144847 - DNA, 299 bp, Arabidopsis thaliana landsberg
agattagagaagtaagggttttatagatcgggaataaatgcaggaaggtggatatgcgtttgaggttaacaatggaagaccaacggcgagtgagtttggtacgacggcgaggatttcgtcaccgtcattgactatgtcatcgtctttccgtgaaggaggaggaggaggtggaagtaagggtttaacacgacggaggtcaatgaagccgagttttgacgccgataatgagttcattactttactccatggctcagatccggttaaagttgagcttaataggcttgagaacgatgtcagag

SEQ ID NO: 144848 - DNA, 280 bp, Arabidopsis thaliana landsberg
agttaacttgcagatttcttagtatttctaatctttttcttatattaaccttttgtctccttctctctctctctctctctgaactatacaaaaacctacttttaatttctcttccaagaagtcaagaacccagaagaagacatgacaagtgaagttcttcaaacaatctcaagtggatcaggttttgctcagccacagagctcatcaaccctggatcatgatgaatctctcatcaatcctcctcttgttaagaaaaagagaaatctccctggaaatcctg

SEQ ID NO: 144849 - DNA, 250 bp, Arabidopsis thaliana landsberg
ttctgtttttgtatccgtgtaagttaatcacacggtagtttttgatgaaaagacaacaatcggagaacaatctggtctgctgctaaaatttaataaattgttttgtctaattgtctccactcataaaaaagcgcgaattcaattcaccgactaaagacattctccggtggagccccgatgcaatccctcatataagcggcggaagtagcggtggtggtggtggaggaggaggagaggtgagtcgaagtgg

SEQ ID NO: 144850 - DNA, 314 bp, Arabidopsis thaliana landsberg
cgccaagttagggaatccgaataccgcgtttgatgaattcgtcgtattctcggtttcttctgattcttcttcagagaagcgtttcgggcgtttgattcttcgcagagactcgatttccagagaggcgatgtctacgaacggtgataatttctccatcattgattgacactcgagcatcgttttgatcgatgattacggagagatttaggtaaatttcaaaaccctaattgtttcatagttagagtggatttttgtggaatttatgagcttctcgtttatttatagagacgagacgatagagaggagctataaag

SEQ ID NO: 144851 - DNA, 2052 bp, Arabidopsis thaliana landsberg
  unsure (1)..(2052): unsure at all n locations
agaaaaggcagaagcatgctggaaatttgatggaagaaattgcgtccgtagaagcagatatcgaggaaattgtcaagagacgttgtgccatagggcctccgtccctggaagaagcttctagctcatctcctgcttctagtgtacctgaaatgagactgatcaggaacattaatcagcttgaaagcgcttatttcgctgcaaggatagacgcacatctccctgaagcacgttataggttacgcccagatagagatctgctaagaaatagtgataatactgtagcagaagtagaaaacagtgagacttggagctcagatgatcgtgttggagcgttctttgatgggttatgcaaatatgctcgatatagtaagtttgaaactcggggtgtgctgaggaccagtgagttgaacaacacttcaaatgtgatttgttctctgggtttcgatcgggacgaggattattttgccacagctggtgtgtcaaaaaaaattaagatatatgagttcaattccgttttcaacgaatctgttgacattcattatccagccatagaaatgccaaatagatcaaagcttagcggcgtttgctggaacaactacattaggaactacctagcttcctctgattatgatggtattgtcaaggtatttgaacctttgaagttttacgtagattgtttatcacttgattacccctttatttccttcggtctaatgaatacaaacgtatttatgatgaatccagttatgggatgtgacaacaggacaggccatttcacatttcatagagcatgagaagagggcttggtctgttgacttctctgaagcttgtccgacaaaattagccagtggaagcgatgattgttctgtgaagctatggaacatcaatgaggcatgctcttctatactggattttgtcgttttaatagctactcctactgagatatctggcatatatacatatgaatatatcaatagcgctttggattattctgtcaatgttgtcatgctcgtattttcagccttgtagctaatagacaatcttcttgtttgactgtgcagaggaactgcttaggaacaatcaggaacattgcaaacgtttgttgtgtgcaattttctccacagtcctctcacttgctagcctttggatcatcagacttcagaacctactgctatgatctaaggaatttaagaactccttggtgcatactgtcaggacacaacaaagcagttagctatgcgaagttcttggataatgaaactcttgtaacagcatcaactgataacacgttaaagctttgggatcttaagaaaaccactcacggtggcctctcaacaaatgcttgcagcttaacttttggcggccatacaaatgagaaggtagctaatgctgaaacgtaattttgagttaatctatataatgatgtttctctttttccttcgtggttgatttgtcttttcctgcctttttcagaactttgttggtttgtctacttctgatggatatatagcttgtggctctgagacaaatgaggtatgcccctacaaacctgggaactctttgatattcctataactttgtgtatggaatctccttttctataatcctttaacaagcattgccacagattgatagtttgattctcaacttaactagaagctccagagtttatttcatgtgatggaaaaaatcacagttccatgtgaattccgtctatttatacgcgatggaggaacttatccattgatactaacaattagtaaaataactggcgtagggtcaaaaaagaactaatctggtagtattgttgtttaagtgatctctctgattgagaaatatgctgtttcttggtttgttcaggtttatgcctatcaccggtctcttcccatgccaattacctcgtacaagtttggttctattgatccaatatcaggtaaggagatagaggaggacaacaacctgttcgtttcaannnnnnnnnnnnnnnnnnnnnnnaatatggttgtttcagctagctcaaatgggtcaatcaaagttctacagttggtctga

SEQ ID NO: 144852 - DNA, 262 bp, Arabidopsis thaliana landsberg
ttctttctctgctctcaaagctcaagagaactctatccttattaacttacaaggataactaaaaccggtgtaatcacgatcatagtagaagatgggcggtcccggatcatcaccatgtgcttcgtgtaagcttcttcgacgacgatgtgcaaaagattgcatcttcgcaccttattttcctcctgacgatcctcacaaattcgccattgttcataaggtctttggtgccagcaacgtcagcaaaatgttgcaggttccatct

SEQ ID NO: 144853 - DNA, 656 bp, Arabidopsis thaliana landsberg
ggaacaatttcatctcagatagacccgccactggaactcctgctccttgggctcctcgtttatcggttcaagctaggtatagtatcctcactgtgatgaattttgcctttcatttctaagtcattccatttggtgtattgatttatctgttcatggttgttagagtttctcctggaaacaatggtgacaaaggagttgattcagatcaattaaagcctgtattcgttggagagtttcctcaattgttacgcgatgaacaaaattatcctggttagtattctttgcattagattgaagcagtagagatgattcagaacgtatacttaagtttttgattatccgtcttctccaggtgatgcttgtgtatccggtggaatggataaagagacctgtctttcttggtttattactggaagtaaactttttgtatggagtcatttgacgactttaccgtcgagaaaatgtgttgttcttgaacttcctgttgttgttttggttaatgaagagtctggtagtggtttacaagatgggaaaagttggttggttagtgttgtatcttgggatacttctgctggtgcagctacgagggcttctcggtctcgtagtcctgttggtgttgttatgtgtaatagaaaaactcgagctgttgtgtattg

SEQ ID NO: 144854 - DNA, 3135 bp, Arabidopsis thaliana landsberg
atgcttcagaatttgtcgattgcgaataatcagtttagtggaactctctctaacattggttcgttaacgtctcttaagtacttggatgtttcgggtaacttgttccatggcgcattaccttctggaattgagaatttgaggaaccttgagtttgtgaatctctctggtaacaacaacttgggaggagtgattccttctggttttgggagtcttgccaagttgaagtaccttgatttgcaaggcaacagtttctctggggaagtgatgagtctgttttcacagctaattagtgtggagtatgtagatataagcaggaacaacttctcgggttcgcttgatctgggtctagcaaagtcaagctttgtttcctcgattcgtcatttgaacgtaagtgggaattctttggtaggggagctatttgctcatgatggtatcccctttttcgatagcttagaggtgtttgatgctagcagcaatcaattgtctggttctgttccagtcttcagctttgttgtctctctcaagattcttcggttacaagacaatcagttgtcggcttctttaccaccgggccttctgcaagagagttcaaccatcttaactgaccttgatcttagcctcaatcaacttgaaggtaaaatgtatatgaatattcgtaccctcttgttctcatttttggactttctttgcaaatcttttttgtatctgtttagattactaaactgggaatatttgtggcaggtcctatcggaagtataacctcttcaacactagagaagctcaatttgtcttcaaatagactatcgggatcattacctttgaaagttggacattgtgccattattgatctgagtaacaataagatatcaggagaattgtcaaggatacagaattggggagattctgtagaaattattcggttgagttcaaactcactcactggaacactacctggccaaacttctcaattcctgaggctgacttcactcaaggctgctaacaactcgttgcagggtgtactaccatttattttaggaacgtatcctgagctgaaagagattgatctcagtcacaaccagcttagtggcgtcataccgagtaatctgttcatatctgcaaagttgacggaactcaacttgtcaaacaataatttctctggttctcttcctcttcaagatgcaagtactgtgggaaaccttagcttgaccaatattggtctgtctcataactcgttaggtggagttctctcagaggaactaactcgcttccacaatctgatttctcttgacctttcttataacaactttgaagggaatatccctgatggccttccagacagcctaaagatgttcactgtctctgccaataatctctctggaaatgtgccggagaatcttagacggtttccagattcagcgtttcatccagggaacgctttactgaatgtccccatttctctaccaaaagataaaacagatataaccttacggaagcatgggtatcatatgaagacttctgtaaaggcagccctgatcataggcttggtcgtgggtactgctctacttgctcttgtttgcgtaatgtttcattttatgttgagaaagcaacatgatgaagagaagtcggatgtgactggagaaaagagtattgttccaaaaactgaaccttcttcttccaatgtgattgcagcaaagaacagtgtacaggaaaatgaatcttcgtcttctactacttctactccctcaatcaaggccaagctaccggtttcttcttcacgtttctcccaatatagtgactctgataattcttcaccatttttgaaagaacctaacgaggagcttcactctgaatccagaaaagatgaaatcttgtcatcccaagtatcttcttcaactccatcgctgcctaaaatccagaagtcaccagataatcctacgtctcgccagacttctatgagattggatgggaacctgtatattttcgacagttctcttaagcttactgcagaggaactgtctcgtgctccggctgaagctatcggaaggagttgccatggaacgctgtacagggcagtgcttaattctgattctgtattagcggtcaaatggttaagagaagggactgcaaaaggtaagaaggaatttgcaagggagataaagaaacttgggaacatcaatcacccacatctcgtttctcttcaggcttactattggagtcaaaaagaacacgagaagctcatcatatcaagatacatggatgcaccctgtttagctttctatctccaaggtaaagacttggactttactttctagttaaaatttgattgtttttttcacttaaaacatgaattgttctaaatggttatacatagcaatgatggttttctcatcctctgttgtttgcagaggctggacagctaaacctcccaccattgttactggaaaaccgtcttaaaattactctggacatagccagttgtcttagttacctgcacaatggggaagcaattccacacgggaatctaaaatcaactaatgttctcctgaaacctcctgaactcactgcacacctaacagattatagtcttcatcgattaatcacaccagaagccacgtcagagcaagtcttgaacgcagctgcccttggctactgccctccagagtttgccagctcgagtaaaccgtacccttctctgaaaagcgatgtctatgcctttggagtcattttgttagagcttctaacaggaaaagtttcgggagatatagtgtgcagtgatccaggtgtcgttgaactcactgaatgggttctactgcttgtgggacaaaaccgtgcaactgagtgttttgatccatcgattgttggatcacagggctcaaggaatccctttggggttcttactgatgtcttgcaggttgctctgagctgtatctcaccagcaccagagagaccggatatgaagctagtctctcaagagctctccagaattgttctcaagaggacagcaatctagaagagctttctttgtgaatgtcgctgtaaaaatgtcatgttggattcatttagttcttccattacccttttttatttgtagcataaaatgaaactgtaaatctaaatcaaatactccaattggtt

SEQ ID NO: 144855 - DNA, 387 bp, Arabidopsis thaliana landsberg
gtttgttctttaccaatataaatacaaataccctttgaaagctcagctttcaaaactggaacacaaaaattgaaattaagtggaaatgaagaagaggaagattcatcatagcgacgacgaagaggacgacactttctactatcgctattcctccgtcgcggcaccaccaccttcgaaccctaaacaccaaccttcttcctccgccaaatcatcagctcccggcggcggatctggcggcttagctccttcaaaatcaacactctacgtctccaatctcgatttctccctcaccaattccgacatccacactctattctccactttcggcaaggtcgcgagagtcactgttctcaaagatcgccacactcgccaatctcgtggcgtcgc

SEQ ID NO: 144856 - DNA, 848 bp, Arabidopsis thaliana landsberg
ggagaaagtttatcagtcatacaaatcccgaccaacaacaacaaaaccctaaaatcaagcttcgaaaatgggagagatgatgtacaagctcttcgcttcagcgtcactactaaccctaggattgtatcatctcatctgcactttcttccatctcctcaaatctcctcaatcctacgccgcgaaacccttttacccttttccacgtctctcctccgtcaccggaaacaaccaccataatcacaaccgcctccaaaatctaccactgttcatcctcatactctctctattcgtcgctttccttcacgaaaccctaatctccttctactccgatcccctcgtcaaaggaagtacacctgttcaccgattctcatctctcaattccgccgccgtgttcttcctcttcctcctcatcgccatttactatctcctctccgattcaacctcgttaatccctctcccttccgatctcctcttcgcactcgcttctgtaggtttcttcctccattactccgccgcgtcttcatcagctgcaattcaaacatcggatcttcaagctcattgtgattccctctctgctcgtatctccgcgttatgctctctcctctgtttgcttctcgcttgccgttcaagactctttattgctgacgctgctctcgctgctgccatttgtcttcaaggtctctggcagcttcagactggactctctctctacgttgatgggtttattcctgagggatgtcatcgtcttcttgatgttcaaagcggtgttgaaggatcaacccaatgtgatattcaggactctaagctaagagctgtttcaaaaatggaaactaatgttcactgtacac

SEQ ID NO: 144857 - DNA, 812 bp, Arabidopsis thaliana landsberg
ctaaattttgcttctccttttcttaaaccaaccttaggatagttttcaaagaaagaaatatgcttaaaccaaaacatttttgagaagacgatggctcgataccgaccactgaagtcgttccaacctcttcaatggatagtactgtaatttttggtaatatttcaaaagttcaacactcaacagtcaacatctatattatttttttctttattcaacaagtcgaatccaaatttggtgtgttttggtttagctaatcacttgcgactaaactaaacacaatccactaatcatttaataacgaaacggtccaacccccattaaaccaaactatttttcatatttataacaaagcttttccctccacgcaacttcaatatccaaaataacaaaacatctcttcacttctcatcacaccatgcatcatcatcatcatccatgcaatcgcaaacccttcacaaccatcttctccttcttccttctctatctcaatctccataaccaacaaattatcgaagctcgaaatccatctcaatttacgaccaacccatcccctgacgtctctataccggaaatcaaacgtcacctccaacagtacggttacctcccacaaaacaaagaatccgacgacgtttcgttcgaacaagctctcgttcgttaccagaaaaatctcggtctaccaataaccggtaaaccggattccgacacgttgtcacagattctattaccaagatgtgggttccctgatgacgtggaaccaaaacggcaccgtttcacacaggaaaaaaatacgtgtacttccccggacggcccag

SEQ ID NO: 144858 - DNA, 1248 bp, Arabidopsis thaliana landsberg
atggctgagaaacctgtagctgcttcacatcagagttacagtaattcagtgaatgttgcgccagttgaaacattcaatcagaatcataatgcattaccgtaccaaagctcactaactgctggaggaagtcaacaagtgctagctgctgctgctacaaatttctcagtaggctccaacttgagcaatcttgagagtggaaaagtttatcaagataatcatcactcaactgtggagaaacctgttttggtccaaaatacagtaagtagggaacaaatcgatcagattactaacatctcagcatctctagcgcagtttcttgcaaatggtcagcccattccacagcttgaacaggcattgcagctgcctctgcattcagaatctgttcaaccaaatcaggctactactcaaagtaatgtagtgagtagtaatccaaatcagctatggggattagggatgagcactggcgctgaaggagtccccgcggttactgcatcaaagataagcaatgtcgaagagattcaagaagtatcgctagatcccaaggaaaacggggacaaaaagactgatgaagctagcaaggaagaagagggtaagaaaactggagaagacactaatgatgctgagaatgtcgtggataaagatgaagatggtgatgatgatggaagcgagacgaagagaccaagaaagagaaagacccgaaaggaatgcgggcgtttaagtaggtaagcttaacaaagatggttacaaaaacatagtgaagaaggtagctgagaaagtgactggtacaatgcaaagtggaaacgttcctcaaacacaggagaagattgaccattatctatccgcttcgaaaccaaagcttaccaagctccttcaggttctttcatacattatactcttttgctttgttaaacttaatccaccgcaaaacataccatgttgttaacccttgttttgtctctccaggcatacgtcggcaaaatcaagaagacctaatatgaattgtactcccatgttgtcttaatacaattccgtatctttccatcatcataaagcttgagagctgcagtggaaagtgtttgttaatctttggaggaagattagaagagcaggtgatgctttgttgtccccattagagagattttgtcccaattcttttttcttctttatcgacataatgtgagatggtccaagtctgataatagaccaaaattgcgttttatgtcctttgttatcttatatagaaactta

SEQ ID NO: 144859 - DNA, 990 bp, Arabidopsis thaliana landsberg
  unsure (1)..(990): unsure at all n locations
cacatgtgggaaataagaccagccctccaataactccaagaccggttagagaaatgaaggtatatatgatctattaaaccgggggttntccggtttatcattgtctcaaatcaaatcatatctttattaaaaggagtcgacgtaaagaatgaaaaaaagctggttggtttcggaactttttcgttgattataaaaattaaccgagagaaaagagaaagcattataattgtcatgatgaaatcatgcaattgtttattcaatccatatccttttctttttgaaataataaaaagggtaacacagtgagtaatgtgcaatgagcggaaattctatggttaacttttttttacgttcgaaataattgctgacaaaaagaaggacttcatttgagaaaactcaaatataatgtcaaacatcaatttggctagatctacccgttacatgaattcggttctagttttattggatttttagattcggattaatatgttatgtctggagaatataataatatatactagtcaattagactactcctcgccaagtgactattactagatgatatattatgagaatcaaaacatatgagcaaatatgaataaaatcgttgtgaatgatacagcatttgtacaagagcatgataagaggaagaacaatgggaagaagattaaaggatcagaaggagaagaagaaacaagagaccagaactcgcaacgctgagattcacgccgcggtctctgtcgcaggagtagctgcagttgttgccgcaaccgcagcatctaacgctattgcggccgcagaagatgcggttgaatcaacaaccgttgcagctgcagtggcatctgcagctgctctcatcgcttcacattgcatcgagatagcgggagagattggggcgggttataaccagattgccacggctgttagctccgcgaccaatgctaggactaacggagacattatggcttttaacggcaagtgctgcaacag

SEQ ID NO: 144860 - DNA, 3012 bp, Arabidopsis thaliana landsberg
ctcttacaaggagcgaaagagaaacactttccgacttgggtaaggaaaaagagtttgatgggttgttgtcaatccttgttttccggcgataacccacttgggaaagatggagttcagccgcaaccactatctcaaaacaatcacggaggagctacgacggctgataacggcggaagcggcggagctagtggtgtagccggcggaggaggaggaggaggaatcccatctttctctgagaaatactttacgctgaccttaaagcagctacaaacaactttagctcagacaacatcgtatcagaaagtggtgagaaagccccaaatcttgtcttcaaaggccgacttcagaaccgtcgttggatcgctgtcaagaagtttactaagatggcttggcctgagcctaaacaatttgcggtaagctaaaaaaaaaaacagaaccttttaatttgattgaatatttgttttctgaaatctgttttgttttgtttcttcaatttgtttcaggaagaagcatggggtgtggggaaattgaggcataatcgattagcgaatttgattggatattgttgtgatggagatgagaggcttcttgttgctgagttcatgcctaatgatactcttgctaagcatttgttccattgtatgctttttctccttcttttattgcctcttgtctaaagctgggaactttagtaatgtttgctgatattaggagcttgcatttatggtttatgttagatggatgaaaagagactactttaggtgaattataatgtcttaaaaggtgaatttttgtttcttatcttgttgttgttttggttattcacaggggaaaatcagacaattgagtgggctatgaggttgcgagtaggatattacatagctgaggctttggattattgtagtactgagggtcgtccattgtaccatgatttgaatgcttatagggttctctttgatgaggtattattattttcttctcaagagttatttatttcgtgtttaagagatgcactgtctcgttgcggtgcctaacaagtatattggaatgaatatggtaggatggtgatcctcgtctctcatgttttggcttgatgaagaacagtagggatggtaaaagttatagcacaaatttagcttatacaccacctgaatatctaagaaatggtaaagcaacttgtttatactctatagattattatacaatcaacataaaactcaaatttatagtttttgcactgaaacttcttgaagcaaagatggatctcagtgtgataaattttgtgttgcaggaagagtgacacctgaaagtgttacgtatagctttggaactgtccttctggatttgcttagcggaaaacacatccctccaagccatgtaagttcctatctttatgttttagtaggatgaattgtactactactaatatgtgttttggtgaaattatcttctcattggtcatgcttttgttttaagttatgtgaagctctcgtagtaggtcattgaccatggtttctagaaactgtataatactgctctgtcatcatctctcttgaaattagctaagatatgtgccacgctcttgttctttaaccactgtctatcagatttagctctcaatatgtattatgggcaaggtattagtgattcttggttcttgcatatttaatcttgataaatgtccatgtcatatagtatcaattgaataagatttgtggtattatcttcttctctaggctctcgatatgatacgaggcaagaatattattctgttgatggattcacacctcgaaggaaagttctcaacagaagaggctactgtagtggtcgaactcgcctctcaatgtttacaatatgagcctcgagagagaccaaatacaaaagatcttgttgcaacacttgcaccattgcaaactaaatcagacgtaagctagacatcttgaaactcccaatcttgaccgagttcttaaatttcgtcttttaagtgttaaatattttgggtacaggttccatcttatgtgatgcttggaataaagaagcaagaggaggcaccttcgactccacagagaccactttcgccattaggtgaggcctgctcaagaatggatctcacagctattcatcagattttggtcatgacacattacagagacgacgagggcacaaacgaggtaatcaaatggtagttttggtttcaattgctaaaatgctttaaaaagagtcttgactaacttttggggtttatctatggatttcagttatcattccaagaatggactcaacaaatgaaagatatgcttgatgcacggaaacgcggtgatcaatctttccgcgagaaagatttcaaaacagccatcgactgttactcacaggtcttgatttctggctacttcttcttacatttccgctcagtattagtatcggatttttggttatggttaaagccagatttgccaaaaaaattttgtttatctggatatagtagaactcatatggttacatacattgcttctgtggacagttcattgacgttggaacaatggtatctccaactgtatttggtcggcgaagtctatgctacttactatgcgatcaaccagatgcagcactacgcgacgcaatgcaagcgcagtgtgtgtatccggattggccaacagctttctacatgcagtctgtggcattagcgaagctgaacatgaacacagacgcagccgatatgttgaacgaagcagctcagctcgaagaaaagagacaacgaggcggcagaggatcttgattcttgagacacaaagtgttacatcttgttgtaaaatttgatgagcttcaagaattctttttaagaagaagagaaagaaaaaatacggttaaaaacttgttgctggattgtttgattggggatgtaatgtaaccatagggagagaaaacaattgaatgtttgtttgtatgcaatacatgttgtaagttttaatggtcaaatgtttcgaaaatacaaattgctcttttcatcgatca

SEQ ID NO: 144861 - DNA, 2313 bp, Arabidopsis thaliana landsberg
gaaagatgtgctgctgtggacacagtatctcttgtggctcgggtattgcataaatcaaaggctcatctccaatcaatgcttatgtcaagaaatgggtctctggttgaagacttctttggtcaactggtatgcacctcttcagatctgattttttaagaaaaaccctggttggatggagacttctttggtcaaccgtattgcctcgcttggatttgctgttgacaacatgcatacaatcttattatacagacacttctgtagcatccaatagtcttttgcctctaaaaaatattgaattatacaggacatgattagtaccttcattgtgttacgttgctaaactaatttctcctatataaaatgaagaactatctatatacaatatgtggtatcaaatacatttgaagtagtttgattaaaaggagtgattcatcaggttggttccgtacctgatctgacagagcacttacataggacaactgcgaggatactgctgcatgttaatgggtaaattgccgatcttcttatgagcttgtgttttcgaaagaagtgattagataaattgcacctctctcttcccttgcgccttctgttcgattcttactaacctcaggagttttaaaactgttacattgaatgtatgcatgttcattcagcttaaactaattttacagatatgtcgatcggatagctaattctaaatgggaaatcaaggagcttggaatggagcataatgggtttgtttaccggatgacccctaactgaatcatgaaatatacttaaatgtaataaactctttgaactaacaggtatgttgatttgatgctcggggaattcaaacactacaaaacaaggcttgctcatggaggcattccacaggaggtaaatttctctaagacctcatcaaccccagaagttgaccccctatcagtagttggaacctgttgagatttttggttttgtatgtttttgtatgtcataatcaaactaaaacataattctgctgcttaatcagtcaactgacagacagcatgcaatttaatttgataaagatatcagattgagaatgttttcttatcaaactatagtgaaatctcaaatctgtacacacttcaaactttttttcatgtacaggtccaaaacctcctacttgaatatggagttgaaatatttgcggagatgctggttgaaggcttatctcgaataaaaagatgtactgatgaaggacgtgttctcatgtcattagatcttcaggtacttttcctgatttaatccagtgttcttctcttttaacgggagatcagtaattgtatacatgaataataaaaatttcaatcagcattgataaacatcccaaaactaatatagaaacttcaaataaacaacaaaactgcaattgataaattgaatcacatgagtcgattttgacccacattatctatctgcttgtaggttctaataaatgggttacagcactttgtgccaacaaaagtgaagccaaagttacagatagtcgaaacatttatcaaggtaagcaaaacagaaactcatatgtaagtgcagactcaaaaacagaaacgtttgttacggcttaaaccaaaatcatcactcctctttgcaggcgtactatctgccagagacggaatatgttcactgggcaagggctcatccggtaaacaaacaaatctttttctttctggtctcgcataatccaaactgatatattttactgagttgatagaaatgtataaacatgggttgtaaaatatacaggaatatacaaaagcacaggtcgttggactggtgaatttagtagccaccatgaaaggttggaaaaggaaaacgcggctggaagttatcaaaaagatcgaatcagcgtctatgtagatcaatcttagaagcttgtggcagcttcgcgacatcaagtaatactctggtcttcttctgtctgttcttacttttgcatttgtatcgagtaatgtaaatttgaggataggccccccttcttggtagttttacctgttattacttataagtttgtctaaaagatcctcctgaagttgtatattcttgaagattgtaacacacaatttgtcctccatttaattacttgattaatgtcttaaatatttgttatatcagattctcacttggatttaccaaattaactgaactatagctcggctttactttttgttgttaccatttttatgagttgtagatatcaacatcttttttctgttttaatctcataatggcaattacagtaaaagaataaagagcaatagtgataaataaacaaaagcatgtgta

SEQ ID NO: 144862 - DNA, 644 bp, Arabidopsis thaliana landsberg
cactctccaatgctcaatggcacaaactgtcgtaaaagcttcgtactggttcccggcgagtgaatttccggttaccgacattgactcatctctcttcactcaccttttttgtgctttcgctgatctcaactctcaaaccaatcaagtcactgtctcctccgcaaaccaacctaaattctcaacctttacacaaactgtccaacgcagaaacccttctgttaaaacccttatgtccatcggcggtggaatcgcagataaaaccgcgtatgcttctatggcaagtaaccccacttctcgaaaatcattcattgattcttcgataagagtggctagatcctatggattccacggtcttgatctagactgggagtatccgagcagtgcgacggagatgaacaacttcggaacgctacttcgagaatggcgatcagcggttgtagcagaagctagtagcagcggtaaaccgcgtttgcttttggcggctgcggttttctactccaacaattactattcggtactgtacccggtttcagccgttgctagcagcttggattgggttaatcttatggcctatgatttttacggaccgggttggtccagagtgaccggtccaccagccgctctgtttgatccttcaaacgcag

SEQ ID NO: 144863 - DNA, 396 bp, Arabidopsis thaliana landsberg
ctcccgctttcctagtgtgtctgccatgctaagtttactctgaacaaattcccattattgattggtaagtttacgtactttaccctagttcatatagttacctcatatttctaagtaactacactatagccaaacataaatgtgaaacggaagcactcaatcgtcagcgaacttgagagcaaaatacaatacgacggtacggtatcagcataaacgtgaattaatggaaccgcatattttaaaaaatcataactggataaggtttcaaaaaaagaattgttgcgcaataaacgagtttttttgtttattacaataaacgagtatcaattccttccatcgtcaaaaaccaaagagctttttgtaccgagcgaacgacattatagtcacgaacaagat

SEQ ID NO: 144864 - DNA, 5280 bp, Arabidopsis thaliana landsberg
atgtctgattgtgtatcagaaacgttctctgcaatccgaactgtaagttcttgacttcatcgtatttgtatcttttagggcagattaaattatctgaagaaactttgatttacccttgaagactcaagtaatttgtatctctttataggtaagatcattcagcggcgaaaaacgtcagatgtctatcttcggtagtcaggtcatatttcagacttcttactagctaaaactgatttcttctaaacaattgttcttttttctaactgatccataatctattaatctaaacttttgtttgatgtacagattcttgcttacaagcttagcggcttaaagcttggtactttcaagtctataaatgaatctataacaagagttgctgtttatatttctctgttggctctttactgtcttgggggaagcaaggtgaagacggtaagatatacctgcctataagacttgttgattgccattatgatcattcaagttgaaattatgcttcttgccccctaaaacataaagagaatcgtgtttttatgaatttctattgcagaagatagtgttactcgttgtttatactttctggaacaaatgactggatgtttctagctagaatcaagttactaccttctgaatttttaaataaaaaaaaactaagaatcaaatttctctgtatctctcttttgtgtagtttcttatgttgttacattttagctcttttgcactttatttttcttggttcttattcttaaaatttctccaacccagggtgagctcgctgttggaacagttgtttcgttcattggatacacattcactctaacatttgctgtaagtacctctgtctacacatcatttactgtcacacatatgctatacatgtaatttagtttaccataaccagtgattctgttatccaggtccaagggcttgtaaacacgtttggagatatacgtgggactttcgctgatatagacaggatcaattccatattaaacgcggtgcacatagatgaggctcaggcttacgggttagaaagagatatacatacaaagaaagtccaagatgaaaaccttaaattgttcttgtctgctggcccaaatgtgaatatccgtcacctcgataagtactacatgtcaaatctgaaatcaactaacaatctacgtaccctaacatgggctggagatgtctgtcttgatggtaaaatcagaccaagaaaaactctcttcatcatatcttactacagctttttacctttttcatatctgtttttcttttccatgttctattttgtctagtgtagatgtgcattttgcttatcctctacgacccgacgtgaaagttcttgatgggctgagtttgacgttgaattctggtactgtaactgctcttgttggctctagtggtgcgggaaaaagtactattgtacagttattggcacgcttctatgaggttaatctaccctcctcttccaatttgaagtttaatatctgttgagactatgtttactgccacttttacattatgctgatatgttgaattttcaattcttgcagccaacacaaggacagtattactgtgggtggagaagatgtgaggatgtttgacaagagtgaatgggctaaggttgtctcaattgtgaatcaggtgtgtatacgtaacatctatgtgtcaggcatggttggatcatttcttctcttcttcttcaaaggttatctttctgtgtgattcaggaacccgttctcttttctctctccgtggccgagaatattgcatatggtctccccaatgagcatgtgtccaaggacgacatcattaaggcagccaaagctgccaacgctcatgattttataatctcacttcctcaggttcagattcgtgtgccttatactttcctgtttcttcctggcaattgcacatcaattcttgtgagcaataccggtgtttgtttatagggatacgatacactggttggtgaaagaggaggcttgcttagcggaggacaacgacaggtatagaaacattatgagctacatgtttttgatttctgatagacttttgcaactgctttgatgtgcttgtttatcaatgtgttagagagttgccatagcccgatctctgctgaagaatgcccccatcttgattctcgatgaggtgagagactcttattttaataatctcgcctttgatgaactgtctgctttgctagaacctttacctaagtaatagcatatcaaacaagaacacaaacagttagtatgagacatctctgcttagtctctctcttgcttactttgttgcaggccacaagtgcgctggatgcagtgagcgagcggttagtccagagtgcgttgaaccgtctaatgaaagacaggacaacattagtcatcgctcacagactgagcacagttcagagcgcgaatcagatcgctgtgtgctctgatgggatgatcatagagcttggaacacattccgaattggtagcgcaaaagggatcatatgcttcacttgttggcactcagagactagcctttgagtaatttaccttaactcggtgtaatttgtaacaaattactacaaaattacaaatggtagaatctggttttatatacaactttgattaacaatagtttatagacagatcaaattttcaaaaatttatagtaaaacaagaagaaattaaacgaccattgatgtgaagctgacgtggagggatcttcacttatgttttcttcaagaatgatccgaagattaaaaaaaaccgaagccgcttgacatcttcttccaattttgatttatcaaagaaaactcctttgtgagagattatttatgtactcttgattcagagaggtaaattctgttaggggttcgttcgattttcgcgcttgggttttgttacttatgatcggatttggtattttgaacagtaatgatccattcgacgtttacaggataatccaattccgagttttctgagtcgtaatttagagagaatccaattcgatggatttagatatgaacggaggaaacaagagagtctttcaaagactgggcggtggctctaatcggccgacgacggactcaaatcagaaggtttgtttccactggcgagctggccggtgcaatcgttacccatgcccttacctgcatagagaattgccgggtccgggttcgggtccagtagcagcttcttcaaataaaagggtcgctgatgaatctgggtttgcgggtccgagtcaccggagagggcctgggttcagcgggactgctaataactggggaagatttggtgggaacagaacggtgaccaagacggagaaactttgcaaattctgggttgatggaaattgcccttatggtgataaatgtagatacttgcattgctggagcaaaggagatagtttctccttgttgacgcagcttgacgggcatcagaaggtatcttgttgttgagtgtccttataagtgatgctggattcttgtgcttgttggcgatgttgatagtttttttttttttttggttctgatttctcgagtaggttgttactgggattgctctgccttcaggatcagataagctttacacggcgagtaaagatgaaactgtgcgaatatgggattgtgcttctggacaggttttgatttgcctctgataattatttcttttattgttgtttgattgagtttcgctccatatttagtttagctattgagtttaaaacatcattttgatatggctggttgtttggactactttataggcgtacttctcattctagtatttgtttttttttctacgatgtagtgtacaggtgtactcaatcttggtggggaagttggctgcatcattagtgaaggtccctggctattggttggcatgccaaatcttgttaaggtaagttcagagtatgattcatttgcatggttccttgactattaaaactcttcatctatactgagaatcacttttgttgtcctatgtgttgaggtttattgttgttacggatatacatttttgaattatatgcaggcgtggaatatccaaaacaatgcagacctgagcctcactggacctgttggccaagtatattcattggttgtgggtactgatctattgttcgctggcacacaagtaaatacttttactgactgtaaacttagtttctaaggccttggagagttggagtagaattttgcttcagcgtcatgtatatacttaaaatcattttttgtcttgaatatcatttcaagtttgcgtcatctcttggaaaaaccacctctgctaatagaaatctacagttctattggattttgataaaaattcttctgcaggatggctctattttggtttgaagatacaatagcaccactagctgttttgatccagctgcatcactattgggtcacacgcttgcagttgtctctttatatgttggggcaaacagactctattctggtgccatggacaattctataaaagtaagtagtgtggcactacttaaaaagtagtcaccagtgcctattatacctaaattaaaatcccctttctgtttttttttgtttaagctcataggcctaccttatctgtttttaataggtttggagcctggataatctgcagtgtattcaaacgcttacagagcatacatcagttgttatgtatctcatttgctgggatcagtttcttctgtcatgttcattggacaataccgccaaggtttggttctaactcgctagataattggctcgattcctgaatatgacattaccccctgtttttttttttttttttttttccgttgtagatatgggctgctactgaaggtggaaacttagaagtgacatatactcacaaagaagaatacgtacagttcctagcatttttgttgaaatattaccctttctcttgattcattctatatgtaactaagttctcaatggctatttggatatagggcgtgctagctctctgtggcgtccatgatgcagaagccaagccagtattgctatgttcgtgcaatgacaattcgttgcacctctatgatttgccatcgtaagtctttccaatgctgtttgtttcatgagtatacaattatgttttactttcaaaagcttagattctgttcttatgtaaggtttacggaaaggggcaaaattttagctaagcaagagattcggtcaatccagataggtcccgggggcatatttttcaccggtgatggaagtggtcaagttaaagtatggaagtggtctactgagtcgacccctattttgtcttga

SEQ ID NO: 144865 - DNA, 2385 bp, Arabidopsis thaliana landsberg
ggtcaaccaagcatgaattttgcttcatcaagtagcaagggtgatacacttgtagcactaggctctccctttggaatcctttcacctgttaacttttttaacaggtgaattatggctacactagcgttactgtattttaatcgactagaggtcatcatgatttcctttctcttgatagtgtcagcatttaactccgggaatctaaactggtttgaaacagcgtatcaactggttccattgcgaatagctatccttctggatccctaaagaagtcactgatgatagctgatgttcgatgtctccctggtatgtacgattatcaatagttcttatatatgctctatttgtttcatcttaagagctaaaacatgttccgttccggttcaatttctttcaggaatggaaggggctccggtgtttgataagaatgggcacttaattggcattttgattagaccactaaggcaaaagaatagcggcgttgaaattcaggtttgtcaacggcagcctcatttcctttatgtccattgaagttttattgtaatgtttcatgcaaaactgtagccttcggtagcagctggtggttccatggggagcaatcacaactgcttgcagccacttgctgcttgaggaaccatctgtagaaggaaaagcaagtcagtgggggagtgaagtactaagtgttaaatcagatgctagtattcctgcacaagtggctattgagaaggcgatggaatcagtttgtcttattacggtcaatgatggtgtttgggcttctggtattattcttaacgaacatggtctcatactaacaaatgctcacctgcttgagccgtggaggtatggaaaaggtggtgtatatggtgaaggatttaaaccctatgtcttaggagccgaggaattttcttccacgggaagtaaattttgggaacagaagagtcaaacattgccacggaaagctccacgaaatcattattcgtctgttggagagaacatcagggaatacaaacacaatttccttcagactgggcatagagacatacgtgtgcgtttgtgtcacctagattcttggacttggtgtcctgcaaacgtggtctatatttgcaaggaacaattagatattgccttactgcagctagaatatgtccctggaaagctccaacctattactgccaatttttcttctcctcctttgggtacaacagcgcatgttgttggacatggactcttcggaccaagatgtggtaaagactccgttaatcctagaattgtcttgttgaatcagatttttgctcaattcttgcttatgttgtgcttccataatcttgcatagatttctttgcacaccctgaaattacattctcttgtgccttacatgtgccaagtgtccttaaatggaagaaagaaatgatcctctctattcttctgtgtttgttattagggctttctccttctatttgttctggagttgtagcaaaggtagttcacgcaaagaggagattgaatacgcaatccatttctcaagaagtcgcagagttccccgctatgctcgaaacaacagctgctgtgcatcctggaggcagtggtggtgctgttctcaattcaagtggccatatgattggacttgttaccaggtatcagacaatcactctcaaatacgactacgtaggtctcttagatccattgctgagatgtgtcattagaaacggacagttcttctttaatcatgatgatatgtagttgattgttcattgctatgttttctgtatctgcagcaacgcaagacatggagcggggactgttataccgcatctcaacttcagcatcccatgtgcagtcttggcaccaatcttcaagtttgcagaaggtttgtctaatcttgttggtttgtttcacttatggaagcagaatagagagtagatgtgtcaaaaagtgtttgcttattattgttcccgtcttaaaacagatatgcagaacacaacgatccttcaaacacttgatcaacctagcgaagaactctcatccatttgggctttgatgccatcactatcaccaaagactgagcagtctctacccaatctgcctaagttactcaaagatggtaataacaaacaaacgaaaggatctcagtttgccaagttcattgcagagacccaagacatgtttgtaaagccgaccaagctttcccgtgatgtgatccctagcaagttatgacaagattggcttctttgcagaatttgtgccttcttttactccttttgctggagtggcaactttaacttttgtatagatagagagattacaaaatgttgctgctgtttctggattattctgcttgtaacatatataaaaccttataatacgttttggcaactctgtttatca

SEQ ID NO: 144866 - DNA, 613 bp, Arabidopsis thaliana landsberg
attatatcttaaagaacttataataacagtaccatgttccccacatgttccatagatcaaaacataaaaacccaaaacataaagttctcggcttttcagtatcatcttaacttcgtcttaggataagggtacaagacacaaccataatctagagaagactagcaaaagagtgacgaatcaatcactggcttggtgaacggtcttcgtcatactggcccccatgcgggctttggctcctgcttctggcgggttcaggagtgtagcttctgcttctcctcggactcctgcttcttctagggctacggcttatgcttcttcttgggctaacgctcctatttctttttgggcttgggctcctgcttcttcttgggctacggcttatgcttcttctagggctggggcttaagctgcggctcttacctctgactggagttaaactgcgaccccttgagccatcagaggcaggtgagcgcgagtatgacctcctcccatcatatcgctcttccctgggcgagatagatctgtgacaatagacagtgagcatacaagcgtggagaagtttgtaattgagcttagacagaaacatatagaaaccttgggtgatgtcttctag

SEQ ID NO: 144867 - DNA, 2708 bp, Arabidopsis thaliana landsberg
tacaaattccatttcgattttaaaacttttgagaagacgatatacaataatgaacggaacatcgtgggctgaccagtgggacaatagcggcgactctgccaaaggaggccgaatcggcagcggcgccgtcgtgagaagcagcggaagtggagcaacgtcaaacacgaccaagtacaaggagaaaatgggacaagggttagacaaaaccaaagctgtagcttcttctggttttaagaagctcaagactggttctgctattggttttcgttgggtcaaggacaagtatcacaaaaccacacacaaacaataaagatttctgtaaactcctttgtatatgagtattagtaatttattcacttgccaaatactgtattatgtctgatctatattttttttagcttgtttgatttgaatgctttgtttactgtggtaaattgttcgagtttgggtgggttcatggattactttaattgtttttctctttaatttttaaattattacatctataataacaacgaattatcgtttagacaaaatcatattatgcgattaaatcataaatatataaaaataagaaacgatttatttcgaagtatataacgtgtaattttataaattttacttttaagatcggagggtaattttccctcgcttctgcagaaacaatttttatccgccggatctgaagtggttcttcttcagagtaaatcaatcggagaacccaaaaccctagaaagcaaccagaatcacatttcactctaaaattatcggcggaagcagaaaccctagtcattggttatatccgtcgccggcgttagagggccgtgatgtcgatagagatgccaagaggtttaccatttgccgtcgacacttttggaccatacacggagacgaagagaagaaagagacatcatttcttaactcatgctcataaagatcacaccgttggggtttctccttctaacattgtcgtcttccccatttactctacttccctcaccatctctcttcttcttcaacgtttccctcaggtttttgtttcctctatctcttatctcttcgtgtttccttctctgtttcctcaataattgtcataattgtgcagcttgatgagtcttacttcgtgagagttgaaattggtcaatcagtgattgttgatgatcctgatggcgagtttaaagttactgcttttgatgctaatcattgtcctggtaacttcctttgtaccttttgcttttgttaaagtcttagctttttccaaattgtgacgaatttcataaacttcaggagccgttatgttcttgtttgaaggaagttttggtaacatacttcacactggtgattgtaggcttacactagattgtctacatagtctacctgagaaatatgttggaagaagccatggcataaaaccaaaatgctctcttgattacattttcttagattgtacatttgggaaatcatctcactctcagaggtttcccactaagcattcagctattagacaggtgatttggctttaatcattatgcattggaatcgtttctgtgtaaagtttctccattttcattcttgttcaatgaattcagatcatcaattgcatatggaaccacccagatgcaccagttgtatatcttgcttgtgatatgttgggacaagaggatgttctcttagaagtttctagaacgtttggctccaagatttatgtggacaaagctacaaacttggaatgtttcagatcgttaatggttatagttcccgaaattgtctctgaagatccttcttccaggtttcacatattcagtgggttccctaaactgtatgaaagaacaagtgcaaagcttgctgaggcaagatcgaaacttcagagtgagcctcttatcatccgtccttcagctcagtggtatgtttgtgatgatgaagatgattggaaaagtggaagcattcaaaagcagagaaaagttaggtttagtgaagctgtcaaggatgagtttggcctttggcatgtgtgttactcaatgcattcatcccgtgcagagttggaatcagcgatgcaacttctttctccgaaatgggttgtatcaacagttccttcttgtagagcaatggaactcaactatgtgaagaaaaactgttttatcagtcggttttcgcctgatgatcctttctggaagcttctagacatcgatatggaagcttctccagttgcagcagctgatactcaaactgtagctcttagttgctgtctcatgagtgaagagattattctggattcgggaaaatcgaagttagaacctgtgatagaatcgtctagcacgaagaagaagcttctgagtttatcccctgaaaatagtcttcctgtaactctgtttgggagagcaaggcaaagttctcaggaatgtgatcaactacatgagagaaaagtcatacacactcaatgtgtatacaccaaaacctcgccggtattggaaaaactgaatgtaaaggtagtaattgagcctttacaagatgatactaaagaagaaacagtagagaaggaatcttgtacaatcttttctacttctacctcaaaggagacttgcaaggatcttagtggggatttgagaaagctatacagatcaatgaacgcacctgtgcctcggccgctaccatcattgatggagcttatgaacgctaggaaacgctctcggaatcacttgagtttctag

SEQ ID NO: 144868 - DNA, 1047 bp, Arabidopsis thaliana landsberg
ttaggtatgatataaacctggaaataccggtatttgaaccgaagttgaccgggtgagactttttaggataaacccaagcatccatttccgagtaagaagagctctgtttctgaaagaagttttacagagtcgatcgtctaaagcgttgttgaagcacttgttagtggtaagtaatttcgatttattaattcttgttgtatcttttgtattcgaagttacttgcttgcttttcgatttcgtctccgtcatgatgtttgcggctctgttaattggaagtggaaaggtctgtcctttatctacataaaatggtgcatagaaggtgttcgactaaattcctagctcaaattcctttagttacattagctctgactggaatgtcactgtgaagtctcgatacccaattcattcttttcaaaaacaattgaagattattatttcccttctcacgattttctgtcttttctctattgttgacactatatcagcaaatgtttcttgcaggtgctctgtttcaagctggataaacccaatcctatggggatttggctggattttataccatattttagcatgattgtttgataaacgcttgataaattgcctcttgttgtcacctttgctacgaaaatgtctctggtttgctctttatcttgtgtagctcccttgccacagactaaacagtcgcgtccaagttttctgaaactcgaaacatgtaccttaagtttatcttctcccgctggctatcctaattttaccaccggtattaggaagcatatcagttacttgttcactgaaccgatcaagcttcctaggctagcaaagagtcggatattagttagtcaggagtcttttacagagaccagcacaatagatatggattgggaagatcaggaggaaattgaggatactgggtcaccttgggaaggttcggttatgtataggagaaatgcttcagttacacatgttgaatattgcactaccttagagaggcttgggttgggaaggttgtcaacagatgtctcgaagaagagagcttctgcaatggga

SEQ ID NO: 144869 - DNA, 2691 bp, Arabidopsis thaliana landsberg
  unsure (1)..(2691): unsure at all n locations
agccgagttcagatactcgtttggcgaaagtgaaagtagattcggactttaccgcaccttgtgatacttctatactctacccggctgatggagggaatatgcattgcttcaccgcgaaaacggcttgcgcggttcttgatgttattggtcctccatactctgatcccgcaggacgtcattgtacttactatttcgattatccgttctctagtttctcgggtatagttttcgaaactttttctatgatttgtgttagaatctagctactagtagtactgtagtagggttgaacatnnnnnnnnnnnnnnnnnnnnnnnnaacctgaatagggaaaaagagtttgataacaaataaaccacaccaaccagctgaatgaccttgtatatatggaagaaatactttcaaaatatgaatcaatgttgatattatttatattttgttattagtttggatttgtttcccaaaacctaaaatatcggtatcgaactgtagaaaaccaaatgctcacgcttgcctatttagtagtttgagatctttgtgttgtttttttggaatgttcagtcgatggagtcgtggttgccgaggaggagaaggaaggctatgcatggttgaaggagagggaagagaagccagaggatttaacggttactgcattgatgtatagtggaccaaccatcaaagaatgaatgtggaagcatagcagaaaaaaaaaaccctttctttttctttgttctgttagagtattttcttgatttctggttgcatataaaaagaggtttttggaagtacatagaagaacaaatctagtatttattattttatttagataacagagaacaacgagtacacctttgtcggaatgctgtagtctgtgttttggtcaaagatccttacaagttttgtcttattatagcgttttttattatatataaaaccataagctgaaatagttgtcaaaaggggatgtagctcagatggtagagcgctcgcttagcatgcgagaggtacggggatcgataccccgcatctccattttcctattttttgttatcattattttttcttgtcccggtttttccccacgtgggaaacgtgaataatttaactaagacatgtacttcttctcatctatcttcgtcgttgactcgtgaaacttttgacaacttgtagtattaagatccaacttcaaaccaacggcaattgcattttcagctaaaagcaatggagtcatcacttcccaagttgctgcacttgatcgttcaactctactcaaagctttcgacgagactaaaaccggcgtgaaaggccttatcgacgccggaatcacagagattccttcgatatttcgtgcacctccggctactttaacaagtccaaaaccaccttcctcctctgatttctccatccccacaatcgatctcaaaggaggtggcacggactcgatcacgcggcggagcttggtggagaagatcggagacgcggcagagaaatggggatttttccaggtgatcaaccacgggatcccgatggatgtgttggagaagatgatagatgggattcgtgagtttcacgagcaagacactgaagtgaagaaagggttttactctcgagatccagctagtaagatggtatacagcagcaacttcgatctgtttagctcaccggcggcgaattggagagatacacttggttgttatacagcaccagatcccccgagaccggaggacttacccgccacttgtgggtaagatttccaaatttgttaaattacgagtttgactatttttgcttttgtaacatgttgtgttcctcggtccgaagaaattatatatggtcgaatagtgtttcactactcgttagacgaatattaatccaataatacgttttcttttttaacaaatttttataacaattgaaatacataaatccaataataacttattcaaatagttataagcgctaggatttcgttgaagatttttacgcccccattattcattagtgtgtcttaaagattttggtggacattttttcagggagatgatgattgagtactcaaaggaagtgatgaaattgggtaaattactcttcgagcttctctcggaagctctagggttaaacactaatcacctcaaggacatggattgcactaactccttgctgttgctcggccattattacccgccatgtccccaacccgaccttactctaggcttaacgaaacactccgacaactcttttctcactattcttcttcaagaccatatcggagggcttcaagttcttcatgaccaatattgggttgatgttcctcctgtccctggagctcttgttgttaacgttggagatcttcttcaggctaactaactaacccttttggtttttgatcagtggttaatcaatggactaatataaatctgacttttattacctcattgggtgcagcttataacaaacgacaagttcataagcgtggagcatagggttttggccaatgtagctggaccgagaatttcagtggcatgtttcttcagctcgtatttgatggcgaatcctcgagtttatggacccatcaaagagattttgtctgaagaaaaccctcctaattatagagacaccacctcggaatcctccaatcactatgtggctagaaaacctaatgggaattcttcgttggcccatttaaggatc

SEQ ID NO: 144870 - DNA, 6445 bp, Arabidopsis thaliana landsberg
  unsure (1)..(6445): unsure at all n locations
tcattgcttcgcttggaagaaatgtgccgtcactctcttttgcagttttcggatttgcaatgtcgggtctcgggttattcgctttgcttcttcctgagaccaaagggttaagtctttgtgatacaatggaagagcaagagcaaagagaccaagccttgaagactagccatagttgctgaaagcagagttttttgaaaaacctctgttcttttattgaactttcgtataaaacctctgtttagctccggttaatcaagccatatgttgattttccgagtaattaatatgcgaaacctacaatggcatgtattttttataaactgaaccatttcattttcttgattacaaaaatctgcataaactaggaaacgtttgctaatcatctataaagctatcatgtgaatgtctctgtctttgaactactaatacagaagcatttacatctaaagacgaagccaagaaatcaccgacagttccaagctccggacactcttcccaatctttcattctcaccgtcatagggcaatctcctgtgctctttccgaccacaaacagtgaatacatctctccaatctctcttagaatagtcagcgtatgcggtccattgctcactagcttctctatgaaccccacttgtcccgttgttacaaatctgttgcacagtggaaaataatgtcaaaagtagtttctttgatggaaactgaactttccctagcttagataagaaacaaagaaacagagtagcggcgggaaacagagctcttctcagaaacagagtatacacaaaacagagcagtgataaaaacagggtataagtaaggtacctgttatagaattcttctaagaagctccgatctgtttcttgttcagtttgattccttcccagaacttccatgaaaacctcattattatctcgtgtcatagcatttccaacaggggtctctgcctttgattcctcggagacaaactgtataactgtgagatgaatcatagtattattcgcgagccatctgcacagagcaagagcctcacgatcatccggaccaccaaagaacaatgtcgcgacgtgttgtacagaatcaaacccgtgcggctgctgaaatccggttatgttacggtccacaaaaatgccaatggaacacggaccgtgccttagaacattacggttcatctgtctgaacagttccccatcgtttgtagtcttcccatcgattctctggtgtttatgaaacggaagaaatacaatggaaactcgaagatcctctgttgcgttacagatctcttcgtgcatattaagcatctgagtcacgagcttcacttgttggatcaagattttgctgtctttagcaaacgaatcaatcgaatcgttgatctctaaaccttcgttggtcccgaattcgtcatctccattcgcattgcctccatcttcgtcgtgctcatgatacatcagttccgattttcgtttcttggggaggggtacaaggtgcataagcagaggtgtaaacggatcagaggctccacgagaaccgctcaaggccgagacaagagagatcgcaccgcgagcatgacggactccataggcgcacgataaaatgcgtaattcctcgttcgtgttatgagactcaagcgaagtcttctcgtaagcaaagtccttctctcttgttttaagcaagaaagatgccagaacaccacttactagcgtcgttatcaccaaagcagccaccatcatatcatgaatagttgtggtccaccatttctacaggtagattcagacaaagaatgggaaaaaaagaaccataagtttttgttattatatatgttaattgttcgtctgttcttgaccaaaatataccagaccctaaaacatgtgtaacattttttgttgttttgttgtgggtgtgcaataacagacactctacaattgaacaagacttaatgtgaatggtataaaagtagcggaatcatataagtaaacgtaccttttcggaatagttggagtctagaagaagaagaccgacatggcctttaacagagagaatggtgggtaagaaaagccaatatttcttagggatcttcaggtacatacaagcgcttattacaccaataaatttcccagctatggttacaatcacgataataactataccaaggtaaaagcgtttggttaacgcgatgatgctgaatctgaatccaatgtaaccaaagtaaaccggaagaacaaactcgtgaatcgggtaactaagccgttgtatcaacgttctgtgagtctttccttgtcgtggaaacattatgccaatggcgaaaacagaaaccgaggaatttacatcgtaggattcgatagttataccgatgatgagaaggaagatgaagaaaactaaagtttcagcctttgataggtacttctctttagggttcctctttggaagccatggagctaagaccatgttgatcaatattagggctacggttgccaaaagaaacaagaagagttcaagtatgatagttccagagatgaacgccatgattatagtgtagagaaccacgtttgttaattcgatgaacaacgcacatgagattgtcagccgtccgatctcacatgtgttgagtttccaatcagcgattgaacggactacgacaggagatgccgtgttagacaaggtaacgagaagaaccaagaaaaacgtaaagtaatcttctttgatcccaaacaaagggatgaataacattaaggaagcgaaactgaggaggccggaaaccacgaatgagctcaaggttatcaccgcagctttcttgaaatttcttctcatgaaatgtagatccacttcaagaccgatcaagaacatgaaagatgtccgtaaagcgaaggagaagaaggagtaataatctgctgcatttttctggaggaagaattccttaactttaggtattcttgagagcaaaacaggactcaacacaatcccagcctaaaaaatatccaatatggataacaaaacaaaaacttgttagacattttccactacaaaaaaccgggtgattcttgtaacgcaagaaagaaatttccttacaagaatctgggcaacgggaccagcttggccgcagggtttaagaaggagataaaacaattgagagaagacgagaatgcaagccatttgaataaacatggtattaaggggattaaacagttcatctccttgaggtaagcaaagcaacaactttggatccatcttcttcttcttgattcgatgatcatgagcattcttcaagcgtgatggtgatgatacgcttatgaaaattaaacgttatgttaaaaaaagaaactgaaaatgctttctaaaacaagaatttataattttcacaagtaatttagaaattaaaaaaactaattagtttacatttggttggagttgatagatgtgtttacaattatttgaccgtccttcaattactctacgcctctatttcaacccttggagaacggattaagttgactgtaatcagaaattttacccaaaaagtttactaatgattaggttattatctggtcaataatcaacagatttaacaccataagtccataacatatttcttatcttttgtatatatatgggaagttaatttttgtgttttgtaaacaagtaaaacataatacagatgctagtaaaaatgacaatttgtttttgcaattacacaaattacctcttaacattttaccttacagggtgttgtttaaccaaaagaaaactagagtgttcatggcataataaaaaacaaactataggggctgaactataatacacatactgttcaggatacaaacgaaacatgagaataatatggggtccaaaaagtaaataaataatcaaataggagttctttgcaattaacgctaaagtgcgaacctgtaagtcaaatcatgaaccctaaaaaccccaggtgagaagaacggagagagagagagagagatgtcgttcatgtatgagaagagcaatacatggagatggctagtgatgaagacgcgagattcgagatccttcttcttcacgttcgctgctttatgtggtgtcattcctggcgttattggctatggagttatgcaggtcaccaattccagtaaccctgagctcgaagcccgcctccgtaaatctgctcgcccagatactctcgtatgtagttggttttcttctattgatgctaatcggtgttgaacttgatggttacaatttgttcgtacatagttcctatagttgtcttgcttgatgtgtggaacttttcttggaggatgagtagaactttgcttgatgatgattctttctgctactttgcaaagctcctatgggattgggtacctagaggttagaggtgtttaggcctcgatatgttgaattgagcatttgcattttcttgttgctaatacaccaatccattgttctgtgttaacaaggaatttcatgtatctgagttcttgctctgcttcacaatgtcgattcaattggaagtttattgatcacagccgtatgttaaccttaggcttattgttaatcttcaatctttttgtgttatgatgaacaatacatttctgtttttgtattgttagatgatgggtaaagtaaaccaagagaggctagctgaatatcttggtgagttgaaacagaagcaggatacaaacgacagatacgttgctgctcttaggggagagactcttaccaggaagccttatcaaagaatccaaccaatgccaaagccagatgacacggtgacaaccaaaactcagtaaggatgaattattttaagagtcagtgttagtgaatgcctctcactcgaatcttttgtcgatacaaaaatggcgtgtttcctggccgtaatatcttttgtttttgaaaccggcatccagcgacacaacttttgtgctatgcaaacggctacaatgtcaatcacttcaaaccttttgttatgatgaataaaatgtaaaacttatgttttgtaatttgtacattgcttcttcattcttgtttgcaaagttaatgttttacagtacatacagaattacatggtacacgctgattgtggaacattgtcagaaacacttggcaaaccaaattgtagattctacaaaagagatggctatgtgcaagcgatttgttatgtgcagagataaagtttgttggcattgatcacgtgtaaagccgtggtcagaaaaaaagttcgtggccattgatcatgtgtaaagctttagccggttcgtgatccttactcgacagatcgggcaatttgatattttggatccgcaatctccacaagtctgcaaaaggaaaattgcaaaggtaagttaaaactggttgttgattaatgaatgggtttgagtaaactaaaagcaatcggtgaaacttaccatgtggccacagctgaaagccacgtcttttcggttagtcagacaaatcgggcaactctgttaaacggaaaaccatatgagattggagttgattcgacaaggcagaaaaatagtaaagtatacaaattatgagacctgggtttgttcaggtgatgcaggtgatgcagttgatggtagttcagcattagttggaggtgtgtacgggattggtggtggcctcggaactattgtcttcgctaagcccgtctgcttcctttatagacgggtgcagaagtggacagggaccagcagaagcaattagacaaaaaaaaaaaaaaaagagcagaaagacggtagttctgttatgctgagaacttatggaagtacccgagtaagcggagttcgatggctgcttgatactgaaagggaatctccattagagcagctagagcaaaagcagtttctttggcagactctggtgagttcctcgtcataatctctgtgaaattcacaaactatgcatagaccaaagatcaagaagaagcncaaagcagagaatatagatggaaaatagcacagaaactgggaagatacctgaaagttgtcgaattcacgctcagggatcttatcatcgaacttcctcatgtcttcccatggtccgtctccaacaccgactaaaacaatcgacaaagcatacgagctgtagataataaaggaatttcgaaaatggcttgtttagataccgcaaatcgagttgcgaaaaatgaaaaactgaatctgcatttttttaccttgcatttacaatcgcgtcgatggttgttttctcttgttgactgagttctccctcggccatatccgtacctctcgttaccttaacattcaaaaggtagccttttaagttttggtatcatactttgtttctcttaactgcttgtaactttacctgtccatctgcaacaatcaccagaacatggaattgtccgttgttcttctccacaatgtcgacagcagcatcgatgagcggtccatacgacgttggcccttttgaacacggaaggttgtgatttggtgataaag

SEQ ID NO: 144871 - DNA, 848 bp, Arabidopsis thaliana landsberg
  unsure (1)..(848): unsure at all n locations
tgatgtcagaggatatggtgaaggatgggtatgaggacatcatgaatgttgatatctcttcagtggctattgagatgatgcaaaccaaatatgcatctgttcctcagctcaaatgtaacacttcttttcacatctctagtttatattactttagctttagaaatatgtaagtaagaagctttatcctattatactctgtttttacccaacagatatgcaaatggatgttagagatatgagttactttgaagacgattcatttgacactattattgataannnnnnnnnnnnnnnnncaccaattactctgtttttatggtgaaaagcttagaagtgatatattgttacctgttgttgcggctgctggattgtgtaggaacccttgattcattgatggtacggaacctgatcttttgtttctcgtgttcatgtctacatgtgtttataagttttcttgttttgtgtgatacggtgggttccagtgtggcagtgatgctcttctaagtgcttcgagaatgttgggtgaagttagcaggtcacatatatcatcatggatgctcctggatcatctcatatagatgccattttttggattcttttttaatatatattctcaacaaaactcttctcttttttcatattgcaggctgattaaacctagagggacctactttttggtaacatactttctcttgcattccccatatgtctgtaactgttcatagtcattgtcactggtactagaaggatatataagatattttgtgtttgttgtggtggtttggtagataacctacggtgatccgaaagtgagaatgcctcatttgactcgttctgcgtacaactgg

SEQ ID NO: 144872 - DNA, 265 bp, Arabidopsis thaliana landsberg
acctaaatgttaggggaagaagaagctcttggtaaggctcttcctagctcttcgacaaccctatggacgtggtaacagtttgaagatgatgaggcagaggattttgggaattgaaataagttaacaaataaataaataaaaatcttaatttatatgtttgtttgggaagaagattggatatgggtttttggattttcgaggtttaaggaattatgacgaccgttcgagcaatgtgggggtttctgtattggataaagaagcgaaa

SEQ ID NO: 144873 - DNA, 1012 bp, Arabidopsis thaliana landsberg
tctgagatacatgagcttttggcgctggtctactatgacagccttcagagtgttgtgccgttttatgatcagcggtctgtgcttccctccaaggatgcaacatggacaagattttgtgagaactcaatgaagcatttcaacaaagccttttcacatcggtatagtttatttttcattcaaagtgtgttttactttggtcaattactaatgaggctgagaattgtttttcttaaaccatcctgtacagacaagattggtcacatgcattctacatgggaaaactcagtgagaagcttgggcactcgtatgaaatttctttatcctattataagcaagccatgacattgaatccgtcagccgtagatcctgtgtatagaatgcatgcttctcgtttgaagctgctaaatgcatgcgggaaacaaaacttagaagccttaaaggttcgtagttgacgctctactgttaatctctttctcatttgcagaaaaacaggcgtcttttatataacttgtaactaccgcatcatggtttcaaaaataaaatcatttgtaaaattcagtttcagctaaagatgttcactattgtggtccttaataatttccgctgtctcaacctttcaggtcctcgcttcttattgctttgatgaatctataaaggatacggctatgacaatcattggcacaacgacttttggatcctctcgtacactggaagaagctcaagatggaaacttggaagcatgttatgctaaatctggagaggggtcaattcagatggaaggggtatggcatatgctctacaacgacagcctctctgcacttggaatttgtgtagaaggagatcttaaacactttcataaggcgagatacatgcttgctcaaggtctgtacagaaggggtgggagcagtgatctgcaaagagcaaaggaagaactttccttttgtttcaaatcatcacggtcaagttttacgatcaatatgtgggagattgatggcatggttaaaaagggaag

SEQ ID NO: 144874 - DNA, 239 bp, Arabidopsis thaliana landsberg
gtgggtgcggaaactggaactgaaggtacagaaacaatagctaaacctggcgttgtagaggagacgggtggtattaagcaggattgaggccgagtcttttcttcaataaaaccttttgtatttgtggatatgttttggataagagaagaagctgaaagttgaaattacctgatgtgatactgataatgaatgatgtacgttgaaaatgctacgtaacagataattttcttatatgttta

SEQ ID NO: 144875 - DNA, 489 bp, Arabidopsis thaliana landsberg
ggaaaaaaaatgtacgaaaataatctcttaacgctctcttcatgcaccatgaatctcaatttcgctttctccccattccttgtctctcagagacaaccattctcttcccacaagcgtaatcttcacactctcgttgctgtttctgctaattccgacaacctcgccggtgaagataacggcggaatttcggcggcaaataaaggttctgggactacagcgagaggaaggagattactcaaggttagagaagagaagcgaaaacgcgactacgatcgtcttcacgattacccatcttgggccaagtacttgtttctttccttttcttttgcactccaggtgtttgtgtttttgcctaagtcacgagaaagtgtgaacctttttttggtgaatgataaatgcagggtactggaaagtgcgtgtaaagatgatgaagagcttcgagctgttcttggtgatagcataggaaatcctgagctcatgagaaagaag

SEQ ID NO: 144876 - DNA, 1543 bp, Arabidopsis thaliana landsberg
  unsure (1)..(1543): unsure at all n locations
ggctccgaagaaacaatccacctctacgaccttccctccgcttcttccctcggctctctccttgaccacaatcacgcagcttcaatcaccgctctctccttctacacaccttcttcactctccttccctcgtaatctaatctccgccgccgcagatggctccgttgctatattcgatactgatccttttgttttgcttaagtcgtttcgtcctcataagaaagcggttaatgatttagcgattcatccttcagggaagcttgctttagctgtttatcgtgatgagttctttgcgatgttgaatttagttagaggaaagaggagtttttgttgtaggttaggtcatgaagctagtcttgtgaaatttgatcctagtggtgaaaggttttacatggttgtgagtaataaagttggagttcatcagtctgaagatgctaagcttcttcttgagctcgagaatccgagccgcaagcgtattctctgtgctactcctggagaggttgtgtttcttactctttggaacccacaattgtaactttagtctcttaattggaacatttggcatgttcaaactattgtctgtgagtaactttgagattgttggcttgttgttgagtattggtttactaagctttctctgtgagtaactttgagattcttagcttgttgtgtattggttttgctttgattgctgattaaattgttctagagctgcgtgatttggtttgtctcttttaatgcttagtcctatgttacccatgtgtgcatattgcagaagattccaccttggaaccttaaaagaggttaatttaatactatcaaagtatgcaaccctagactctgattactcttttgggaaaagtgttataatcagataaactaaaggttgcttcttttgctcaactgtgtgttcggtttaagtttataaagcctctgagagttatctcgcttaatagagtttctcttccttattgatgcggtgcttgtgttttatttgtggaaatggtgataaatttgatttagaggatttgttctttggcttacaaatgtttgcttaatttgcaacagagtggaactctgttcacaggtggtgaggatcgggctataacagcttgggatacaaatagtgggaagcttgcatattccatagaagatgctcacccagctcgaannnnnnnnnnnnnnnnnnttaccaggaatgatagtgacggctccttggaagatccatacttgattggttctgcatcgtctgatgggatcatacgtgtttgggacgtgcgaatggcggctaaagaaaatacaaaaccattagccgagacaaatactaaatcaaggcttacttgtcttgccgggtcagctcttaaatgtaagtttatttttcagaatgtgtttttctaaaccatacaaagccaataaacaaactcccacaagttgtgacattatggttgttcatctttctctatgtttattcagctatgagacggccacagattggaaagcaggaacctcagaaggtagacgaagagcatgaggactcagaataa

SEQ ID NO: 144877 - DNA, 1629 bp, Arabidopsis thaliana landsberg
cgttttatgcaaactcactgacaccacgtgagatggaatctcttgttgcgatctgcgataccttcatatcctccatcgacgactctggagtaggacacgtggatgattgtgtcgctggatatttctccgcctccgcttctcagaccggaactcccgaccgcgtaagtgttatatatacaaacatgcattcacatataaaagagatttacatacatgcatgcacatataacatatataagtagatatgcttcccgatttttatatgttacatgctttatcaaaacaaaacctatttgttatatacatgcattttttattatttctagctaaccctttttacaaacaaaagagaatagagcataatttaaatcgtttaggatgatttaaattattaatttggatccatatgcatacgtttgctgagatattattacagttgattttttctttatttttacaagaaataaaataagaatgatttatggacataattttaaaatcacggttttttatttgtaatctttcttgattcagatcgttttagaaaagaaattagtaaacgtaaaacatttctttcttactcaaaggtgattcatatccgacttatacaacgtttaaacaacagtttttacgggttaaactgtctataacttatttagcaaaaagatatttacatatgcatttaaaaatctgcattgcatgcatgtgaatcagtactttccatatctaaaaagagaaacggtactatagatgacaacaaaaaaccagtacattcagtgaaatatagagccgacagatttcaagtacacctacattccatcgtcacgcataccattgatgccataacaagttaattgctaaaaataaatttgttaattccttctcttttggctactatttattcgttccatatatctataattataaatttggtattaatatatcactccgacgaccgattcaattgttctttttttcttgtcataactcattggcaaaaagaaggtaaaaatagattgaaccttacatatcgtgttcactacatcgtgtatgtgtaaattagttgatatgcactattaaaattttcaaagaacgattagatattagtcaattataggaataacgaagaagcgactgcttaaccataatcgtggtttggccgcatatggtctggttggaaatccaaatataattgactcatgaaccaaaaaccgttatgctagatataccagctatgaaaatttgtataggttaaagttaaatagaacgaacatttgttttttgaatacaaatttcattacatttacttaaccgttaaccctgaccgtttgttattgtatcataaattcgtaataacaggtggcgaggttaatgagtgagagacttcaccacccaaagaagtggatactaagagctggattgtggttactctctacttggatcggaagtctagtcttgtgtggttggagaagtttcaccggcgagtttccttacttccggagattctgccggcttccggagaaacggagagaagagatattgctgaattggtcttcaagctatttctcacttcttagaatgttatttaggaccatcaaacttataagtgcccttgtcttcttcactcag

SEQ ID NO: 144878 - DNA, 620 bp, Arabidopsis thaliana landsberg
gaaaaggtttaggaaaaatgtgttgttgatttgagatttctcgaagtgttggtgagcgattagggttctgtattgtgaatctatcgcgtcgttcgtcggagaatgaatttcgttgtacacagattttagactgaacctaagcagaacttgcaggttacagtttcctttcgtcgatcgattgctgaacttgataggttctttgagtgtttctctgcgatatggcgaaccttccgatccttcaatttgaagagaagatcgtggaaacagtggagaagaattcagtggtagttataattggagaaaccggttctgggaagagtactcagctctctcagatacttcatcgacatggttacacaaagtccggcgtcatcgccatcactcagccccgacgtgttgctgccgtttccgttgccaggttattttccgtttgtttcatcatgattcctcatcttgcgtttttgttgattccggtaagatgacagaattgattttaaccgccttttcgggatttggttttcaggcgagtcgcacaggagcttgatgtacctcttggagaagatgttggttatgcgatacgtttcgaggatagaactacgagtaaaacacggattaagtaa

SEQ ID NO: 144879 - DNA, 378 bp, Arabidopsis thaliana landsberg
aatccctaaatttcgaaatctcactctctctcattttcgactttagaaatggcgaccaacgcagatccagctccgacgaagaaaccaaggaacagtagaaaggcgttgaagcagaagaatgagctcgtggagacgccaccatcgcctgtctccgtcaaggggaagtcagcgaagtctttcgagcaagatctgatggagatgcagacaatgttggagaagatgaagatcgagaaggataagacggaggagttacttaaggagaaggatgagattctgagaaagaaggaggaggagctagagaccagagacgctgagcaggagaagctcaaggtggagctgaagaagcttcagaagatgaaggaattcaaacctaacatg

SEQ ID NO: 144880 - DNA, 359 bp, Arabidopsis thaliana landsberg
atggcgaagaagaatgaatcttcttctctcagggtcttgtttggatttgtaattttggttgtaacttggcacaggtacttgaagaggcaaaagagtgtaatttcactgcgcatgcgtgaatcagtactttgaagggatgtgagatcgaaattgtgggattacctcagcaaaaacttgcttattgtgttgccttttttagaagttttagtttcacaatgtgtggatttattagttgtagagcttttcgtatgcttggcacaatggttttttctcagagaacctttttttgttttggagaaatgcatagcagcattaataagtgtattgcatcagaactgaaacaatgttgttactgattc

SEQ ID NO: 144881 - DNA, 1553 bp, Arabidopsis thaliana landsberg
atgggagatccaaaaaatcatatagtagctgttgagctcgatactaaagttgaccaacaattcgaggacaaagatgctaaccatgttggcattgatatcaatactttagtttcagatacagttgctttagcgggttattacatggataacggtacatttcgaagtctcttgcttaacagtggacaacctatgcaaatctggattgagtatgacagtaaacagaaacagattaatgtcacacttcatcctctttatgtccctaagccaaagattccacttctttctcttgaaaaggatctttctccatatttgcttgaacttatgtatgttggattcacttcaactacaggggacctaactgcatctcactatatattgggatggacgttcaagatgaatgggactactccagatatagacccctctcgccttcccaaaattcctcgttatcatcagccatggatccagagtccaaatgggattttgacaatcagtttaactgtatcaggagtcatcatactcattatcttgagtctcagtttatggcttttcctgaagaggaagaagctattggaagttcttgaggactgggaagttcagtttggtcctcataggtttgctttcaaagatctgcatattgctacaaagggtttcaaggatactgaggttcttggtaaacgatgatttgggaaagtctataaaggaactttaccagtgtccaacgtagagatagcggtgaagatggtttctcatgactcaagacaaggaatgagagagtttattgctgagattgcaaccattgggcgtctcaaacatcctaacttagttcggcttcaaggctactgcagacacaaaggtgaactctacttggtgtatgattgtatggccaaaggaagtcttgataagttcctttaccatcaacagactgggaatcttgattggtcacagagattcaagatcatcaaagacgtagcttctggactttattatttgcaccaacaatgggtgcaggtcattatccacagggatattaaaccagccaacatccttcttgacgctaatatgaatgctaaacttggtgactttggtctcgcgaagctctgcgatcatgggactgatcctcagacctctcatgtggcaggtacctttaaatattctacttatttgtattggagacttatagccccaaaaaggaacttctcactcaaaatgttgttacttggaaggtacacttgggtatatttcacctgagctctcaagaacaggaaaggcaagtacaagatcagatgtatttgcgtttggaatagtgatgctagagattgcttgcgggcgaaaacccatattgccacgagcatcgcaaagagagatggtactgactgattgggtgctagagtgttgggagaatgaagatatcatgcaggttcttgatcataagattggtcaggaatatgttgaggagcaagcggcacttgttctgaaacttggcttattctgttctcatccagtagcagccatcagaccaaacatgtctagcgtcattcaattattggaca

SEQ ID NO: 144882 - DNA, 356 bp, Arabidopsis thaliana landsberg
gccctgtgcggtttaatgctcgtatacttctccagcttcttcctgttgtcttcatacttctgctcaacttcatgccttcttctcaaccagtttaccaactctctgcaacttatccttaccagtacaagttcactacgcagaaaggtgtcaattactttgtgaaatcgtctaaattcgagcaggattatccacgagatagcaacgatcgacacacgctggaagaacaagttgagagagattatgtgtctatacttagtcagaattgtaggtatgagatgcagaggaaacaatggggatttgttcgtgaaacgcctcattgtgacatgatgaggagatttgatacagctgctgcttga

SEQ ID NO: 144883 - DNA, 762 bp, Arabidopsis thaliana landsberg
catacgctttgtgcccaggcggtaataccctttttcatagaccaaccaaaaaggcatgcccatatcctcacccttttcccaaggcaagcttccttaacctgcaatatttgtggtgtacttgatgaacttcatttcacctacgtttgtcctatatgcgattttgtcacccatgctgattgtatatatatcccacaaaccataagaatatctcgccaccaccactgtatctctttcacttcttctcttctaaaaggaaaatggtcttgtggagtttgccgtcaagaagttaacaggaagtatggtgcatacacttgcaatgcgtgtaatggctacactgttcacacaagatgtgcattgcgtaatgatatatgggatggaaaagaacttgagggagtacaagaagatgaagaagttgagccgccgttcaaaaggatatcagatggaataatactccatttttctcatggctgtcaaatggaattggagaccagtggagttcacgtcggcggaaacaagttttgtcaggcatgtgctcttccaatcaacgaggaaaacttttatatatgtgtggaatgtgacttcattctacacgaaacatgtgcagaagctccgcaaaagaagtttcatccattacatccccatgcacttcaacaaaaggttgtccatgaaaatgatttattcttatgtgatgcatgtgatcgcttatgtaatggtttcggatatgagtgtccgttccagcattgtgaatacacactagatgta

SEQ ID NO: 144884 - DNA, 1356 bp, Arabidopsis thaliana landsberg
tgactttagagtctccctcaagagcaatcaatggatcagaattcgtacaggagaagatcgtctccgatcagaaccaccaccggcggttcaaagtccgttaatttctccgaactacttcaaatgaagtatctcagctccggtacgatgaagctcacgagaaccttcactacttgcttgatagtcttctctgtactagtagcattctcaatgatctttcaccaacacccatctgattcaaatcggattatgggtttcgccgaagctagagttctcgacgccggagttttcccaaatgttactaacatcagtatgtgttcttccaagtcaaagttttgagctttattactttagatctcgttctttacactacgcatttgcctctgtatgtccatagctcttggtcgatttcaatttgagatctatactcataaaaattgagtctttgtcagtcacaagactactatttttggtttgatgttgttttggtgaaaaagtgctcttttgttttggtctcagcttagactgttacattcgttttttccgagttttttagattttgttctgattctgttttgttttgtagattctgataagcttctcggagggctacttgcttctggttttgatgaagattcttgccttagtaggtaccaatcagttcattaccgtaaaccttcaccttacaagccatcttcttatctcatctctaagcttagaaactacgaaaagcttcacaagcgatgtggtccgggtactgaatcttacaagaaagctctaaaacaacttgatcaagaacatattgatggtgatggtgaatgcaaatatgttgtgtggatttcttttagcggcttagggaacaggatactttctctagcctcggtttttctttacgcgcttttaacggatagagtcttgcttgttgaccgagggaaagacatggatgatctcttttgcgagccgtttctcggtatgtcgtggttgctacctttagatttccctatgactgatcagtttgatggattaaatcaagaatcatctcgttgttatggatatatggtgaagaatcaggtgattgatactgacaaaactttgtctcatctttatcttcatcttgttcatgattatggagatcatgataagatgttcttctgtgaaggagaccaaacattcatcgggaaagtcccttggttgattgttaaaacagacaattactttgttccatctctgtggttaataccgggtttcgatgatgaactaaacaagctatttccacagaaagcgactgtctttcatcacttaggtaggtatctttttcacccaactaaccaagtatggggcttagtcactagatactac

SEQ ID NO: 144885 - DNA, 1324 bp, Arabidopsis thaliana landsberg
atgtacattgccaaaagttcagttaatgagttttgaagtttatccagtactggttttaagggtcactcccacacaggaagattgtactgttgagctgctttcctgcaaggttgaatgatgaagactcccgttctgatttagcagatatatattctattgttttccttttaccgacaaatgttttgaaccactgtcttgcagttggaaggatcagagttattaaagaaccaaagtgaaaggttttcaggtaactttcctcttgtgaagaaaagcacttggtatctaatgtttcaaaagtaatacaagtgttttcccatttctggttcacagcaataatgacaaactgcatgacttggaacatggaacatccagagccatttttggaagttgacgtgagattgaatgtcactctagaggtagtgtattgcagttcagtttctttcattccttcataacttcattctcgtgcaatcctattagccttaagagtatcaaatactgcactgcaccgtgatggttgtctgtgatccatcattgtgtggataggtcatgtcgacttatgattctcatttcggttttgtgtatatgaaaaagctttgtttcctatgttcatcaaaatcccccttgttcatggcagatctcaacgcgaccgttcacaatgcttccagtatcagctgttgaggctcctgggaatctgtaagtgtacattattgttcgttttacatttcttctgcttcttggctcgaagtgcccgagtaatgttatattttgatacgatgattgcagagtaatgcagacactggtcgatacactggttccccttctgcttcagcaattacttaaagattacgacgaatggattaaaaaacagcaacggaactccttaaacgcaacttcttaatctattaccaatgttttgtcaaacggccgaggcaggatttgttgggtcgttttggccgtttgagattacagcgtgtattagagatagctctgaattactgcaaaaagtacaaacaattaaatgaacaaaatagatttgattcacttgtatactttggccttttgagatgaaagagatagctttgtattaaaagtgcaatgaaattactgaaaaagtacaaacataaataaggtcaagagagatttgattcactcgtaaactttagtctttcttgtgacaaaaatacagcacaataagattacataactttttcgtcatcagtcaaaagtctctaatcctaaaggccaacccagtacgaacggccattggtgttatgcatcggagatggagtaggtgaagacaccgaccattcataccaaacct

SEQ ID NO: 144886 - DNA, 472 bp, Arabidopsis thaliana landsberg
atcacgctcctgtctccaatactgataacgaatctgaaggatccttcacaagtaatagaggaaattggtcagccatccagaggcagttgttgcagctagagagacaccaaacaaatcttatgaacatgctccaagagtttattggtggctcacatgacagtatggtgaccttggagggcagagtaaggggtttagaaaggattgttgaagacatggcaagagatctttcgatatcatcaggtcgtagggctaatctcacagctgggtttggcaaatataatagttttgctaactatccaactggaaagtataatggtcgagctccaggggaaagaggctcacaaacagatggagctatgagggggagaatgtggaattctgacatggcagatgactggttcatacctccacatgctgcttccagaaacggacaagccgggccaagaagatcacctcggacagccccatatga

SEQ ID NO: 144887 - DNA, 570 bp, Arabidopsis thaliana landsberg; identical to SEQ ID NO: 8771

SEQ ID NO: 144888 - DNA, 1191 bp, Arabidopsis thaliana landsberg
tccacactccgttcgtccttctcacaagtctgattgcggaaaaagcagagagagagagaaagttcgagcggaagagaagcggaaagctcgaggagtcatcaatggtgacggacgatagcaactcctctggacgaatcgtactcagatttacctttcaatctcctctcttttttttttttttgatttattatctgattttgctcgtatgcgcatgatcattcgcgttttttcagctgattgttcgtgaaatccgtttgagttcatcaaattataatcgctctcttacttttgttcactgttggagttgatggaccttatagaattagtgtttttcctcattgcttttgttttttacacgatttttgttttgatttgggcttctgaatagaagtctcatgtagatgatgatgatgatggtgaagaagaagaagatagactcgagggtttggaaaacagattaagtgagcttaaaaggaaaattcaaggagaaagagttaggtctattaaagtaagagagtttctatacttgatgttctttactaattatactaatgtctaaaaaatttgaaatcatttatccgtttttgattgttttcctgggaatgtaggagaaatttgaggctaatagaaagaaagtggatgctcatgtttctcccttttcatctgctgcatcgagccgagctaccgcagaggataatggaaatagcaatatgctttcttcgagaatgagaatgccactctgcaagttaaatggtttttctcattttgtttgagatagagactatgttcctactaaggatgttatatcagcaagtgtcaagcttcctattgctgagagaataccgccatacactacctggatatttttggacaggcatgcaccttttctagttctcatttttgcgttggtagcatgctattctaaattcagttgaacaatagactagaacatcaaattcagttttcatattatgtgttgtttttcttttctgaaaaaatatcttaaccatgcagaaatcaaagaatggctgaagatcagtctgtggttggtcgaagacaaatctactatgaacaacatggtggtgagacgctaatatgcagcgatagtgaggaagaaccagaacctgaggaggaaaaacgtgaattttccgagggtgaagattccattatatggttagttttgcagagagt

SEQ ID NO: 144889 - DNA, 705 bp, Arabidopsis thaliana landsberg
atggccttacaaaagggtcttttggaagggggaaacagttctttggatagatcggaaatcagagtccatgtaattgggaaagggaatcggagacaactaatgattgaagaaaatggatatgttgaacttgctggaagtaaccaattgtcaaagctttcattaccactagcacgggtctgtctctcaaatggtatatatctgctcaatgagtctctctcgaatgattctaaatcagatcttggatcaatattatccgtggggatgaatgagaccaaagaaggatcatcctctgatcatgaggaaggtaacacgaactcagactcgaaagaggcaaaaggaggaatgagccaagaaataattcaaaactcactctctgcttttgaggatattcgtaatagagaaaagcagttgatgagacaggctctctttgccaatatggcttatgtagaattggagttggagaatcctatcaaagccttgtcagctgctacttcactcttgcaacttgcagattgttcgaagatttatgttttcctaggccatatctatgcagcggaggccctctgcttgctcaatcgacccattgaagctggtgcacatttatccgcctatctactcggacaggatgattttaaactgccatatgcgcaagaagactttgaccagtggtggaagcacacaagttctgattgtgaagagacattg

SEQ ID NO: 144890 - DNA, 926 bp, Arabidopsis thaliana landsberg
gggttcgggacgaacagcacacgagatcaaaaacttttggaactcatgtcttattaagaatctgagaagaaaaggcattgacccaacaacacataaacccttaataacaaacgagcttcaatctcttaacgtcatagatcagaaactgacgtcatcagaagtagtaaagtcaacgggttcgataaacaacctacatgatcagtcaatggtcgtctcatcgcaacaaggtccatggtggttcccggcgaatacaactacgactaatcaaaactctgcgttttgctttagttcaagtaatactacaacggtttcagaccagatcgtatctttaatctcttcaatgtctacgtcatcatctccgacaccaatgacttcaaacttcagtcctgctccaaacaactgggaacaactcaactactgcaacacagtaccaagtcagagcaacagtatctacagtgccttctttggtaatcaatacacagaagctagccaaaccatgaacaataataatccactagtagatcaacatcatcatcatcaagacatgaagtcatgggcatcagagattcttcattacacagaacacaaccaaagctcagaaactgttatagaagcagaagtgaagccagacattgccaactactactggagatcagcatcatcatcgtcgtcaccaaaccaagaagctgcaacattactacatgatgctaacgtggaagtgtacggtaaaaatctacaaaagcttaataacatggtgtttgatcagagcctttagattattaacatgtgttatagagagtttcattttctattcatattcatagacctgagtttattgattgatccatacatttgttatgcttgtgtgtaaagtatgtatatggtttttgatttatgtaaattttctgctagagtaaatttgtttg

SEQ ID NO: 144891 - DNA, 1937 bp, Arabidopsis thaliana landsberg
acgtatatgatgaagttggcataggaggtggtgcttctggtgtttctggaggactcctccatccttattctcctattggtagaagaaattgtcccctttggtgattattgtattgtttcataaagattcttactttatgtaggaaagctactttggcatggtgctgagtgttggagagaatgtttagagctcttaaatgtggctgaaacagctgcttcttctagttaccaagctacggagaacagagactttagcgagagtttcggaaattttatggttcgaagaaggtaccaatctcaataacactaataacttgaaatgttcattcaatgatactttagtttgaccaagttcttcttgctttaggggaatcttgagaccagcaacaaatgccaagactttagatttaatgagtgatgtaagtttgaactcgacttagatacctttgaaatattaactaaacccgtagttttactgtttattacttatgcgattagaatgctcgaaactgtcttgctagttgtgtagtagagactattgacaaagatggtgcacaaaatctcgtccccaatctatacctgcctttgaactgcgccttctattttccaggagctatgaatgttaatccgcaccgatatctccaggttaagacaacacaaatatgttagcaccaagcttttgcgtttttctttaccgagtttttctcccttctctaggcactctttctagcatgccagagctcagcaaaaacatcactgggaaggaaaaacataactttggtgaacaagtctataactgatgtgcttgaacttgaaggtgaatgattttgaactatattcttatatttttgtttaattctggaacttgcgtaagctttatagaaacatcctccaaccacaactagtccttttggatcaagtttcacaggcatgaaaactgatgtgataaacttaaatctagagaccgtaaacacaatttagatagccgttaacaatccaagagtatagtatccatgctttttctctgaggttctcatccgcatggtcagaaatttagtatgaacagcttttgtgttgttatatgtaggaggatatgatgcagtagtaatatgtcttggatccaaggtagactttcttccagggcttactggaaagctccctttaaggacatgccgaggtgtcattactcatatgcagttacacgagagtgccaggtattgcgagaccttgcgcctatagttatccattcctagtattctttttcaactctgatgtcaactttacatcctatttcaattgtacaattcttctctgtttttttttagtgtgagaccttccaaaaaaagaaagtatgtgttgatgtagtcgcatactcgcacattactatgttgagctcagctacttatctttgtggtttttttttcctgtccaaaagcttttctttattaaatcatgcaatgcacaggaagttacccggacgatggaccttcgatcttgtcagatgcctggctcgcggctcagggaccccgtaatctgcacatgggatccacatgcgaatggcaatcatgaaattattcatcggatgtcccagcagaggaagcttcaagagctctcaacgagcttcttccgaaagcaagtgcagtttatccagacatagaaaagtgggaatttgcgggacgaagggcgggcttgagagcaatgccacctgtcacaagccatggatcactgccgctcttgggatgtgttaatcagctcataggtgctggtcagttttgcaacttctgggtattttcagggctcggatcaaggggactactctatcatgcttggcttgggaaactcatgtctaaagctgttttaagttgcaatgaagaattacttccttctgaactaacttcttggaagaaaaacacactatgagagcaccattgtctactt

SEQ ID NO: 144892 - DNA, 838 bp, Arabidopsis thaliana landsberg
agagaatcaatcaactagacaaaaatcggaagaagaaacacaaaccgaggttttagaaacatggcgtctaaggtaatctctgccacaatccgcagaaccctaaccaaaccacacggcactttttcccggtgtcgctacttatcaaccgccgctgctgcgacggaggtgaattacgaggatgaatcgattatgatgaaaggagttcgaatttcaggtagacctctttacttagatatgcaagcgacgactccgattgatcctagagtattcgatgcgatgaatgcttcacagatccatgagtatgggaatcctcactcgcgaacgcatctctacggctgggaagctgagaacgccgtcgagaacgcacgaaaccaggtcgcgaaactgatcgaagcttcaccgaaggagatcgtattcgtgtccggtgcaacggaggcgaacaatatggcggtgaaaggagtgatgcacttttacaaggacacgaagaaacatgtgataactacacagactgagcataagtgtgtgcttgattcgtgtaggcatttgcagcaagaaggatttgaggtaacttatttacctgtgaaaactgatggattggttgatttagagatgttgagagaagctattaggccagacacagggctagtttctattatggctgtgaacaatgagattggtgtggttcaacctatggaggagattggtatgatttgcaaagagcataatgttccgtttcatactgatgctgctcaagctattgggaagatacctgttgatgttaagaagtggaatgttgctttgatgtctatgagtgctcacaagatctatggaccgaaag

SEQ ID NO: 144893 - DNA, 406 bp, Arabidopsis thaliana landsberg
acctgttggtactcttgccgcggttgataatactcagatgaagtcttgaactatgatcaggtaaaactatcgaaaagttttcatggttttatctcaaaacgtttcaaaatgttttttttgcggttgttgtaggtgtttgtgagggattttgtaccgagtgcgttggcgtttctgatgaatggagaaccggatatagtgaagcattttttgcttaagacacttcagctgcaaggttgggagaaacgtgtggatcggtttaagttaggagaaggtgtgatgcctgcaagtttcaaggtgcttcatgatcctatccgtgaaacggataacattgttgcggatttcggtgaaagtgctattggacgtgtggctcctgtagattcagggttctggtggattattcttcttc

SEQ ID NO: 144894 - DNA, 2591 bp, Arabidopsis thaliana landsberg
caagattaaaaaaagaagaaaatgagagaaggatctcatcttatcgtcttgcctttcccaggacaaggtcacataactccaatgtcccagttctgcaaacgcttagcctcaaaaggtcttaagctcactctggtcctcgtctccgacaaaccctctcctccatacaaaacagagcacgactcaatcactgtcttccccatctccaacggcttccaagaaggcgaggaaccattacaagacctagatgattacatggaaagagtagaaaccagcatcaaaaacaccttaccgaagttggttgaagacatgaaactgtcgggaaatccacctagggctatcgtgtacgactccaccatgccatggcttcttgatgtagctcatagttatggattgagcgggtgccgtgtttttcacgcaaccttggcttgtcacagctatttactaccatgttttcaagggttcgttctctgtaccgtctacaaagtacggtcactcgacattagcatctttcccttcgttcccgatgctgactgcaaatgatttgccgtctttcctctgcgaatcgtcctcatacccgaatatactgaggattgtggtggatcagctctcaaacattgatcgagtcgacttagtgttgtgcaacactttcgatacattggaggaaaaggtacagaatatatatccatatagaggaacatgtctctgtcttttgtaggaagtgttttaagttttattttctctgcttgtagttgttgaaatgggtccaaagcttgtggccagtcttgaatattgggccaacggttccatcgatatatttagacaaacgactgtctgaagacaagaactacggttttagcctcttcaatgcgaaagtcgttgaatgcatggagtggctaaactcaaaggagcctaattctgttgtctatttatcattcggaagtttggtgattctaaaagaagatcaaatgttggaactcgctgcgggtctgaaacagagcggacgtttctttctgtgggttgtgagagagacagagacacacaaaattccaagaaactatgtagaggaaatcggtgaaaaaggacttattgtaagctggagtcctcagcttgacgtacttgcacataaatcaatcggttgtttcttgacacactgtggatggaactcgacgttagagggattgagtttgggagttccaatgattggtatgccacattggactgatcaggccacgaatgctaagttcatgcaggatgtgtggaaggttggggtaagggttaaggcagaaggtgatgggtttgtgagaagagaagagattgtgagaactgtgggagaagttatggagggagagaaagggaaagagattagaaagaatgctgagaaatggaaagtgttggctcaagaggcagtttctgaaggaggtagttctgacaagagcatcaatgagtttgtttctatgttttgttgaatgatttaaattgatatgttcaaaagtacatcgtcttttgcaagtccagttgtaattcttgttgttgttgtagtaataactaataatatagtttctcatttgtctacagctctctattccaagttccaaatgataacatgtgagttaaaaatccagggtttaataaaatatccaagccggataaaattttgcataactctataaaaattcatctgatttttttttttttataaatggaatatacactacacacctaaagctactttaaatgtgacggccttatgcagtcaaaggtcatatggtaggttgaattatcatcgatgtctatccccacacatcttggtagccacgtttgacctttttggatagtagtcacaagaaaagtcgtaaaattaaagtcgtcctctaacccaaccttataaatacacacacccacacataacagagtcagagtaagaacgaaagacaaaaaaaaaaaagatgagagaaggatctcatgttattgttttgcctttcccagcacaaggccacataactccaatgtcccaattctgtaaacgcttagcctcaaaaagtcttaagatcactcttgtcctcgtctccgacaagccctctccgccgtacaaaacagagcacgacacaatcactgtcgtccccatctccaatggtttccaagaaggccaggaacgatcagaagacctagatgagtacatggaaagagtagaatccagcatcaaaaaccgcttaccgaagttgatagaagacatgaaactatcgggaaatcctcctagggctcttgtgtacgactccaccatgccgtggcttctggatgtagctcatagttatggtttgagcggtgccgtgtttttcacgcagccttggcttgtctcagctatttactatcatgtattcaagggctcgttctctgtaccgtctacaaagtatggtcactcgacgttagcatctttcccttcgttaccgattctgaatgcgaatgatttgccgtctttcctctgtgaatcttcctcttacccatatattctaaggactgtgatcgatcagctctcaaacattgatcgagttgatatagttttgtgcaacactttcgataaattggaagaaaag

SEQ ID NO: 144895 - DNA, 660 bp, Arabidopsis thaliana landsberg; identical to SEQ ID NO: 79448

SEQ ID NO: 144896 - DNA, 1258 bp, Arabidopsis thaliana landsberg
atgaatcaattgaaaaaggagattgagaggctaagtaaagaaaaggacggactacttaagagcaaagaaaatctcgaagagcaaataggtgcttttaacaagtctacagaatcacttcaaaaggatctgcgggacagacaaaagcaggtagtcttttttatagactggatttcttaaagaaacgggctctttcatatctgataatgtaaatacctgaaatgacactgatagtattcaggtgcaaagtttgaagcaatcctcagagcatcagaggaggaacctcaatgactgtagggctgagatcacttctcttaaaatgcatattgaagggtctcgcgctggtcaatatgtgtcattgaatgaaggtgatcctgtaaaattacaatccaaggaagtcgaggaacagataagcactctgtcagaggaagttgtaaatccaacagtggaaaaggatggtggtttgatttctaaagtttctatatcggctgagaaagggcacatacaaacagaaggcgatatggtggtggaagaggttaagaatattattgctgatcaaagagaggtggcaggagaggccggcaatatatcttatgccaacaatggtacgttggagaaccagaaagaagtctcaaactatttgttaagtccatcaaacggtaatttctcacccagagaccttggaagcatcttgaaagtggatcctggaattggtcgtgattctaactcaaaatcagacaatgcaaatggtgaagctgcttctgaggaaatggcaagtacttcctttgatatcgtgaatgtctgctattttcaccttttcttaatgattttgagtactctacaagctcatcttttgtcatcagaaacatggtagcagccaatgtagctgtctgctttcctttcgctatacttatgctaatgttgtgtccacaaaatgttatatgggatgtttgaattttcctttttttcattcttttacagggtttaggaacgattcagatacttgcagatgctttgccgaatattgttccatatgttctgataaaccatcgagaggtttaaattcttttttctattttaccagctaagacagttgtctaaatattaattatcttgtttctttgactgataggaactccttcccctgatgatgtgtgcaattgagcggcatccagttagcagtacaagagattccttgactcatacactgttcaacctgatcaaacgtccagatgaacagcagaggcggattattatggat

SEQ ID NO: 144897 - DNA, 578 bp, Arabidopsis thaliana landsberg
gacgagcctgctgtagctgctaatgttgtacgtcttcacgaccggacccgcaccaccgccggatctgtaagcgaggaaggcttgagaaccagccatcttagtccccgtagggttaatagcccaagcgacccagccaccgttggcttgagatggagtggcgacgaaagcgacggagagagatgaatttgaggaattgtaggtgtaatggaggtaggaattgagtaccggaaggtcttcgcaactatcgaacggaccggcggagttcaagttctgtgatttgccagcctgttgtgaaatcgccggtgagattagcgagacgaaacaagcaacggctaggattagaagagaagaagaagaagaagccatggctgagttctgttctggtgtggtttggtgtttgataagaggtattttaagacacagggacatgtgatgtttatatagaagggcaatgccctgaagttatggagattgattcagtgcatcgtttctatgacgagagaatcaaggagaccgttgggatgatgccacgtgtcgagttgaccactagctatagaaaagtcacgttcacgatgtga

SEQ ID NO: 144898 - DNA, 486 bp, Arabidopsis thaliana landsberg
agattacataggagaagaagattgatcttgaagttcagttgcaagtaatcacaacaaatattgaattttcaaggcttcatcatcgttcaagttatctcattgttcctccaccaccattaccaaaagctccttcagattcttggttaaagcgtacattaccaacaataccaccaaaaaacaactcattcgcatggttacagtctcttggcactgatgatgataatcactttaccaagactcaagctaatccaaagtgggaaactatggtcaaaacgtccaatacacagcaagggtttgtgtgcttctccaaggtaaaaaaaaaaaaaagaaacgtccaatactttcacaaatgtgtcttaattttcaaagtcaatgcttggcaaaatgtgttaatacttgttgatcctgttttgttctttcaggaaacactaaaccctataccagagtcatagcaagaccaaaacaaaattctcactggtggtaatg

SEQ ID NO: 144899 - DNA, 332 bp, Arabidopsis thaliana landsberg
tacatctgttaaaaaagtttgaattatttaatcataaaatgttatgttcataactttgattatattttctaatgtatttttgctaaaagagtttaaagttaatcacttggagatgaaagttagtaactttagtggatcaatctcttttttcttctttgcaggggatattacagatgtagtagctcaaaaggatgtccggcgaggaagcaggtggagagaagccgtgtggacccttctaagcttatgattacttacgcctgcgaccacaatcaccctttcccttcctcctccgctaacaccaaatcccacctccgctcctccgtcgtcctcaa

SEQ ID NO: 144900 - DNA, 292 bp, Arabidopsis thaliana landsberg
agctgtacatgtggtgatgcggtgttgtactctatgtcctgcttgcaggttacttaccttttgatgattctaatctaatgaatctttataaaaaagtgagcaactcttttttaaaactctctctttcagatggaaatcttccagcaatgcttgttttaggatttttataactccctttcggcatttttgtggtttggtgcagatatcatctggtgaattcaactgtcctccgtggctctcactcggtgccatgaaactcatcactagaatcttagatccgaatccgatgact

SEQ ID NO: 144901 - DNA, 2370 bp, Arabidopsis thaliana landsberg
aggattggatggggcagcagtttgtgttgtgtgtctgttgacaaatgagcccgctcacaataagttatccttccaaacttgcatattcattcccctccatcaatcagtgatcactgaattagtaagaagaatgataaacatgacgattataatttctacaagttgttgtacggtacactattgtagcctaatagttgaggttcaaatctagggggaaaccctttttttttttaaattgaaggagtagatattctcaattgaaaggaggttgtatagtgggtatgccgagtagagttagaaagatttaagatttaaaaggagaaagattaagggagtagaactagagagagaaacaatagaatttggaggtttcgaagagctaataccattcaactaaaagtattacacatgtttaacattaaagccaaaatatctgacttcattacagaaagttactaggcaggaattctagagtcaaacagaaatctgactttactctagttagttactggttgacttaataatttggatatttgagttaaatacttttgttgggaatttggacactggtttaaactgtgtttatctttcattgctcaaagttaaattaggtgttggaggattcagcatgggtgcggcgacatctctatattctgcaacttgttttgctctcggtaaatatggaaatggcaatccataccctatcaatttaagcgcaatcataggcttaagcggctggcttccttgtgcaaagtatgttttcaacttctcctaacgttctcctagtttaatgggataatggtgtcaccttggtgcgtttattattattctcataggacattggctggcaaactagaagaggaacagatcaagaaccgagctgcatcgttgcccattgttgtctgtcatggaaaaggtaattgtgcatattataatacccttactttctgaactgtttcacttctcagtatgtttaatatggtcatctttttggttttgaaccctgctgtaaatgcatttcatattctctaagaaaaatattctcgcgagcaaccggttattcaaattgttccataacaccaattcaagtaaaaagggttacattttaaagattttctcgtctttcatgttctcatattattgattcatgtaactttggtttgcagctgatgatgtggtaccgttcaagtttggggagaaatcttcacaggctttgctttcaaatgggtttaagaaggtgaccttcaaaccttacagtgcacttggtcaccacacaatcccacaggagttggatgagttgtgcgcatggttgacatccacgctcagcctcgaaggttgatacttcctatgatgtagctttctgatgaaaacccttcaactcttgagagtttgattgaattggatgtttcaggatttcacaatgttttcattggaatatttgtgtaagacacattcgtctagtagcaaatcttctcctttggcacgtccaaaaacatactcatcactaatcaaccgttctatggattccaaaattattgccttgatagagacttgttatccatcagagggttacaaaaacttaaattccctttgaataaattgatttaatttaaaataactcagagtaggcgccgacagttgcgcatcactaaagtaaccaattgcaaagtctacacgtgtgtggattatagtctgacacgtgtgaggacgagactcttctgaatcatcgttgctcatttctcactctgtgtgggagcctaaacaatggggagacgaaaccagagatgcttgctctcttcctctcttcttcttcgtatccaactctctctttcctctccagatcagtaactctaaacttagccagaagaacaacactctcagctctcacaatgtcgatgaacctaaagactcatgccttcgcaggcaatcccttgaagtccaaaactccgaaatctaccgatccattctcacccacctccgctttcgaatctctgaaaaccctaattccagtaatccctaatcactcaacaccttcccctgattttaaagtccttccctttagcaagggtcgtccactggtgttctcaagcggtggagatgctaatacgacgccgatttggcatctgggttgggtcagcttggctgattgtaaggttttgttagcaagttgtggggttgatctgaatgaggactcactcgtgtatttaggacccaagttggaagaagatttggtgtattgggctgttgatttggcagaggatggtttcgtttctgaattgggaggtaggaagttgtgttttgttgagcttcgaaccctaatggtagctgctgattgggcggatcaacgtgctatggatgagttggctattg

SEQ ID NO: 144902 - DNA, 913 bp, Arabidopsis thaliana landsberg
tggacacgagacttatatccgaaactcgtttcttggtcaacacataaccgccggtggagacagaggagaaagaagcttttccggcaccgccatcaatttgatgggaaacgataacgccgttactgacaccgttatattctccgccaggatcggagtaatggtatcgggacaagctaacttattgtccggcgtgcattgctataacaaagcaaccggttttggaggaaccgggatttatttgagattacccggtttaactcagaaccggattgtgaattcgtatttggattataccggtatcgtcgcggaagatccggttcagttacagatttcagggacgttttttttgggagatgcgtttattttgttgaaatcgatagccggatatattcgtggggttagtattgttgacaatatgttttccgggtcgggtcatggggtccagattgttcaattggatcagaggaacactgcgtttgatgacgttggccaggtggtcgttgaccgtaacagtgtgaacggaatggtagagaaatcgacggtggctagaggttcggtagatggaaacgggacgtcttggaccgttgattttaacccggttttgttgttcccggatttaatcaaccacgtgcagtacacacttgtggcgagtgaagctggcgtgtttcctctgcacgcgctaaggaacgtttctgataaccgggtggtcgttgagacaaacgctcctgttactgggacagtttatgtaacagtgaatcaaggagtttaatgtcgtgtttttgccgtttaatggttttataattttataaaatgatttatacttgttggtttttatttgtaatttttcctgtaagggggaaatttattttttatacagctaataaatgataaaaactcgaaaattgtgactaca

SEQ ID NO: 144903 - DNA, 191 bp, Arabidopsis thaliana landsberg
gaccttcctctatccagcgatagcgtctcagattctgttcagtgcgagaaacctttagagctgttgacagactctctgatatcacagttttataatgttgatttggaaagagagctgaaaccttgggtacctgatgaagatgttccagactgttcagatctggagaatgtgtttgatgatccttggaagag

SEQ ID NO: 144904 - DNA, 1471 bp, Arabidopsis thaliana landsberg
atgattactcaacgacaccggagagtagagaagataacagatcagacaggcgacgagagacggtttaagcagcgccggatagtgtacggacgtcggaatgcttgatttcgttcggaaagatcataaaatctcaaccgcgaaaggagaaaagagtaatcaggaaaataagaatcaatttatttggtttggatttcgagcgaatgaaatagtttggttatgccgtttaagtgataaaccagagcgaatttagatttgattttaattgaagagacatcagaaaataactgggtctactaaaagcccattaagaaaaatcttatccaatagcaaaagtccatgtgcgtcttcctttcatatggcgaccgccgtcctctccgcagcgtttcgattcccgatagttacccgccgactctctgctccggcgccgcgaattaggttttatcattctacgatccgatttgctcatttccgaagattcacaacggcttctccttcaatgagccagcagactggcgaaatccatgccgtcgtcgatgcttcgtcggcggagaaacccgacgacgtcgtggtgcaatacgttgtgcttcgacgagatctaatcgattcgtggccacttgggagcgttgtaacacaaggatgtcatgcgtcagtggcagcgatctggtcgttcaaagacgatccggtcacgcttcagtactgtgatccgcagcacattgattctatgcataaggttagtcaacatgaccctaattttagagttctctggccggaatcaatggtggattaattaaaacactttattttttggggattaggtgactctggaagttaaaggggaaacgcagatgatgaatttgtcagagaagctgaaattaggaggaatctctcataagctatggatggagcagccggagaatattccgacgtgtattgctacaaagccttatcctaaatcccaagtctcttctttcttcaaaaagctcaagctttgcaagtgatcattcttgttctccaaaatcccaatttcttaaaattctcattttcataatcatgattcatacatatacagagaaatcataaaagagaagacatgttcttttctttttcttacaaacgtttagaaacacgatacacaaagcaagtcagagatttggatatatgtacatatagaaatgatctcgtatgaggtgggatttttgttttcagccatggacgatgagtcgtttgccgcaagtggaacagagatgacgacgtttggatttattagagagaggaacgaagcagaatctccactggctatttacgtcaaccacttgaaccgctcctccgcagtacggacacgctccaggagctgcgtaccttccgatcaccctctcgtcctgatcacacacgaacaccaaacacatccgtcttcttcttctcttctagacaatgaaaacaaatggaaccgttcttagttttttgtttccgc

SEQ ID NO: 144905 - DNA, 1316 bp, Arabidopsis thaliana landsberg
atggcgttgcagtttttttcatgcaaaccaaaatatacattcctctcctctcttcttctacttttgcttctttcttcttcagtagctgagctctctttcaacttctacgccggttcttgtcctggagctgagttaatcgtcagaaacaccgttagatctgcttcttcctctgatccatcagtccttgggaagctcctacgtctcatcttccatgactgcttcgtccaggtacattacattctcacaggactgcctcttccttgcataacaaggcatttccaatttaatgagatttttgttcttgtcattgctgtcttagggttgtgatggctcagtgttgattcgaggaaacggtacagagcgaagcgaccctgggaatgcgtctctaggaggattcgctgttatagaaagcgtcaaaaatatcctcgaaatcttttgtcccggcacagtctcttgtgctgatatacttgttcttgccgcaagagatgcagtagaagctgtaagaacttcatcaaaacacacatacataagaaatgtttatatatctgaataacttaaaccagacttttgcataaaatgctctgtttgtatctttatttttggtttttaaaactctgtttcttgttgttgtgaatactatttttgggacagctcggaggaccggtagttccgataccgacagggaggagagacgggagagtctcaatggcagcaaatgtcagaccaaacatcatagataccgatttcacagttgataagatgatcaatatcttttcctctaaaggcttatctgttcatgatctagttgtcctctcaggtacgttatctttcttgatattcaagaaagagagatctttctttaaaacaaaccttcaattttcgatctattacgggtctcaggagcgcacactattggagctgcgcattgtaacacgttcaacagcaggtttaagcttgatccaaaagggaacttagaactaatagacgcgtctctcgataactcctatgcgcaaacacttgtaaacaagtgttcatcgtcactagatccaacgaccacggtggttgataacgatccagagacatcgtcgacgttcgataatcagtactacaagaatctgttggctcacaagggtttgtttcaaacggattcagctctcatggaagatgatcggacgaggaagattgttgagattcttgcgaatgatcaggagagttttttcgatagatggactgagtcttttttgaagatgagtttgatgggagtgagagttggtgaagaaggtgagattagacgttcttgttctgctgttaattaa

SEQ ID NO: 144906 - DNA, 171 bp, Arabidopsis thaliana landsberg
aaagattttgaagggtgatagagaacgaggagattcatgggacagaacagcgtatgttagcatatggcccgtggtatccaccacggcttcagaatcttcttcgttgtcttcagcatcttgcaactatagcaagattgaagaagacgatgatagaattatcaatctcaaatt

SEQ ID NO: 144907 - DNA, 925 bp, Arabidopsis thaliana landsberg
  unsure (1)..(925): unsure at all n locations
atggcggagcgcaacaacagcattcctcatcggctaacaacacgaacgagacgaagatctattcagtcgaacagcaagcgaaaatcccatagtccgttagattcaccactcgttagcttttatgcacacaaactgttcgataaaatgcgtaaacgagattgtccgtccgaagaagacgaagaaagttttgagagtctctttctccacgtaagagccgaagagagcaaccgagcaaaagacaccgagaattagtcgccacgtccatgacacgtggcaaattccgatggagtcggcgttactgttactaagcgggatcaggcccattaaagcttaggcccatattttcaacgtaactggattaagtaataactttacttctgttcccaaacagtactgcaaaaaatttcaaatcggagaagggataaatcgccgacgactcatttcttctctcacatagtcatactaataccttagtcgtcgtctctggcagagaaaattcggattcgattgagagatggagaactctgtggatctagtaccggctttggttgttttgctcgccgcagctcatgtcatcgccttggtacttctcgtgatcttataattttttttctctttctctttttatatgttctgatctttcgaatggtttatatcttggggctcgcagggttactggatttacagattggccactgatcgtcgagctcagagtcagagaggcaaattccactgaagaaacattcgaatcggttcgtgatctgaactacggtggtccagaaatttcaacagttggtggattttgcttccgatctgatatttgcgattaggtgggggttttgtgatcattgatttagtcgcttatgaggatttcggaaatgtttgcttggaattccgcctaactagacgtgattntgaagatact

SEQ ID NO: 144908 - DNA, 1000 bp, Arabidopsis thaliana landsberg
aacgaatcacaatttataatcaagaaaaacggacaagagagtaagaagagttatgtcgccttcttgttcatcttgtgtcaatgtgttactcatcatgtgccttatgcttctgagtttatcagctgatgcgtacaagaactacactgtgggagagtccacgggatggttcgatattcaagagagaccctctgctaattatcagaaatgggccgattccaaatccttttctttgggtgatttcctcagtaagatttttttcttcaaccccattttcgttactacaataacttagcaaaatgttatatcgtttgttttgttttcaatatgtagtattcaacacagatagcaaccattcggtggttcagacatatgatttcaaaacatacaaagattgtgattacgacaacaatgaaaacaatgatacaacagagtggtcggctgcaaatccttcagcaacatctcctgttcccgtctcaataagtgttcctcttgttaaagaaggttccaattatttcttctcgggaaactatgatggcgaacaatgtaaattcggtcagcattttatgatcaatgtaacacatggtcagggcttaccagattcatcatcaccagatgatgctgctgcacctggacctagcgaatcctctcagtccggtgatgatgaagttgctcctgataccatcgtcccggccaatttcgatcatcctaaagatattgaaagtgctgatgatgataaagaggttcatagtaaaaaaagttcttcttccacaacaaaaactagtttgttttgttttgtctttatggggctctttgcatcattttaatcaaatattctttcatatttgtatgtatatgcattctgttttcttctttttcataactaggataataataatcaaagaaacaaaagagtattagtggaaattttaaagcagtgagggaataaagaaaaaaagagtaaagatcatgagttatccttttttttatcgaatatagtttg

SEQ ID NO: 144909 - DNA, 421 bp, Arabidopsis thaliana landsberg
  unsure (1)..(421): unsure at all n locations
gttcgttggagtcaactgaggagttcattgccatggaattccggtttactctgagagacaatggaatgcaagcggcttttcagctgcttcacatggtgcttgaggtattagattataacaaataagatatagaatgctgtgcaacatttcagactcttgatctattgatttgctggtcaataatgttttcttttacctgcttgttcgttttcctttatttatttttttattttttttctctaatcttttgctgagaaagagtggtggttctctggtatgcagcgtagtgtctggttggaagatgcatttgatcgagcaaggcagctatatctttcgtattttcgatcaattcctaanagcttggagcgtgcgactgctcataacttatgatcgctattgctgacggtgatgagcgttttgt

SEQ ID NO: 144910 - DNA, 407 bp, Arabidopsis thaliana landsberg
gcatgatttcttcaagaaagtgggtcatggaagcactgcgtacacatcgtcaagctcttcttcacaagctacacacaagcctctctttcgaaacggagcttcaaagtccgatatcaggtgggaggacatcatggaagctacacataatctaagcgaggagttcatgattggatcaggaggctctgggaaggtttacaaggcggagcttgaaaatggtgagactgttgcagtgaaaaagattctctggaaggatgatctcatgtcaaacaagagcttcagcagagaagttaagacgcttggaagaatcaggcataggcatctggttaagctaatgggttactgcagcagcaagtcaaaaggattgaatctgttgatatatgagtacatgaagaacggaagcgtctggg

SEQ ID NO: 144911 - DNA, 445 bp, Arabidopsis thaliana landsberg
cgggttgaagaaactggtcaaaggttagcagcgtatgccaaactctttggggtgccatttgagtataaagcaattgctaagaagtgggatgcaattcaacttgaagatcttgatatcgacagggatgagattactgttgttaattgcctgtaccgggctgagaatttgcatgatgagtcagtcaaagtagaaagttgtagagacactgttctcaatttgatcgggaagatcaatcctgatctctttgtctttggcattgtgaatggtgcatacaacgcaccgtttttcgtaacacggtttcgcgaagctctatttcatttctcctcgatttttgacatgcttgagacaattgtgccacgagaagacgaagagaggatgttccttgagatggaggtctttgggagagaggcactgaatgtgattgcttgcgaaggttgggaaagag

SEQ ID NO: 144912 - DNA, 383 bp, Arabidopsis thaliana landsberg
gccttcacgttaacggaaccttttacctcccggggacgctgagacgtgatgctgagttcggtcgtgaaattatatatgacatgtttgtttgtaaatattttatgttttcgattgatgacaaaggagtcaggaaggacacttgaccatcacggaagcgatgacttccgtcggacggtaaaaagtgatggtcgaggtttggtgagaaatctaaaatgtgacggtgtttgcttgataaatatctttattttggtgattgtattgaatgtatcgttttgatttctgtttatacttatatcggcggtggaataattacacatgacctgaaaagtatgcgtttgtgtttacttttatgatgtagtacttgttgtgtttttcagctatga

SEQ ID NO: 144913 - DNA, 2193 bp, Arabidopsis thaliana landsberg
caattgctggtggccaaagactgttgttgcactcgcgttaatctttgcaatccagcgatgtgatcctgcaccattctatctttttgatgagattgatgcagcacttgatccacagtaccgaaccgctgtgggaaacttgattcgtcgtcttgctgatgattatggcacgcagttcatcaccacaactttccgtcccgagcttgtgagagtcgcggataagatatatggagtatttcataagaacagagtgagtattgtgaatgttatctcaaaggatcaggcgttggacttcattgagaaagatcagtcccacgatacctgatcagtcaagtggtttgggtaaactcttctcagtactctctttcgagagcttgcttaaaactttttcagggtttgattctaggaatatatattagtctaatgtgcagttcaggttgtataatttatccaagtatactttgaaataacggttttattgtctcaactcagctatattaatctatggtacatttcgagacttttatgcatttatggaaactaattggtttcttactttttataaccaaaatagggaacataaataaacaaaattaatccaagttttcaaacagaaattgattttttttttattgtacttgtaatattgtttttgtaccatacctgtgaagtaaaccttttcaaatcgaagcaagaaactttttggttgtggttctaaatatatatcatcaacaaaaccaaaaagaggagaaacctgaggctttttttatctttcagaagagaaataccatttttactttagcaacaaccaatttgcagtcatcaagcattaaaccaaacacataacgacccaacataaattatgataagagattcgtcttcccatagaaccaaagcttgcgtatcgatgatgtcgtttacatttagtgctcacacttttaatttcatctttgtttgaacctcaaggctaaagcaatgccttgagcagaggagagacaccagcaacagcattatagttgcatgtgttatgaatttatgatgcagcaagttcattagactataaagcagaacataagtcagtttttctttgttttgcttttatgcaatgccacttcccaagtttttatgtaatgatacatttttgttgtttaacagtggaataagtcatatcttcttttctactattctaaaaaaattccatgaaaatttatgatatccagattccagtggtgttaacttttaacttatgatagtaatcctgatattgagttctggttaatggctataacatgtaaataaacaaaacaaaatgatttctatcaggataaggaatcttcctacggtataggtattagtactataactgacagtatctctagtgtcatgtatttggctacgatatattctaaaccttgtgtttctatatgctcctgtttcagaatgattagaccaagacactggtggcattcttacaaccatgcgcaatcaatgcttcaatggttcatgtctttccaattggccagattcttcttgtccagtaagcttcttttagcattttcttgttgttttgatcttgtgcagtttttttcatgtatctatggggtgttgtttttgttctcaggattgccgatatagccaagcagcgggaaatctctgggcggggtttttgcctgctggaggtatggattgcactctcttgtaatcagcatggagacatgtttccgtctcgtctgttaaaggttaaccagttttgctttgtaattatcgtaggtacaaggaaggacgtgccagaaggcattgggaggagaaagggcatcgctatttacttgagcttgaaacaaagcgtgtttgggattatgctggcgacaaatatgttgaccgtagtccgagcaaggatgattgtggaagctgtgaatattctgacagtagaatggctgatgctctcgttaacacaaaattggacacggtagtccttatgtttcagggtagtcccgtgtaatggtttatatagtaaaacacctactaactctgttatttacacactctcagcttggaaaactaatgacccaaggtgagaaagaaatctcggaggtcaaggttggtactgtcttggctacatctaccaatacctcttcctctgggtctgagaatgccacacgtgcaaataaaaagaagagtaacagaagaaagggttag

SEQ ID NO: 144914 - DNA, 421 bp, Arabidopsis thaliana landsberg
caacaaagactctcacgttattaaaaaaccaccgtctccgtcttcttcctcctccgcggctaagcctcgtcacccggtgatcatttacacacacactccaagaatcatacacactaatcctaaagatttcatggctcttgttcaaaaactcaccggaatgacccactccgacgaagatctcggcggtggtaacgcaatgaccgatcccggggtggtaaaatcaatcaaccgaaccgtctctgaaccaaccgtcgacagaaaaaacaaccgcaatcgctgcggcggcggtaacaattaccttagaaactactccggtgccggaaacggaaaggggatattttttaataacacgatgataagtgaagatagtgaatcgtcgtcggtgataacaattgaggagaacatcggagaacatggacag

SEQ ID NO: 144915 - DNA, 864 bp, Arabidopsis thaliana landsberg
  unsure (1)..(864): unsure at all n locations
tgaaaggatcatgaatcaccgcagacgaccacacggttgagtcagatcaaggaagatttgaagaaagctaatgagcggatatcttcattggagaaggataaagctaaagcacttgatgaactcaaacaagctaaaaaagaagctgaacaagtgactctgaagcttgatgatgctttaaaagctcagaagcatgtagaggagaattctgagattgaaaaatttcaggctgttgaggcagggatcgaggcagttcagaacaatgaagaagaattgaagaaagaacttgagactgttaagaaccaacatgcttcggattctgctgctcttgttgcggttagacaggagcttgagaaaatcaatgaagaattggctgcggcttttgatgctaagagtaaggccttgagccaagcggaggatgctagtaagacggctgagattcatgcagagaaagttgacatcttgtcttcggagttaacgaggttgaaagctttgcttgattcaacccgagagaagactgccatatcggataacgagatggttgccaagctagaagacgagattgtggttttgaaaagagatcttgagtcagcgagaggttttgaggcagaggttaaagaaaaagagannnnnnnnnnnnnnnnnnnnnnnnnnnnnnnnnnnnngaagatggctgagtctaatgcacacagcttgtctaacgagtggcagagcaaagccaaagaactggaggaacagctagaagaagctaacaagttggagaggtctgcttctgtatctttggaatctgtgatgaaacagcttgaaggaagcaatgataaattgcatgacacggaaccccaaatcactgatcttaaggagaaaatt

SEQ ID NO: 144916 - DNA, 565 bp, Arabidopsis thaliana landsberg
atttttagtctcttaaactttcattctttcttcaggcaatcaacaaaagtttgtcgtcgctaggcgatgtcatattcgccttagcaaagaaagaagatcatgtaccattccgaaactcaaagctcacatatcttctccaggtaccaaaccaaacggtaaaaacatctttcaaaacttttgtttcttgatttgtggcatcataataaaaactatgtttgatttttaattcagccttgcttaggcggtgacgcaaagacgctaatgtttgtgaacattgcaccggaatcttcttcaaccggtgagtctctctgctctcttagattcgcagcgagagtgaatgcttgcgagattggaacaccacgtaggcagactaacatcaaaccattggaaaatcggttgagccttggatgagggaaagaaaagagagatggatttgaagtttgaagctaaaagcttcatttcaaagttaattatatgaatgtacttaatatggtcacaacaaaatgaaaaggatgggatgattctaacaagaaaacatgaagaccttttgttgtaatttgtatag

SEQ ID NO: 144917 - DNA, 921 bp, Arabidopsis thaliana landsberg
atgggtaactgtaacgcctgtgtaaggccagactcaaaagaatcaaaaccatctccaaagccgaaaaaaaccaatcgagatcggaaattaaacccattcgccggagatttcaccagatccccagctccaatacgtgttctcaaagatgtaatccctatgagcaatcaaactcagatcagcgacaaatacatcttaggtcgagaattaggtcgaggcgaattcggaatcacttacctctgtactgatcgtgaaacccacgaagctttagcttgcaaatcgatttcaaagcgaaagcttcgaacagctgtcgatatcgaagacgttcgtcgtgaggtagcgattatgtctactttacctgagcatccaaacgtagttaagcttaaggctagttatgaggataacgagaacgtgcatctggttatggagctttgtgaagaaggtgagctttttgatcggattgttgctagaggacattacacggagcgtgctgctgcagctgttgcgagaacgattgctgaggttgtgatgatgtgtcactctaatggagttatgcatcgagatttgaaacctgagaatttcttgtttgctaataaaaaggagaattctccactaaaggctattgattttggcttgtctgtgttcttcaaacctggtaaagattcaatttttagtgtttcttaactcagtggatggttctatttttagactatcctgccatatcttcatgtttatggaagtttgtgtagatatctgagattgggtaaataacgtttctttattgtaggagataagtttacagagattgtaggaagtccgtattatatggctccagaagtgttgaagagagattatggaccaggggttgaaatgtggagagccggagttattatctatatcttgctctgtggtgttcctcggttt

SEQ ID NO: 144918 - DNA, 2680 bp, Arabidopsis thaliana landsberg
tcagtgattatgtgatgctttaatgcagaatcttaagtcccatcattgttgtgcccgttgtttctgttgtgagccttgtcctattccttagaggcttcccactggtaacaatttcaactaaagtattcagctttaacaaattttaactccttcactaagtcattatgtgatctcttcggattttaacagcttgcaaactgtgtggaaatcggtctaccaatgctgattctgttgatcatcacacagcaagtcgggctttttattattttccgcgctatatatggtggtgattgtttagatatgtaatattaaatcttgctactgttcatcttgcagtatcttaaacatgcattctcaaggatttctatgattcttgaaagatatgctttacttgtttgcctggctatcatatgggcttttgctgctatccttactgtttctggtgcttataataatgtttctaccgcaacaaaacaaagttgtcgaacggatcgtgcctttcttatgtcatcagctccctggtaggttgattactatttgacttgattcttcttttcttctaaggtctaaatatctttatactcagtcactcaaactcatctttcaggattagaatcccatatccattccagtgggggactccgatattcaaagcgagtcatgtttttggaatgtttggtgctgcaattgtcgcatctgcagaggttgttattcatcatattagtttctagcttatgttaaatattcttcatgttacatgctacaacttgttcttatgttatgtatatccttattttctttagtctaccggagtatttttcgctgcatctagattagcaggagcaacagcgcctccagcacatgtcgtctctcgtagtatcggtctacaggttttattcccagacactaagaaagttttttttaatcttttcgttttctgttctctctgctaatgttctgaataagtctataagctgttatattttcctttaagggtattggtgtgctccttgaaggaatatttggttccattactggcaataccgcgtccgtgtaagttctaaatatctcttgctatatgtgctactatcctttcagaatttatacaaagaaactaggtatataattcatcttgatgatatatacagggaaaatgtcggtctccttggcctcacacgaatagggagtagacgagtggtgcaggtttcaacgtttttcatgatatttttctccatatttggtttgtctttcaaccctctaatcagtcatcttgactaagtatagaaagtagccgttcatgcgttttaaatccgcgtgttttcaatgatcttcaggaaaatttggcgcgttctttgcgtctattccgcttccaatctttgcaggcatatactgtatactacttggaatcgttggtgagtagcattttgtatatgaacctacactacctgatttcttgtaaaagccggggctgcttatgatacttttgttatgtgattggcccagttgctgttggaatatcgtttatacagtttaccgacactaattcgatgagaaacatgtacgtcattggtgtctctctcttcttaagtctttccatcgctcagtactttcttgccaacacttcaagagcaggatatggaccagttaggacagcaggaggatgggtaagcctttcaaagaaccattgtttgaaacaccattttacggtagtatagggagtgatataatatttctactatatagtgtttctttttcttaaatgtgatgtcgcggtgaattgtggtgcagttcaacgatatacttaatacgatatttgcttcggctccgttggtggcgaccattcttgcgaccatactagataacacgttggaagcaagacatgcaagtgacgacgcaagaggaatcccgtggtggaagcccttccagcacaggaacggagacggcaggaacgatgagttctatagtatgccccttagaatcaacgagttaatgccgacacggttcctttgaagactgcccctgaacgtttcttctgtatttggaaatgtaagatatgattaggtgcataccttgtagcttcattggggaaaaattgagtccagtggatacaaatgaacataggcctttcatggaaaaagctatttttttgcaaactatataacttttgttactagattactttgcctttcatatcattagcataccttttgaacaagtgctttatacctcatatacaaacaatttttgttctttcattgtttcttagagcagctccaatgcaaggttctctcactatatttgtggagttctctgattttttgataaaaaaaataaatgaaaactaaactaaaagaagagaatcgattctctgtagagagtttatggaggctgagagagcctcacacgtggcaagctatgattggtagaaatttataacagaacatagaaaaataaaaatggacgctggagagtttttttctttctctccgtcaaatctatttctcttcttcgcgatacagttgctctgaggcgaaatgcaaattccggtggagtcgagtctccgacatatctgtttgggtcgctatagcaccgtcgaatgaacgaaggagaatcgatggaggagtaaaatctttccgatttggagtgaagtcgatcaaggaagctccaaaatctttccaag

SEQ ID NO: 144919 - DNA, 1665 bp, Arabidopsis thaliana landsberg
atgatccagagtctgatcaaagcaggaaaggaaaacgacaaagtgaagagaattcagatagagaaacacacaaagagagacgtcatcgccatagaaaaagaagacggacacaaaactcagacgaccagaatcctaaggaatcagaggaagtggaagaagagattgagcgttggagaccagtgtgatctcagaacgaaacaaaacaagagatgttcttgtgacttgttctctcatctgtaaatattttagtttgatctacttatatattaaaagagatttttggtaaaaatcgaattgagttttataacagttaaaaaagtataatttggtaatacaccttggcaacataataagaattttaatactagttatgctaaggtaaataaataaaataacaaagtctgtatgtatacatattcttcgcggaacagtttgtcattttagacgagagaaagagaaggtaatcggcctcgatgacgatggcgacgcctttcagtggggctgcgaactctattgtggcggcgaggaccgttctgataacgggagtgagcaaaggtctgggaagagccctagctctcgagctggccaagaggggtcacactgtgataggatgcgctcgtagtcaagagaagctcaccgctcttcaatcggagctttcctcttcgaccaatcatctcctcctcaccgctgatgtggtaattgccgctcttccgactcccgtgcttgatttcttccgtgttctgtgtgaaatttgatgctagttatctgtaattaagaaactttctgggcgctgatgattgataatattttttgttccacaaaaatgtgtgatgtcaaatgaattggaagttgcccaagttttgataaagatagttttattggacttggatgaatcgttgctttcctggtgaatttgttgttcagcaacggcctaatttatttttcatttgagttcggtttttgaagtgaggaagatttatggtcttatgtttgcagaaatcaaacagcagtgtcgaagaaatggcacacacaattgtgaaaaagaagggtgtcccagatatcataggtatatttacatatttcttgacactttgcgtctgagagtcttcaacctttgtctcaagaaaacaactttcaagtctctgccttttgtgcacctgctagttgttttggattgttttgattgttcctcaagtgtttggtagccgttgtaatataggtgctttctttgctctaggtatatattttcattggtagattgaaccctgagatagacgctctaccccatcttcagttgtttctattgttgtcatctaagaattcatttcatttttctcgaggttgatatctgtaaattgtaggtttgatggttacatgatcaacatctcctgcacattctgggcacattgcttctttgcatcgttttactgtaaattttgaactcttagatgttggtatatgcatgttgcagttaacaatgctggtaccatcaataagaacagcaagatttgggaagtctctgctgaagattttgacaatgtcatggatacaaacgttaaaggagttgcaaatgtgctgcgccattttatccctttgatgctcccacgcaagcaaggaattattgtaaatatgtcttctggatggggaagatctggtgctgccctg

SEQ ID NO: 144920 - DNA, 664 bp, Arabidopsis thaliana landsberg
ttctactcttcctgaacaagtaatgctgagcagaaacctgatacccctaagccgcagatagcagttataccaaataatgcaagcacggcaactgcagcagcactgttaccttctcatagtacgaacttttgacttaatataactttaaattttgaactgtacagttattttgcacgtatatgtttgtctctgacgttctctatctcttgtcttcaatcacaatctagaacctagtttgcttggagctcctaggcgggatggcttcactttttctgatggtggaagaccccttatgatgaggcctggtgtagatataaggaaccaaaactttaatcaaccccccattctggctaaaattcctatgcagccaccttcctcgtctatgcattctccgggtggttggttggtagatgatgagaatagaccttcttttcctggtcggccttcaggactttatccaagtcaatttcctcatggaacaccaggttctgctcctgttggtccatttgcacatccatcccacttgaggagtgaagaggttagttttgcgttctaagtgtctctcttttgacatcaaagtatgttgtctacggtctgatagttttcttgcaggtagcaatggatgatgacctgaaaaggcaaaatccttcacgtcaaacaacag

SEQ ID NO: 144921 - DNA, 3891 bp, Arabidopsis thaliana landsberg
atgagagagcggattcgcgattctctgcctcaacgattgtcgtcaccttctccgacgagtgaccgtgacgggaacgagtcgagcatgattaaactcggcgatgtttcaagccgttccgataaaatcgatatggtttctcacagagtcgacgaacagaaacacgatattgacggaattccggcagattctgatctgtacgatgtagagattcaaagagcactgaattttctaataaggaccgacgagaagaagaagagagagacgatgaacgttatacgaaacattatcatcttcaggaagattccggcaaacgttatccggaatcatcgagattcatcacatcgcatgatcatccatcgagattgagcgacgaacctaagccctctagattcatcacatcgcatgatgatgagtattctccatctcatgggaagattaatgtgttgctaaggaacgataaaactaaacgattggaatcgatttctcgtgagtgtagtgattcatctcgtcatagtgaagatggtagagagagagatacttatagatatgaatcatcccctctgtcacaagttgggtctagtgttgctgatttccaagatgaaagctctaggcttgtaagttcagattctagatctttcggttgtgtgaatgattccgatgagagaagaagacatgattatgatgggaatctttgtgtaccacaggttctacgtactagacgtgtcgatgattatgttggtagaaactcaccaagggatcaacaagttagagatttaagtcgtggagaccatgattcaccagttgtgagcaggtgtgtcaaagagatagtggatgaagctcgggataattatcatataggctctgatatagcaatgagagagtttcccagtgttaggcatgaggtcaataatgtggctagagagaatgatctttttatgcagaggagaggatctttatcaaaatcccatgtctgtggttcaaatatagctgatgttgatgcggccgatacccatcttgagtttagcaggaaagagaggatggctgaccattatgagtctgtgaaggaagattatccttttgtggagttgggatcaagagtggtggatgaacgagatgatcactacaggaacttccgtaacgaagaaagaaaggttgtttatttggataacaaatgtcaagtactgagaaaggattatctatatgatggtgttgacagtaagaagaatcttgatttcagtgaaccatatgctgtagtacatcgagatgataaagcttcacagagcataacacgttgcttaaataaagaaagggaagcatatttggataatgagagaaatgctgttttttcagatgataaaagacaggaactgagaaacgagtatcaccctggcaatgatggtaggatacattctgatgtagatatggcagatattgtggtagatcaggatggaagaggagtgcagcttcaacgacgatgcttaaacaaaggaaaggcagcatacttggataatgaaaggaaggatgtttatctgaattacaaaatccaacaactggagaaagattatgactctcgctctgatgctaagatttatcctgatgatgtcaacagattagatattctagcagactgggaacgggaaaattccagaggtctaaggtatagaggagggtccttaaatgatagaagggaagcttacttgcaatgtgaaagccagcaactcctaaatgattatgaaactaactcctatggcataatgcatcccgatgtcaacaaatcagatactctggaagaccgggaagattccagaggtctaaggtatagaggagggtccttgaattataaaaaggaagcatacatgcaatgtgaaagacagagactcctaaatgattatgaaactaactcctatggcatgatgcatcccgatgtcaacaaatcagatactctggaagaccgggaagattccagaggtctaaggtatagaggagtttccttgaattataaaaaggaagcatacatgcaatgtgaaagacagagactcctaaatgattatgaaactaactcctatggcatgatgcatcccgatgtcaacaaatcagatactctggtagaccatgaagatggcagaggtcggaggtatagaggagtgtccttgaatgataaaaaggaagcatacttgcaatgtgaaaaccagcaactcctaaacgattatgaaactgactcttatgtcatgatgcctcctgatgtcaacagatcagatattctagtagaccatgaagatgcaagaggtctaaggtatagaggagtatccttaaatgatcgaaaggaagcatattttcaaagtgaaagccagcaactcctaaaagatcatgaaactaactcttttggcatgatgcatcccagtctcaataaatcagatattcttgtaaacggggaagaagccagagctcttgagcgtagaagaggatccttcgatgatggagaggaatcatacatggattataaaaggggggatgcatatctgcattacgaaagccaacaacttaagaaagatcatgactatggcattgatgacaggatatatcgtgatgtcaactcgtcagatattatagtagaccatggagatgccaaggcgctagagcttaggagagtagccttcattgatagaaatgaagcgtatttggataatgaaagcaaggatgtttatcagcattacaataaacaacaactgaagtactacgactctggcattgatgagaggatgtatcctgctgtcaccaaagcagagattgtggaccgaggaggtgctagagctctagagcgtaaaggaatgtcctcgaatgacggaagggaagcctatttgccctatgaaagccagcaactcctaagagatcatgaaattgattcgtatggggtgatgcatcctgatgtcagtagatcatcagctggcaagcaagatgaggaagctcttcgaggcaggagatatctttttgatgaccgagatcaagtctacttggatgatgagcgtttgcaacgacgtaatggtggtgatgttaaagtttatgccaatatgagatatcaagatggtagacaagaggtttatcattcgaatgattcaattttgcgtacaagagatgattatggtcttagagacaacgcaagtgaggttatgcatgagaatatgccttatgattacaactacagggatgctaagcaatcaagaatgtcttatgagaaggcagatagtaaaaggttccgtgaacatgaagtagcatatgattacagagacaagctagggaactatgcagtggatggaggaataagcagagaacaattccgatactcagctgatgaaaggaattctggtaatgttgatcacacatcaactcgacgccgtcgattatctgcaaaggagcggttaggtgggcgtgttgaagaagattcacgtgttcatgtgaaacatagactgcatcaggttagaaacccaaacctaaaaggtaagtcccataagaggtacctctcctgaggtcatcatttctctcaacattgttgattcctccaaacaagattgagagagaaaagctcctaggttttcaaaggatgggtgtgaaaacgaaggatcctaaagttgtaatctcggctcttttttggtctgaaaaaggttagaaacagattcaaggattgaagttttttggcaatggaggatattatcttggttagtagatatgctttcttttggcgttgaacttgactttaaaatgttgagatttttgtctgtcttttagattgtttggtcggtggtttgtatcgacctatcaatcaagtagacagtggttacgagacgttggtcttttttggtctctggtagtgacattgacatcggagatcaacaa

SEQ ID NO: 144922 - DNA, 2067 bp, Arabidopsis thaliana landsberg
atgaggttaatgcaagatactcattgtgaaaaccagatatggagaattcagcctcttggagagcctttacatcaattcatgaatgctttcactgaccatcgtgactcagagcatctgattgtcaggtatgccaaaactgtttaaaccatggatgggaaaacttagtgtagaattatcacattgttgtttggtttgtataaccattgattatattatgtcttattttatagccacttctcactcttgcttgggtgtgcgcttccgatttggatgtcatctgggttcaatgaccgagccttatctccatttgccggaattctcagcctaggaattggagatacaatggtaagcttaggtctcttccaatgtaacgttactcagaaattcagaatggcttgtgtttgataaacattcttgctttacaggcatcgatggttggtcacaaatatggggtgttgagatggagcaagacaggaagtgagcatatttcttttctttgttttcgaaatatcaacttttgttttcatcggaaactaatatggtcatgagtgttgcggaacagagaaaacggttgaaggaacagcagcgggaataacatcgatgatggcagtgtgctttgttctggtcccaatattagcatcaatgggttatatactaagtcaaggatggtggtcgcttctggtggctgtgacagccaccgggatgttggaagcttacacggcgcagttagacaatgcctttatacctcttgtcttctactcactcctctgcttgtaaattagttaagcctagagtcaacattctacgttttttcacttcatgtacataacaaagtatcttactactaaccatacttcctcttgttaattgccgtatctctttaagagacaaatgtgttttttgatctcaactttttgtttccttcctacgtattattattctctgcaagaaccaatcttctttcctctgtttgacaaaccaatgttaaatacagagatgaacatgctaacaaaatagcagcccatctaaaaataacaaggcccatattggcccaagtacttatcaaacacttttggaatatgaaagaaaacaaacagagcaaacatagctgtagttattgggctttatattggttgggcccaacaagcccatataaatgagggtttttatattacataaaacgtcttcttaggttaaaattcgagctctcttgaagcaaaaagctatccgccgtcgactcgagcttcgttcgtctctctgcaaatatggcgacagcgtatcaaccaatgaaaccaggaaaggctggtttggaagagccactcgagcagattcacaagatcaggattactctctcctccaagaatgtcaagaaccttgagaaaggttttacttcttttcttaatcacctctctaatttctagggaaatgcgttgcactagtcttaggttacattagagtattttgaggctatctgagagatgttccaattattgaatactgaataaatgtttttgctctgttgctgcaaatgatatatgtagtgtgcactgatttggttcgtggagctaaggacaagagacttagagtcaagggaccagtgagaatgcccactaaggttcttaagatcactaccagaaaggctccttgtggtgaaggtatacttctggttctctcatcttttatgtcttcaaaaacactagagcttgagttttgggaaccgttcctaaagtgtcgcggatgtagattttagaacatgtgattgtgctcaatacttcaagtatcttcttcccattggctgagactcttttaacttttggtgttgtaaacaggaaccaatacatgggacagatttgaacttagggtgcacaagcgagtgattgatctcttcagctctcctgatgtggtcaagcaaatcacatccatcaccattgaacctggtgttgaggttgaggtcaccatcgccgactcgtagatcaactctcctacttctgtttttgctctttctcttttaagaaacaaatgttttgttgtactgaaactcaagttcttttgttttcttaattgaat

SEQ ID NO: 144923 - DNA, 456 bp, Arabidopsis thaliana landsberg
tcattgttgtgaacggttggtctttggtaaaaaacaaaaaacagtacaagggagaagaaatagacaaacagattgagttgatggaagatgtttctaataagagagcttaaaaagataaatgttacgtacccgtgtgtttgtttctgttcgagtatccggattaagactaaggtactgattagtattaataactatttggattagtacaaaaagaaaaagagaaaaaaaactatcggattggcttatctatgccacatcagcaatatcacggagaggatcaacggtacacgcgtatcctcatgtacatcacttttttttttccttcagatggtgggctatatatatcgacttcaaaaaaagccttttacaagcagatccactaaagccgaaaagaaaaatgccaaaaggccagacttacaaagtggacacacttttctcatagacagaattcattaa

SEQ ID NO: 144924 - DNA, 512 bp, Arabidopsis thaliana landsberg
gagtctcttctccgccgtcaaaacgctgccatacatgctgaactccaacaccagcgtctcatcgaacagatgtggctctgctctgctcagtcaagattcaagctctcagagaatcgtatcccaaggagagtagttaatgaagaaggcttatttgagaatccgagatacatgagacgcaacaatcctacgtggttgcctccgcaacaagccgcagctcctttgaaacgtccttctgctggaaccggtgtttttcttccccggcgatacccatcggccgccccttccgattccctgaaaacaccaggtacaattactccaagtttgtgtttatttttaatagatcctatgtgtcagaaagattttaacttgttttattttgcgtctctgtaacagtcaacactccagctatgttgcagcctaaagtgaaacctcaaaatctcaactttgatgagttcaccaatattgttgggccaaggcgtagccagttcgattacggtgagtgtctatattac

SEQ ID NO: 144925 - DNA, 1301 bp, Arabidopsis thaliana landsberg
cgctcgttcgtcttcgtcgcccattgaagatgtcagaccagaagtcgcacgcgagccttataattgtgtaatccttagggttttgctcgcgatttctggtactattaggtttccgtcgatttcttcgtcggataaaaaccctcttcttcgccggagggagaacacggcgagaattacacagctatccttcgaattccgtcgctggttagcttaggactttctgattctgtcgctttaatcttcttctctccatgacacaacgggtattccaagtctggaaaggaagcaatgtaagtccttttttcatcgaatgattgagcctggaattttattggttttttgtgtgttttctctttgttgggagatgaatattctctgaattctgttctctggtatgaatatgatttggaattcgttttttctcgagtttcacctgtgtagcataatcttagttacgcaattggtttactttggtacgtgtaaactaatgttgttgagctgaatcgttgaagtatctcttgattcactctcaaagcatgaccatgcatttttgcataaccttgtatcaagttgaatgttccttgtaatttattaacaattggaagtatcttcaatgcttgactcttcacatgttttaaattcagtatggtgataccaataaatggtccctctctcttttgcagaaattcatcctgggtgggagattgatatttggaccagatgctaggtcactgcctcttaccttgctattgatcatagttccggttgttttgttctgtgtatttgtagcaaggcaccttcgccatgagttctctccctacaatgcgggatatgctatcatggtggtagcaattcttttcactatttatgtaagtcttctccgatacccaatctgatagtcctatatatctcattgttgtaaatatttgatttctgattttatgtttgtttcctgtttgcttactgcctaatcgggtaatcaacaacatttatcagctatttcattgtttgtttcttacccggcttagaagcttaaaccctgtcctcctgttctgtcacttgttgtgtggcattcaggcgttgttattttttgcttttctgaatcacgaatttgggtttgataggtattgatcctcctcttcttcacatctgcacgagatcctggtattgttcctcgaaattcgcatccaccagaggaagacctacgttatgagacaactgtatcagctgatggaagacaaacaccgagtgttcaaattcccaggacgaaagaagtcattgttaatggcgtttctgttaga

SEQ ID NO: 144926 - DNA, 1359 bp, Arabidopsis thaliana landsberg
atgatttacgacactggattccatatcattcttgatacgcaagtttttactgatttttgcaatacatatatcaatgtgagaaggtaaaaatatcactattgtgttggtagactttgtagtaaacaaaatggtctctctgtgtagacgaagatgacaaagaaaacatgtgcccatctcatcctcagggctttctctgtctcaatgaaatcacatgtgctgaccttttgtagtctttagaaatttgacattttgttaccattatgggaccattcctcaacaatttcaagatcctaaactgataatacacattcataataacatggtctattctttttttttttgccaacttaaatgtgtctttttaagattcttttaacttttttttgggtcaaaatctttttacttattttctatttattgatccattttttagtttgtcaatttattacccaaaattgataatacacatccctactaacatgtgtcttcttaaaaaaacaatttcactaaaatcatattaatttttggggtaaaataatatgtcctaattatttcttctttattatttcatttatatattttttcttatttttaagatatttgttacctattttctatttctgtttttggtctaacaatttgttacctattttgttttcattttattacatcaaagatccaaagtacacataagatacgtccaacatatgtttcatcgtgttatgttttttttttcttctttacttccaaaaatttcattacaattatacggacaggcacaaactcaatctctatccacaaagctctgatcaaagaagtctcagaaaccaattcatgggatttcaatggtgaattctctcctccttcttctcttaatccttctccgatcaccaatcaccggcctccaccttctcctcatctttcttcactctcttttataactctctgttccttcagaattttccccaatcttcttcttcaaattgaagtagatctagtgatctctttaatggcgtcagtgttcttgtatcatgtggtgggagatttaactgtaggaaagccagagatggttgagttctacgaaacagagacggtggaatctgcgattagagctatcggagaatcgacggagtgtgggattccggtttggaggaagagaacgacaccttcgcttcctgggtttgttgagaatggtgagatgagacaacaaagattcgttgggattttgaattctttagatatcgttgcgtttttggctaagactgagtgtttgcaagaagaaaaagctatgaagattcctgtctctgaggttgtttctcctgacaatactctattgaaacaggttgatcctgggactag

SEQ ID NO: 144927 - DNA, 448 bp, Arabidopsis thaliana landsberg
caccattttaaaagccataaggacggtgatgacacaactcccacaaatccaccatccgatttgataatcccaaataagaattatgaggtttgttcagtgatccctaagacatcaacacctggaacttatgttgttggtaagaacactacctccctcactcaactcaagtgcttattccactatctcttcagtgcctcaaatttccacacaattttccgctatataaaccaaacattcactaattgaattcaaacacacaactaacaaacaaaaaaacacaaatcttggttcatttaaaatctctccaagaaacaaaatggcagcttccatgaaatttctctgcattcttggtctgattctcctcatcggaacagaagttaacggtgcaggggagtgtggtagatcttcgccagacaatgaggcgatgaagctggctccatgtgctggt

SEQ ID NO: 144928 - DNA, 1148 bp, Arabidopsis thaliana landsberg
ccagaagaactctctgtgaagaagaagaagaagaaagatggagaagaaatctcagatttcgtcaacggaagctgttttccttggagctctagctccaggcgttaatgtctgtactaatttctcttcgaattcttgttacctctttgtggatgtttggttaaaaccctaatttggatcgtgattttgtccagggtccaacatggaacacattgagattcgcgtttctgctactgggtctatgtctagctttcatgctctctgtagctttcaccagtggccaatcaatgttgcttgttcatgttggctttctcattgttatcgcatctactctctttatcctcctcaattggtatgtcaatttttgcttctcttatctcaattttgtttgagctttttctgtgttgattcctgttgaaacttttcgttactttctagggttttagacgaataagtaattagatctggtactaaactttctccagtgtcttattgtgttgttgatcaatccttgagttgttcaatttaaggattcgaacatatttctctacattgctgttatcttgaagctgaaggtgttcctgttgcattgttttaatgagttattcttcatcatgatctttgtgctattgagttagatatcagataagggttctcagttctcatagttttgtatttccttagaaaatatcacatctttgtgttatcttactgttacctgtctgttctctaaggtttctaagattctaatagggttttacttatgcatcttgaagagtatattaagtattaaccttcactagatgcttagttgcttacaatgcctattcttctgtaggtttcttgctcagacaggcttagtacaagtggaaacacaaatgcaggagctgaatttgttaccgaatgataaaaccaaatgatcatggtcacaccggtagaagcagacgcttgtgtaacagaacaacagttaacaacagatatatcaagcaaatatgaggactggattggtacaacaagaagatccagtttctattgttggtacatagcatttactttctcattactcttccttagttctcctgtcttttgttggtttctttctttgatttgagaagacagccttcatcgtgatcaggatttgatttgctcaa

SEQ ID NO: 144929 - DNA, 1146 bp, Arabidopsis thaliana landsberg
tgagaagagaacgaaggaagaagaagaagaggaacgatggggtacgtgtttagagtacgattggcttctttcttcgccggagctgcgactgcgtcttttatcggactctccgttctctacaaggattacaaagtcgctcacgaatcgatttctcagcaggtaatccatcgatttctaattttgtttctcttatcggatccatttctttcgattatctattgcgaacaagctctgtcaccgtagattttgttttcgagtagctgaatcgatacatttcgttagcagatgttgttaagaatggaattttgttgatctgtagaccatttctagggttctcgttgtcatctctgtgattctccgattgagattcatatgcaatcatggtggaagaaagtttcacacaattttgatgtttataataggaattagggtttctggtttaagtttgccattttagctactggtaagattctgttctggagttagagtttcataagttccaccatgacgttaatgcttcattagcattactatgaattagttttattttgtgattcatgagatgccaaagttgataatacgagaacgccttcaaacgtttggtattgatgaatgaatactgatagagttgatgcacatagatgtcatcattgtgaatatccatggttgccatttctctgtagctttgatggtaatgattatactgcaattgcatgattaaagatatgctttagaattagtttttttgagaaccttgagatgccaaagttttaacatgagaatgctgccaaacattatgttggttgaattgagtgttagctttgtgaagaaccgtagcagcattttctatgtagctttaaacgtataggatactgacattggcattgactgttagatttgatctctctttttctacaggcgaagtcttttcatgactctctggatagaaggatctctactcttgaaagcttgagacaaagtgaagctcctcagcttgctgagacaactgaatagtaatctgtctcgacattgaacactctctgcttggcaatgatgttttgagttgagatgctcttttttcggttttatgaataacttggaagttcttgtatgactctactgttataaaacaatgaagtttaaggt

SEQ ID NO: 144930 - DNA, 769 bp, Arabidopsis thaliana landsberg
atgtcttacggtgactatggtgaagaagatgagtatgctgtggtaaatgtttgaattttcgttttttcttttcttctaatgagtctacttacgttgtcacaactaaaaggtcttttttaaaaattattctagggatctcctggtgatgattatggttatcctgaatcatctccactatcaaatagtttgttagacccagagtctttgatctatgaagacgacgaaaactattccgaacaatatgactttgaaatggaggcggagcctgataattactccatgtatcaagaccttttcgatggtaaggatatcccaactggtgtggaggtttcaatggattggtttccaaattcagctgacaaggaatcagcgagtagtagcaaatcgtctcatgctaataacgggaataacagttccaagaaagcaacaaaagcaagtggaatccattctcaattttcttcagatatggaaacccctgtagctcaaccatggaatgctttaccgcacaaagctgaaggagtcataccaaactctgcttatgccttgccacagaacagcaaggcttttcaaccaccttacgctgtccactattcagcccttaaaactgctttttccaattatcttcagcctcagactcctgataccgtattgggggaggctccagctcctgctgcaggttcttctggtttattgccaccaaacacacccggttttaaaagtaatgctgctcggtttaaagaggagccgcctatattacctccggatgatt

SEQ ID NO: 144931 - DNA, 785 bp, Arabidopsis thaliana landsberg
atgccgaaattagtgttccttgccctaaaccttggagggctagctttgggtgtctggaaggtaagaaacttttttttcgtttcctcattgtatcctctttcctttttccgtatggcaacactggcttagattacaagtgtaaagaactgtttccttatacaaacgattttcactttctcagcttaacactttggggcttcttccaacacatgcatcagattgggtttcatctctaccccctcctcaggttggtattttctgtctgaagctaaatcttaggcctatgtgttttaaatacatccgtgaaagcaagaatctggcattttgacgaatcatctctaagctgcacatcttgtttcctcctcttactttttcaggaagttgattactcgggcggaggatttgttttccactgatgaatcagcgtctcttgtattttaaaataatccgctaaaaccgcgcgacaacgacaacacttttgtgagataactgcaacagttacttaagtgatatgaacctccctcatcttatgatattcttgtagcattttcaaaactcagaaaccatagtttttacactttttagtatgatgctcattgttcatcataactatgaatgtattattggcactgaagggaccttatctcccagctttttgtttctcatctttttagacaggaatggataaaatatttcagataaaagctttactctctttattgcttccactcaatgattctgagttaacaatcaatcaatgcttgatatcattttgccatgactga

SEQ ID NO: 144932 - DNA, 1868 bp, Arabidopsis thaliana landsberg
atcgaaaagattttttttttttttttattaaaaaaagttagcaactccacccaaatttaaggtgcggataagctgatatgacacagagagaggctctatgatataagtaagtaacacacgagagaattatcttcttcttccatttttattggaccaaaaagaagatagataacaaaaatagaaaaatctaaggtgtgggaagctctgcagctcatccatccatggcgacgacgattcccactacagctaccgcaactatgtgtccgtctcctcctgtccctacaatctctcccttactcagaacgactcaccaatgtcaaccatctccttctttatcatccccgttttctataaagcttagtacggctctggtttgcggtgacactacagtggatagagtggttgatagctccgtgatgatcaaacctgagaaatggggaattcagtcagaaaagagaaggaagaggagaagaagaagaagagtaggttacgaacgtttggagcctgaagaagaggaaaatgctggcgtagaagcagaagcagagacaattagtgttcctgttgttggagcttcacgatctgggtttttgagtcgtttagaggaggttcagctttgcttgtacctcaaggtatatcatttctttcttatccaatatctctcatggcccattaatggaaagattcaaacattgtgtatccttgttggtaataataccttcgctggtaattaataggaaggagcaaaacttgaaaatttgggaacaagtgttgaagagaatgaaatggtatcggttttgttagccagtggcagagggaagaagaagcgtagtgcaaatgaaatactatgccgtagaaaagaagcgagagaaaagattactcgttgttaccgtaggttggttgtttctattgcaacagggtaccaaggcaaaggtttgaatttgcaagaccttattcaggaaggaagcatagggctgcttcgtggagctgagagatttgatcccgaccgaggatacaaactatcaacttatgtctactggtggatcaaacaggccatcttaagggctatagcgcataaatctagacttgtcaaattgccggtgagcctccaattcttacagtttgagatgaatatgtgttacattgtatagttgctaccatatatagatgttaactatatgtgaaccaagtcatcttatattgttacatagaaaaataaaatgcaatgttgttctgggaagtgaagtaattagtgaatacatcgttttagcttgttgtgtgtaaggaagcatgtgggagttgacggcaatagttgcagaagctagtaatgtgttgaccagaaacctaagacggcaaccaagctgtgaagagattgcagaacacctaaacctcaatgtatccgcggttagactagctgtggagcgtagcagatcccctgtttcgttggaccgagttgcgtctcaaaatggccgcatgactttgcaggtacttgaaatttccatgaacatagaaagttaagagagactttggactgatttatcatattcaggaaattgtacggggaccagatgaaacaaggccagaggagatggtgaaaagggaacacatgaagcatgagattgagcaacttttaggaagtctcaccgctagagaatctcgtgtattgggactttactttgggctcaacggagagactcctatgtcgtttgaagagataggtaagtcgctgaagctttcgagagagagggtgaggcaaatcaatggcattgctttgaagaagctacggaatgtacataatgtgaatgatttgaaaatatactattcctctagtgaataaaaaagcaaataaattggttcttcatactcattaa

SEQ ID NO: 144933 - DNA, 352 bp, Arabidopsis thaliana landsberg
actcacttctctctctctctctccgcctccttttaagaccaaatctctctctacctctatctctctctccgccattaccagagctcaacgagctctcactttctttacgcacacttgttggaacgaaatatattcatagagaagaagaatctcgaaactcttgaatctaaaacaactcggagactctgttttccctttccggagatcagatcggatcaagatgcagacaaccaacggctcagattcgacgttggcaacttccggagccacaccgccgaatcaacaaacccctcctccacctcagcagtggcagcagcagcaacagcaacagcaacagtggatggctgccatg

SEQ ID NO: 144934 - DNA, 1063 bp, Arabidopsis thaliana landsberg
actgatcgctgccccggtttgttcttctacaatgagatgttgcatgttttctatcgcctcaggctctgcgattataagaacgctcagcatcatgtcgaccgcttggaccaggcaatgaatgctcattcgcataaaatgcaggagattcagcaacttctggatgagctcagttcgttaaatcttagtctctcccgttacgaccttccctccagagaaagatcggccctctcagcaagacaatctcagcttcaagatcgtgtaaacgcattatctccatcttctaccactgttaactctctggagcccgcatactttggcaacatagatcgtggatggacagagaagctactgctttcaccatctccaattgatggagaatggctaccaaaaagtgccatcgatgctttggtccatcttatggttgtcatatcgggacgtccaaagggactctttaaagagtgttcaaaacgtatcgagtctggactgcagatcattcaaggttgttctgttatccttagcagctgaaattcctgtttttttcttaattcacttcctactattgcattttgtctgcactagatactctcttctctttactttcgtttcactgaaatcaccagaaaacccactttacctcagattcgaatcagtgtagtaagtgattcattctcttagaatgtggcttctatgaggaaattagccacctgcttcttaggaacgcaactacaaaacttaggggattccatttctcggcatgacatgtgtgtttgctatgttttatgcagatgaactgatcaagcttggaattactgacgaagttagaggttcaatctacttctctgttgtaactacacttagttgaagcaacggttcttaatgttgaatctcacattttctttcttcatgttcctctcttacggcagaggctgatttgcggcacacagctatctggatgtctagggtttttcttatgctacagatgcagtttcttgagaatagagtggctttggaacttacaaggtctgattatgtcgaagctgaagaggtaaatcatcggttcttt

SEQ ID NO: 144935 - DNA, 425 bp, Arabidopsis thaliana landsberg
ctcagccgcagccgactcagaacttaggactaagtatgccggactccaatctcgggatgttagccgctttgaactcggcttattcaagaggcggaaacgcaaacgcgaatgcggaacaagcgaacaatgcggtggagcatcaagaaaagcagcaacagagtgatcatgatgatgatagtagagaggagaactcaaatagctctgagtgagtgatgtaaactaatcttgtgaaatcattgaatttggtaagaaattgatttaaagcgtttgtagcggtttggttgattgttttattgtgagattttgtgtgttgttgtttagtagtgtttagacaagaacaatttatgtgtgaaggaattgttaggtttgggtccaaatggactctcatgggtagagaatgttttcaatgtatagaaggaatgata

SEQ ID NO: 144936 - DNA, 3964 bp, Arabidopsis thaliana landsberg
atgaaaagattgaacgtacagcttgatgatgaatgggaaataactctctccatgttagaaagtaggatttgctcgaaccttggattatatgaaagtaaggttaaattgcaaatgaagtacaatgcagtgatgttgggaccaactcaagagatacacattagtgatgatgaggatgtcggtgtctatatattttcaggtgaaatggttagtagatatcctttgactgttgacgtcatcactccaccagaattggccgagaaactgtcgagagtggaggtcatcaataaaagttctcttggtaagaactatgctgatttgggttcaaatgaagatgaaatgagagataatgcaaccattgtgataggtgatatgtctaaaatttgcatgttttcagtgtccattcatcatcgttttgagtccagtttcgtatcattcatcactgttttatatcatttcttatctttcttgcgtactttgcatgattaggatagctttgcatacatattgcatttctcagttgttttcaggtgatttggagctgtttgcgagcaaattggaagaaacgagccagaactagaagacatactcgaccaccaggtcgtgtgcatccaacaccatacccgacccccaagtcgagtaactttggagcctttcttcccacctagtcgaccccctggtcgagtatcctcagctcaggccactcgatgacgccactcgaccccctggtcgagtatcacttcgccacaccacctgaccacactcgaccattcactctaccaagttacttgactccctggtcgagtatcatcactcaccaccatcaccatcactcgaccggacactcgatcacgtcttcacactctacttaaatccgcactcaaccagacaagatgagcacaaggaagagaagaagagaagacaaagtgtttggaagcagcctggacctccatcggatcacgaagcccatctctgcccattatcattctatgggccgggcgattaggttattggcccgtctactatcattttatttcgtttggtataaatagatgccttagggttctgtcctgagacatctagtcgaaattgagtttttgcttcagttttattttctgttttactctgttgcgccgctttttctcctgcaacctgtaattcgagatttttccaagttattcagattccgcatttgatttcatctgtcatcttgtttctctactctttatctctttacttatgcaatattatcagttaatcgcgtttatgtctttgagcatgttgtctgagtaatgacttagaattcttagggatgggatagagtagttgtggaatccgtagtctatagaacggttaagttttagaattgattgaatcccttcaggactagttgcttttactgcttatttctttctgatcaactggaattcgatcccaagcattctcgcacccagaaggtgttcgatggaatgcttgatctactagttcatgagatatttgtctctatcccaagggattggccgtttagagcatttattgactttatcagtccgttcttgttgcctgcatagttagattccgttaatgggaattggtctgggctagctttgcttgaggatttctatcacgggagtgaattgatctgttgttgaacctgttgtgtagggatagcttgattgcgcttgttaaccattcgaataggctaggataccactctactcgattaccccatccttaggaatttctcgtctatattatttctctgttttatcgttatcgcttaatcgttctcattgtctgtttcttagtttttgcaattactcgaccaacttactcgaccacacccagtgtctggcaacagactgtgcagtcaagtacagttgtctcatttcctatctgttactcgaccagtatactcgaccacacccagtgtctggcaacagactgtgcagtcgagtataactgtttcacatcctgcctgttactcgaccacatcctacttctggcatcagcctgttgtggtcgagtgattttagtgattctattattgtttctgttttctgcatgttcgcttaggactgttagaaaccccaaaactgttattgcttggcttgacttagtgacttctgatcacatctcatctgtttgcatcacactcatttggattgacaaccttcagtactacaacgacatgatagtgctttaggttcaattgactgaaaaacctattatcatgtggtatcagagcacactccgaaagttgagttctctatctctatcattttgtgtcttttcatcttcagatatgtgtccgtctgtcaccttgatttaatttacataattatttggtgcgtgctaaaatttcgaaaataactgtcacgggttcgaaaaagaatctaatattttgtaaaattgtttctgaaatatttgggaacgttttgataatttttagcatctgaacaagtgaaactgtcgtaattagggttctagggcatcaaaacggttatttcgtgtttgtttcaaaagaactagttactggtgttgttttgttgtctctattgcagaaaggatggctgaatctgaggaggaagagactagcaacaatcgaaacaacaaacttttggtagaagcctttgagaaaatgatggacaccaaactgaatgcttttcgccaagagtttcatgagaaactagagttggggcagactcgtcctggagaacaaatgagagttaatgagccgcttgagcaaagagatgaagctacagatcagtactatgggcataggagcacttcatctcacaatagtcaaaggagacaccatagacgtgctagagaacgtagagatcttttgcaagacaatcttggaggtcttaagcttaaaattccaccattccatggaaagaatgatccagatgcttatttggaatgggaaaagaagattgaattagttttcaaccttcaacactacaccgagatcaatagggtaagagttgctgctactgaattttatgactatgctttgagttggtgggatcagctagttacttcacgaagacgtaatcaagaaatttcattggaatcttggtctgaaatgaaagctaatatgaggaagaggttcgtccctagtcactaccaccgtgagctgcatttcaagttgaggaatcttacacaagggaaccgttctgtcgaagagtactacaaggaaatggagactttgatgttgcgggctgataattctgaggatagagaagcaactatgtcaaggtttcttggggatttaaacagagatattcaagacagattggagactcaatactatgttgaaatagaagagatgttgcacaaggcgattttgtttgaacaacaagttaagaggaagagttcatcacgatctagttatggttcaggaaccgttgctaagcctacttaccaaagagaagagagaaccagcagctataagccgattctcagttcaagggctgaaagtaaaccatatgctgcagttcaagatcacaaaggaaagactgaaatttctacatctagagtttgtgatgttaggtgttacaaatgtcaaaggaaaggactgataataggtttttaatcaattaaacctaaagcactatcatctcgttgtagtactgaaggttgtcaatccaaatgggtgtgatgctaacaatcaagatgtgatcagaagtcactaagtcaagccaagcaataacaggttttggttagttctagcagtcctaagtgaacatgcaaaaaacagaaaatcaaacagaaacagtaaaacactcgaccaacacagccctttgcagagcactgggtgaggtcgagtgacaggtcgagtaacagacataaaatgaaacacagatactcgactgcacagtctgttgctagacaactaggtggtcgagtacaagaaagaactgcagaaatgaagcgacagataacaagatgcagtaaataa

SEQ ID NO: 144937 - DNA, 508 bp, Arabidopsis thaliana landsberg
atgcagccgcaaaacactggaaggggttatcctccttatggtggttctgggtatggtactggttatggttatggaagcaatggtgtaggttatgggggttttggtgggtatggcaatccagctggtgcgccttatgggaatcctagtgtccctggagctgggtttggaagtggtccaagaagttcatggggcgctcaagcaccatcgggttatgggaatgtgggatatggaaatgcagctccgtggggtggttctggtggtcctggttcagcagtaatgggtcaagctggtgcatctgcaggttatggcagtcaaggttatggctatggtggaaatgattcctcttacgggactccatctgcctatggtgcagtaggggggcgatctgggaatatgcctaacaaccatggtggcggtggctatgcggatgctttagatggctctggaggctatgggaatcaccaagggaacaacgggcaagctggttatggtggaggttatggaagtg

SEQ ID NO: 144938 - DNA, 757 bp, Arabidopsis thaliana landsberg
catacgtacaagcaagcgttgcatcattacacaaggattccgaagcaaagctccggtatttcgaggagttcattatctttatctaccagatcatctgtgaatgcctccagcatttctgctattaatgagaacgaggtaaataactgtgttgcagtttccagaaagtgatgtggtttggtttaatttcattggagttcatgtgcatcttctttttctaactttccttttaggtgagattcaagattgcttcatctcactttgctcttaatgaaacaaaagctgcgattgctgaggtatgagtgtcatctgtttgtctggttttcaagatttatttagtcttctggatttgttggtctagaaactttggtatatagaaaataaaatatgtgtgtatgagacggtaaaagagctgtctagggatttctctatttctaagattatagattggttttgtataggatgacttttatgtcttgctattgtattttataaccagagttaagtaactgtaatttcagtgaaacattcttgggccgtaactaatgcattgttatagtattcctgaatgtgagttgaattttgttgcgttgacctgctcccatcaatgcaaatccatattacaaaacaagtaaactaattggattccttccaacactgcatgtaggtattagggatgataaagccatggtctgcttagctataatctatttttgcacttgttatttctttgccagatggaatctgtcgagactgagag

SEQ ID NO: 144939 - DNA, 1035 bp, Arabidopsis thaliana landsberg
atgcaggactacttagagctattcactggaattggtgaccaaggcgctccagttagtgtcctactgtccttgagcataatgtgagttttcttactgtcctcttgagttcttatcttcgaagcttgaattgtatgtattctaaaagacctcaagcattgacaaaagcaagtatatgttagccctttaaagatattagaatgatttttcatgttctagttttgttttcctggctagaaaaaacattgttgcaactggtgaagaactctctcagcatatgcagactcaaaaatgttgtatttgcatatctgttgggttcaacatacgaatttgatggctaggttagttacataggtcattctcagaatgttgcattcatatttagttttatggttgccatttatttgacatcagtctctctattgtgacactaatgggcttggagtttcttgagttgtcatgaattttctttatcagtcaataaggtagtagtaggtaatactgatattaagcacaatcttcatgactcagccgcttagtacatgcttttgagtgtttattctgaatccaaatgatctttctcaagttcaaacaatatttatgccgatttcctgacgtcatttgtttagatcattgtcttgatgtttttgttgtagttatcttaaaatgtgttcatgtaaatctttcgaattgccatttcaaaggggatggttatctgtattaattggctgatatctccttcgtctgagctctacatatgatgcaaatgatggatccacaactttaggtaagtcaactttgaaccaacaagttacattgtacatgagggtactaagcaaagatatataaatgatattgtgtctctttttctgtcttataattaggacccaagacctaactatgactcccactgcatctatcgacaccggtcaaaccatctctcttcatcttctcctctttagcctttcgacaaaacacaacccacgagttaactttcatggccacgcagacaccaaccagcgtcgacagacatagaca

SEQ ID NO: 144940 - DNA, 473 bp, Arabidopsis thaliana landsberg
  unsure (1)..(473): unsure at all n locations
gtttttttttcttccntatttagggtatgttttcctctttcgtctcttttaattctttatgactatgaactttctttatttcaagctgaagtttttggtgtttaggtgggagcttgatgtctaaattgttactgtcagtggtttaattagaaaagagatgagttacacgagcactgacagtgaccataatgagtcaccagctgctgatgataatggaagtgactgcagaagtagatgggatggtcatgctctcaagaaaggcccttggagttcagctgaagatgatattcttattgactatgtgaataagcatggtgagggtaactggaatgctgtgcagaaacacaccagcttgtttcgttgtggtaaaagctgtcgtctaagatgggctaatcatctgaggccaaatttgaagaaaggagcttttagtcaagaagaagaacagcttatcgttgaattgcatgccaagatgg

SEQ ID NO: 144941 - DNA, 484 bp, Arabidopsis thaliana landsberg
caaagaaagcctttcttcttggaaacctgaaaaggcggataaatcaagaggaccaccccaggcaaaatcaaccctatcctcaacgggccacgaacatatgggcttgaatgtctccttggagaaatcggaactttggagcagtgaataacagaaacggtagtatgcaaaataccaaaaccaaactcttgggaaactggtagacataagagatctaaggtcaccggattcatgatttcaaccttatcatgataaattcgtatggatcgtttctataagagatccaagtgattgtcgatgaatctcttgccgttgaagagagcgtaccattgtatgcatgtcgctttgaatcgtatcagagagtcgatcggggtcctgtaaagtatgtcttctactatacatcaaacttattcaaaaggcagcgacgatttggttacattagggatttaatgtaatcgggctatatacattaagtcggtttctcata

SEQ ID NO: 144942 - DNA, 1578 bp, Arabidopsis thaliana landsberg
actcttatcttcggtacagagcaaatcacagctcccgatggccgccacgtcatcatcaccgccgtgtaacatctccgcgtcctccctcctcctccgtcaaccttctcgctcaatccttaaagtgttcggtttattaccacctgtaagtaggaataaccgtaaactcggccggttaacggtgacccggtctaatctggcgcaggattttcttggtgacttcggagctcgtgacccttacccggaggagatagcgagtcaattcggagataaagtgttgggatgccaaagcactgagcacaagattttgataccaaacgcatctgttttgtctctctcccagcttcagtgttcccctgtttcgtcttcacagcctcctttgtccggcgatgatgccagaactctcctccacaaggtacttatactatttctctcttagtataaaaatgttcgagttttgattttacaagtttgttggttgatcaaaatattgtgaaaatgttattgattctgcgtttaacagatttctaatctataaagatagaattgtgacccaaaaatatagataagccaatgaaaattttagtatcatgagggacatattaggaacaatggttacgagattaaaaaaaaatgaaatgattagtgttgataaggctcatgttggtgttttggttcacggttaccactctaatgatgtggtacatcaatctcaatgattattatgtaaacgttttaggttttgggatggagtatagtggataatgaagcgggtggtctgaaaataaggtgtatgtggaaagtgagggattttgggtgcggtgttgaactcataaacaggatccataaggttgctgaagcttctggtcattacccttctcttcacttggaaagtcctacccaagttcgagctgaactatttacctcttctatcggtatgtcaaatatttgatgttcgagtttgagttttaatatatggtttcttaagacggtttgttggatgaataatgcaggagggttgagcatgaatgatttcataatggcggctaaaatagatgatatcaagacttctgatctttcccctaggaaaagagcttgggcgtgatcttcttttcattattttggaacatttttgtttgatagtatgtaatgtatgtgatgtattctaaattgtgtgtgatcggtctacatgtcgagttatatagaaagcattgtcataaccgcataagagatatcacgcaacatgtctttgagattcattcatcaatcaaaagaagaaagaacatcaatcatatggagcacaatataagaaatgagacattattattagattaagatcatttcttcttctagaacattctgggactaacaaaaaaatcgaaaaaacacaactacatttttgcattctaataggcggtggtggttggaggactagccattttggagcattggtgtttcatcataggagggaaaaacgggttggatggaagatttggtaagcagttagcttcagcgtcaaggaaagctttacaacaagcaggaccaacgccttcaaatttgccggacattacggcttgttga

SEQ ID NO: 144943 - DNA, 1816 bp, Arabidopsis thaliana landsberg
tgaaattgggtgaaagatgggtaacgctcttacgtttctctacggaaaatgctgcaaacccacaacaaccgatgactctcttggtcctcacggcgtctccgccgccaccgtcggtgtttcagctctcgctcacgatctcttcaacttcgagatcacttcccaggtcttaattttctcactgaaacttctaaccgtcctttgatctacttattctgctgctttcatttgtgctccagtgatctttaagctaattcagctgttggaaggtctctttacttgatttggttcaaaagttgattttgatgatgagtttacctgtaggttcctgaagggcttgggaggtatgttcagtcatctagaaaagctcaagcaaactggtaaaataacacaagattgctttacatgtttcgtgtaggataaagatgtgaactttgttgtgtaatcaatctgtttgtcatgtattttaacatcgtgaaaggtatagaaaaatacttgaggcatggaagcaagcaaaacctccaccgcagacagctgaggaagcttctaggcttgtcactgatatcttaaaaaggaatcagaaagctgatgttgaggtatgattagcaagaacagatgttttaaaacatttatgagaattggaagagatttatgtgattgtgttgtttatgaaacaggggcttttgtctttctatggactccctttgtctcatactctagttgaagtcactgttgaagctcctgtgtctttgcctgaagggattcttttcgaatttcaaacacttccggttagaatgacttcagtacaaattaaaaagaacaacaactgggtttttgggatttgataatgttgctgactaagcttgtgtaatggaaaacaaggtggatccaaaagctgtggcagatggagacaccatcacagtgtatgtcagtacttcagagccggttgtgtcatcttctgttccaagggaagtcaatcttgcagctgttcaaagagcaaaagcacgtgagaagagaaattatccaaaagcagacgaacttcaccaaaagatcattgattctggttacagggtactaaatattgagaatgaggaagttcttgctcggaagttcagaattagactaaggtaaagatcactcttttcctttaagaaaagctcaactagttctaccatggattattttgtttagtgaagctgtttggtgatggaaaaggaaataggggaatagatgcaccagagagccaaatgccgtttgggaaagaggcacaagaagggctcttaaagattgttgggcggaaaagcttgaaggtgttagtttatggagaagatcaatatgggcgatgcgtaggtgatttatactgcaatgggatctttgtccaggtaatagaagtacttgcccttcccttgtaataaaaactttgtttaatcggttattggtttcttatctaggaggcaatgttaaagaaagggcttgcttggcattacttagcttatgacaagcgcccggttctcgcaaaggcaagactagtagagtttgttttgtatatactacaagtacgaagtctctttagtttgttgacatagtatcttttgtgtatttactgttcattttatgtgaaatcattcagtgggaaaaggaggcaaggcagaagcgtattggcttgtgggcttcttcaaatccagagaagccatgggactggagaaagaataataggcgggaatagtcaaccgactttgtttgggcaaaatcacaaaccaagtaatcagcgtttaaaacaattgagatttgtgattgttgagggtttttgtttaaatcc

SEQ ID NO: 144944 - DNA, 800 bp, Arabidopsis thaliana landsberg
cgctaagcacggctctattcaataatggtctaagttgtggtgcttgcttcgagataagatgccaaaacgatggaaaatggtgtctccctggctcaattgtcgtcacagccacaaacttttgcccgcctaacaacgcgttaccgaacaacgcaggaggttggtgtaaccctcctcagcaacattttgatctctctcagcccgtatttcaacgcatcgctcaatacagagccggcattgttcccgtcgcttaccgaaggtaaaacctaaaaaacagagctgctctgtttttaccctaaaacagagtatgcgactgaataaaaattgaacatgaaacagagctgctctgtttttcttccaaaacagagtatagtgaattattggaatcttactccgttttcatctttttgttgttgtgtgttaacagagtgccatgcgtgagaagaggaggaataaggtttacgataaacggacactcttacttcaacctagttctgatcactaacgtcggaggagccggagatgttcactcagcgatggttaaaggttcaagaacaggatggcaagcgatgtcaagaaactggggacagaactggcagagtaactcttacctaaacggacaatctctgtcattcaaagtcacaacaagcgatggccaaaccattgctctaacaacgttgctaacgcaggctggtctttcggccagaccttcaccggtgcgcagctacgttaggaagagtgattcggtgaaaattcatctcattgatcgtgtggtattgacgtgttgtagtagaagcagttag

SEQ ID NO: 144945 - DNA, 1191 bp, Arabidopsis thaliana landsberg
cgaattatttttgtctttgccctttcccccttccttcgatgtgatacctaatcaaccactctcaacaccatccaaccaccaccttcagagcaaagaaacagagcagacaacgaaacagagcagagaacgaaacagagagagagaaggagagaacgaaacagagagggaattctgttggttttgcaatggtttggaggttcgttaatggcgtcatagactttggagattaagggagaacaagtactctgcattttctggatttctcactatttcttcttctctagaggaataggcgagaaattgagattaataaaaaggggtgttttttggttcttcttcgtttgtataaagcctgccgcttcttaaggtacgttcctccttctccaatttggttggttgatcttttgttgaattaattaaagaaaagggtcttctccaatttcctagcttttgctgtctttttaccaacttcaagagtttaatttagaaagtataaagctaagacctttgagattctccctctattgtctcttgttctgtgctctcttcttagttgaaattgccaaattgttttttttagcaagaaattcctatgctttgctctttatgatttgtttctcagcttctgtgactctcaacttctatgataagtaagaaacaaatgacgctgttgcaggttctttggaaattctcaagtgatggaggaaaatctggtttacttcgcatgagctattaacgaaatttcatcatgattgtctcactgtcacacttgtgggagtatgcgtgaatgattgtcaagagaccgatcttgtttctcacttcgtttgaactctgtcctgtttcccatttatacttcagattctagctcctttagggcaaatcttctttggcaaaagtaacaattaatcagcactagcagaagtgaagtttctcccgttaggtggctttgatacaagtcttggagctttcgaatttctttgaggtttgaagctccaccctcattctagggcatatctcctttggcaattggaactccaatcacatcttgggttcccctttgaagtttatccaactggaaacttcagtccattcgttgggcaaatctcctttggcatttcggagtcctcagttggctcaccttatctcttgttcgagcaaatctcctttggcattatccgagttcgtagttga

SEQ ID NO: 144946 - DNA, 436 bp, Arabidopsis thaliana landsberg
atgaagaaagctgccaaagggaagttgaaacctgatgttgagaaaccgatgaagaaagctgccaaagggaagtcgaaacccgatgttgagaaacctatgcagaaagctgcggtcaaggggaaagttaaaccagatgttgtgaagctggagaagagcaaggacggcttaaaggcgaaaaagacaacaatggttgcgaaagacgaatctggtggtggattgaagccgaagagaaagagtgtgcttaggaaatgaggcagaggaaggtcttgagtgtttgcttttgagtatgatttatgttttattttctatcgtagttcttattacatttttgagccatttcatatcttgtactacttttatgaaacatcgaactggtgaatgtgggtttgatggttttgtggaggaaacatactactgttcaccttttactttttaa

SEQ ID NO: 144947 - DNA, 885 bp, Arabidopsis thaliana landsberg
atgttaattaatactataagagtatattttactaatttccgtatctgcaaccagcgaagaaaaagtaataaagaggtcctccatttcttcctcgtgacaaaacgcacttggcagagaaagataaacaagaaccctaagtttttttataagattcgagaaaattcaacaactcaggaaggaagatccttttgctccaatttctcaatcgaaacgatttcaatttcggtttcaacgatgtcgagtttttctgccgagtgttgggacttctctggtcgtaaaccgagcttttcacaaacatgtactcgattgagtcgttacctgaaggagaagggtagttttggagatctgagcttagggatgacatgcaagcccgacgttaatggtaatcaacctttctcttttagatctgttcatttcgtttctgcgaattttgagtttcctgttgcgaattacgaattaggaatcgattacatgttgtctggaaattgaatcgttgtagagaatcgatgattaatggattttgaatcaatttctatttatgtatgtatgtgtatgaatttgtggagatggttctgtgtttggtttaagcataatcctctaaagccataggcctggtttagtcattaagtagattttgttttgcagttgtttgagagattggtgaatgataataatctttacttttggatcaattttcgcaggaggttcacgtcagcctacaatgatgaatctgttcccttgtgaagcttcaggaatggattcttctgctggtcaagaagacattaaacctaacactatgtttccgagacaatcaagcttttcttcttcctcttcctctgggaccaaagaagatgtacagatgatcaaagagactactaagtatgt

SEQ ID NO: 144948 - DNA, 4635 bp, Arabidopsis thaliana landsberg
atgaacacgacgccgtttcactcggatcctccgccgtcgaggatccagcgtaagctcgttgtcgaagttgttgaagctcgtaatattctccctaaagatggtcaaggaagctctagcgcttacgtcgttgtcgatttcgatgctcagaagaaacgaacctccactaagttccgtgacctaaaccctatttggaacgagatgcttgatttcgccgtctccgatcccaaaaacatggattacgacgagctcgatatcgaggtttataacgataaaagatttggtaacggaggtggccggaagaatcattttctcggtagggttaagatctatggaagccagttctcgcgaagaggtgaagaaggtcttgtgtatttccctttggagaagaagagtgtgttcagctggattcgcggcgagattggactcaaaatctactattacgacgaagccgccgacgaagacacggcgggtggaggtggaggacagcaacaacaacagcaacagcaacaatttcatccgccgcaacaagaagccgatgaacaacaacaccagcaacaatttcatcctccgccgcagcagatgatgaatataccaccggagaaacctaatgtagttgtggttgaagaaggtagggttttcgaatcggctcagagtcagcgctatacagagacacatcagcaacctccggtggttattgttgaagaatcaccaccgcagcatgtaatgcaaggtccaaatgataaccatcctcaccgaaatgataaccatcctcaacggccaccgtctccgccgccacctccatcggctggggaagtacattattatccaccggaagtgaggaagatgcaagtaggaagacctcccggcggagatagaattagggttacgaagagaccaccgaatggagattattcacctagggttatcaatagcaaaactggaggaggagagacgacgatggagaagaagactcatcatccttacaatcttgttgagccaatgcagtatctcttcgttcggattgtgaaggcgcgtggcttaccacctaacgagagcgcgtatgttaaggtacggacgtcgaaccatttcttcaggtctaaaccggccgttaaccggcccggcgaatcggttgattcaccggagtggaatcaggtttttgctcttggtcataaccggtctgattccgctgtaactggtgcgactcttgagatctctgcttgggatgcttcgtcggagagttttctcggaggagtttgttttgatctctctgaggttccggttcgtgacccgccggatagtccgcttgctcctcagtggtatcggctcgaaggctccggcgcggatcagaactctgggagaatttccggtgacattcagctctctgtttggattggtactcaggtagatgaggcatttccggaggcgtggagctctgatgctccgcatgtagctcacacgcgttctaaggtgtatcaatcgccgaaactttggtacttgagagtgacggttcttgaggcacaggatttacacatagctcctaatctcccgccgttgactgcgcctgagattcgtgtgaaagctcaattagggtttcagtcggcgcgtacaagaagaggctcaatgaataaccacagtggttcgtttcattggcatgaggatatgatctttgttgctggagagccgttggaagattgcttggttctgatggtggaagaccggacgactaaagaagcaacacttctaggacatgccatgatcccagtgagctccatcgagcagcgaattgatgagcgttttgtgccgtcgaaatggcacactctggaaggagaaggtggaggtggaggtggaggaggaggacctggaggtggtggtggtggtggaccttattgtggaaggattagccttagactttgtctcgaaggtgggtatcatgtgcttgaagaggcggcgcatgtatgcagcgatttccgtccgacggctaagcagctatggaaaccgccgattggaatacttgagttggggattcttggagctcgtgggttgttgccgatgaaggcgaaaaacggagggaaaggttccactgatgcttattgtgttgctaagtacgggaagaaatgggtcaggactcgaaccataacagacagttttgacccgaggtggcacgagcagtatacgtggcaggtttatgatccttgcaccgtgctaactgttggagtcttcgacaattggaggatgttctctgacgcctccgatgatagacctgacacacggattgggaagatacggatccgggtgtcgacgttagagagcaacaaagtgtacaccaattcatatcctctgttggttttgttacctagcggtatgaaaaaaatgggtgaaattgaagtggcagtccggtttgcatgcccgtctctgctgcctgatgtttgtgcagcttatggacagccgcttctgcctcggatgcactacataaggcctctaggtgtagcacaacaagatgcattaagaggggccgccacgaaaatggtagcagcttggctggctcgagcagaaccaccattgggaccagaggtagttcgatatatgttagatgcagattcgcatgcatggagcatgaggaaaagcaaagcgaattggtacagaattgttggtgttttagcttgggcagtgggtttagctaagtggttggataatatcaggcggtggaggaatccagtgacgacggtgctagtccatattctatatctggttcttgtttggtaccctgatttggtagtcccgactgcattcttgtacgtggtgatgatcggagtttggtactaccggtttagacccaagataccggctggtatggatatccgcttatcacaagctgaaaccgtcgatcctgatgagctagatgaagaattcgacaccataccaagctcaaggcgaccagaagtaatccgagctaggtacgaccggttaaggatcttagcagtgagggttcagaccattctaggagattttgcagcgcaaggagaacggattcaagcgttggttagctggagagatccgagagcgacaaagctgttcatagcaatctgtttggtaatcacaatagttctgtatgcagttcctgcgaaaatggtggcggtggctctagggttttattatcttcggcatccgatgttccgagacacaatgcctacggctagtctcaattttttccggcggttgccaagcttgtccgatcgactcatctaaggagagaaagatgtcaagatagtaaatgttaggtgtttttgagtatccaacagtttcttgggctgaggctgacatagaataaaaagattcattatgggttaagaatgatatcatatcattatgattcttcattttattattcagattctgtcgggtactataatcagatggcatgagctttgagacctgtaatattttgaaggaaacgagagagatttcagatttgagaggtgaaaaaggaagcaaaacttgtcagtaaagttttttgaccacagatttgcttttggtatctctgtagttttctctgtaatctaaaatgatttactaattcctcatttaacttattttgtttacgcctaaactattacatgtaaacattgtctgattatataaattctaagtgaaaaaccggagataaagcgctaacgaaaatgattggttgaaatcacaaagacatcatctgacgtggcagtttctctgtctatcagagtttcagatagtgtgccaacggcgaaacaagacacgaaagaatctctaaagaaatcattctcatcgcttcgcttcgatttttcttcaatggctgtcgtcggcgctccaatatcgtctccggcggctcagctgcagacacaatttctctccaatcccattctcccccgctttcgccggtctttctccaccggaaaatcaccagcaactttctccgtcgtagctatggctccccagaaaaaggtaactaactctcttaatcatctcctttgtttaagttctgagatcttttgcactttcatcaatcacttcataaagtataaatcttttttgattctcaagataatctttagaaacatgaataagcagtacattttagtaatggaacaaagacattgaagtctctgtatatagtattgttgcagagttttatatatactttttaatttgtgtaattgtgatcactgaatcgggtaacaaaaggtgaacaaatatgatgccaagtggaagaaacaatggtacggagctggattgtttttcgaagggagtgagcaaataaacgttgatgttttcaagaagctggagaagcgaaaagtgttgagcaacgttgagaaatctggcctgctgtcaaaagcagaggggttgggactcacattgtcatctcttgagaagcttaaagtcttctccaaagcagaggaccttggtcttctcagtctccttgagaacttagctggaacatcgcctgcggtcttagcctcggctgcattaccagctctcacggctgctattgtagccgtggagttgatcccggatgactcaactactctagaggatgctcaggcggttttggccggtgctcttgcgcttacaggggttgttttgttggatggttctgatgtttag

SEQ ID NO: 144949 - DNA, 414 bp, Arabidopsis thaliana landsberg
gtaacgttagctcaggcgtaagagcataatgcaaggaggatcatcgggtattggttatggtttgaagtatcaggtagttcacgatcttcttcatgcccgatcctttgtcaatttacgagctttcttaatggtggaaaatttgctgttttcaggccagatgtatatcggatgttaaagcagatagagatcacactagcttcctcactggaaccctaagcttgaaagaagaaaatgaggtgattgattcttaagatctgtttcgttctatttctggatcggaagattctgactttgttaaattttaaggttcatttgcttcgtttgtcttctggtggatctgagctgttatgtgagggattgttctcgcatcctaatgaaatttgggaccttgcttcttccccttttgatcaacgc

SEQ ID NO: 144950 - DNA, 3209 bp, Arabidopsis thaliana landsberg
atgcgtcaagaggaggctaaagtgagtgctcaccagaaatatccaagtaagcctctggcaatataggtggaccattttcaataggcttccctgaaccattaaagatacggccaagcatatccaatgagacaggggtttttaaaacctatattggcaaaagtgagtgagtaaaccaaatatatcacgcaacaagagaagagagtagtaacatacctcccctgtaaattgaacggtggtgtacttgttgtcaattccagatgttccctcaaagacctagacaagcaccacagtactataaagaaaaggccgtgttgcattattttgaatgaggaaaataatagttggaaacctgaacaacagccttctcgccatcaacttcaagaacttgaccacgtcgagtagttccatccccaagacgtatgttgactatttcttggtatttaggtccctgggaatcccaataaatcaataataaaaatgcatcaagaaaacaagacatagaacaatttcttggtaaatataccttaactttctcaaggtatatttgaggaagaaaagatatcttgtctgctaaagagagccgagaaaactgcagaaataacaatggtaagaaatgggatcatgaagaatatttgagaaacaggggaaatatttgacttacttgagaatactactgtatagaagaagctcttgaaatacaggaaacttaaccttaaaacacataaacattttcatccttataggtttcttgcttcataagaaacagagaagaaatatatgagtacctgtaaatcttcccaggttgtgaagggtttgagtccaagttgatcaaccaaggaaaatatgtttccattcggataccaaaacccttgttgcacagatcacatgtattagttgtgtaacgtaaaactaaaaggtaattaaatgggttaccttggaacccaacatcaacaggaccatgaccatcgtcaagaactgtgacatcaaagccctaacaaaatctccaagtaaatacaaaaagagcaaatggagttggagatgagaatatcaaagtgaaagtaaccttggttacaaagatgatgagcggcaccaagagcagcccagctagaacccacgacaacaaccttcttcttcattttttttttggtttaaaacaaccttcttcttcttatctgaggtggctcctccatcgccttgggctatgatacatagtcttctccggcgcacgggaccttgtactattatcagattcaggctcccacaccacaacatctttactgcctcacaatctttcttcttttgtttccttgtgtttaacttgtgagtaagtgatgtgtgggtgccatggccacaaagacatcataaaccaaattttgtctgtatttttttttttttttgcctaaaatctatttgcattccttctacttaattatgcagttgttcatactacagagtatgcttatttttcagtattactaatagataaaattaacatttatctcacaaacaataatagaaatagaaagacatggacaaaaaaataatagaaagacatggcccccaaaataaataacatgccgaaaccaaaaccaaatattatccatttgacatacttatcaaatatcaattttttttccaatcaaatatcaatttattatcaaagattcaatagtaattgaggtaagtacaaaaaaattgccgaattcttttgcttccacgcttctaattgtgtattggacccaaatttatgtgtgtgacacaagataatcgttcgtataggtctatctaccgtccgccgtttcaatctgacggctatcgtacaagccgtacaatatagactcaatctaacggtggaaatagaaagatcataaatccctcaaatctcacagttacctcaagttttttttttttttttttgttggtggagacgaacaacaacaacaccaacagaagacagaaatggcaaccgcagctctctccgccgcccgacccaaccgccttagctcagcctcctccgatgttcctctccaccccctatatctccctaccaagctccaatttccttcccgtaagactcagctgtggcgctccgccgcgattctcttacccacacggcggcgatgcgctccgcctagagctagttctcgcgccgacgattctccacccttcgatatgtctgtggagacggcgcttaaggttctcggtgtctccgaaggagcttccttcgacgaaattcttcgtgccaagaaatcgatcctggcttctcgtaaggacgaccccaacgccatctctcaggtgactgttttcaattttcactctccaatcaacaaattcgctaattttctatatttgttccattactagttttagcttccatggaaagagatagactttcttgttcttaagcctcactgtaattttctcaggctgaggctgcatatgacatgctgctgatgcagagcctaaaccaacgccgagcaggaaaagttgtaagcaacaacattcgctacgctgatgttaaatctagtaaccctctgggaacaagtactgtgactcagtggatgaagaatccacctgtctctgttgatatgccttccacgagcgatctcgggatacaagctggagtctatggagccatgatggttttgacttatgtgaatgggagttcctttgaatcttctgggatgccttatgctggtgctgatgtgcccggacttatattggctagcagctttggggcttccctatactttatgaccaaaaagaaagtcaagctaggtaaatgataacttccatcttcttccacaagcgagcacctctgatgttgttatgtgttttgatacagggaaagcagctgcgttgacggcaggaggattagtggcaggtgcagtggtgggatcagccattgagacctggctgcacgttgatgtggttccgtttctgggtctccactccccagctgcagtcgtgagtgaattcatagtattctctcagttcttggtgtctctatgcttaaggtagaactttgtacattggcttctgcaaatttggctcaacctgtcacgctggtatatgtacttcgtttatatgcattttgtacagaacactcaaaagtaaacaactcctagacatccattttcatactcattatctattccttggaactctgaagtttctgttgcctaaaccaaatcaaagaactagcatgt

SEQ ID NO: 144951 - DNA, 479 bp, Arabidopsis thaliana landsberg
cgggtctagaactccgggtctcacatacacgccgttcggaaagatcccaatgtctccagcaaagcttttctcgagtattattacctcaatctccggcgaatctacgtcggaagaaagcacgtgaagattccgtataagtatctcgcgccgggaactaacgaagacggaggatccattgttgattccggatctacattcactttcatggagcgacccgttttcgagctcgttgctgaagaattcgcttcacagatgtcgaactacactcgtgagaaagacttggagaaggaaacaggacttggaccgtgttttaatatctccgggaagggagatgtgacggtgccggagctgatttttgagtttaaaggtggagcgaagttggaattgccgttatccaattacttcacgttcgttgggaatactgataccgtttgtcttacggtggtttcggataaaaccgttaatccctccggcgggac

SEQ ID NO: 144952 - DNA, 1077 bp, Arabidopsis thaliana landsberg
gctctactcttacgcagagaggcttttaggacctatcatagttacacgtatatctggggtaagcactatatactctgttgttcttactgcaaaaccttgtgttttctttagtaggacagttctaatcttgtgattgtttttgatactcacagagcctagcaatggtcgtcttatcatgttacccactaatagcaaagttatctggtttagcccttaccgtgactgtaacttctgcatccgtagcaaagagtgttttaggtgtaagtttctgataaccttaataagaagaatgtgtaagtaagactttagtttatattctcaacattgtgtatgtgtgtgtgtgtagacttctgctataactggattattcatccttcaaaacaaggctgtggtaagtatttttacaaaacattgattcgttttagtatttagttaggtgaagaaaccggcaataagtagaacctctttagcaataataatagagacaagaccaaagaggagcagctaatggaattgccatgacagcgatgtctcttttcaagctcataggtccagcagcagcaggaatcatgtatgcaacttcttctacctccttctttacattaaatatgcttcaacattttgttataaaacaaacaacaagaacaacatgaacttgttggtttatcgaattctcagttttgttttgcgcttaataacggtttgttgacagtttttcgtggagcgagaaacgtcagggtgctgcttttctccctggtaatgttaatcctaattcatgttcatgtccatctcttaactagctatatataagttgcgaattcaaacttgagcaagtgagactaaaagatggtgatcaatgtgcaggcacccaaatggtattctttatactgaatgtggttttggcacttggagttgtattgacattcaaaccatttctagctgaaacacaacagtagaaaatgatgaaaaatttgatggtattcaaattacataatcagaatgtattgtataatatatagatttgcatgtctgatttaaagttagattttaaaaatggcaagagaaaaagaaaaaaaa

SEQ ID NO: 144953 - DNA, 1022 bp, Arabidopsis thaliana landsberg
tttcttctccggagaatctgaaatcgaacaatttagtgtctttttctcagacattgtttacttctgagaaagcttaggtctttagactctcattacatgtcggaagtttcagctccggcttctttttcaggtaagatcccgaggtttttctgtctcctagttttctgtgtttattgaacttttgtgttcatcttccgctggaaattagctgtctttagggtttagcttgtgcttatttggatctggtatcgaaatttgtgctaatcaacttgctaaaattgacaatttgaccctcttatgtgtaagccaaatctgttataaggtcaaaatttcatctcccaaaagagtaattagttatagaacacttgtatttaactttagacacttacacttgtatacttctttttttttttttttttgtgtggatggaattacataagttggggttttgtggagataaatttttggaaacaaagatgaaggtgatgaagaacaaacacaacaagaaagcaacgtttttgcgttgttcaccgtttggtttagtatctacagttgtgggatgtgttttcatgattcatttaaccatgttatatagcagaagttatagtgtagatcttgatctttcacctcagttacttatccatcatccgattgtccgtgagctcgaacgcgttgaagaagagaatatccatatgccgcctcctaggaagcgttctcctcgcgctatcaaacggaaaccaaaaacaccaaccactttagtcgaagagtttctcgacgagaattcacagattcgacatctttttttccctgatatgaaatcagcttttggtcctaccaaggaagatactaatgacacatcgcattactacttcccggggagaatttggacagacacggaagggaatccgattcaagcacacggtggtggcattttgtttgatgacatatcaaaggtttactattggtatggtgaatataaagatggaccaacttatctttctcacaagaaaggtgctgctaga

SEQ ID NO: 144954 - DNA, 896 bp, Arabidopsis thaliana landsberg
ggacccggggagctattgaatgaagcggaatttgcagcagcagcagaagagaatgaatttcactcatttgagattgaccctgcacaggtaaatttctcctaatgcttcttaaaagtaatcgaattgatgagtttggtaaagttgtatgatctatacttaactcgtggtgtcatgctctttttctcttggtgtttaggtggagaatgtgaagcagcgttgcttaccaaatgccttgaattaccctatgttagaggaatatgacttcaggaacgacaatgtgagtaacaaatattacacttcaggccaatttttgcttaccagatgatatgcaccgcaggtgtgtgattgttaataacttgatggtgtctctcaggttaatcccgatcttgacatggaactgaagccccatgcacaaccgaggccataccaggaaaaaagtttgagcaaaatgtttgggaacggtatagctgtctgcatccacattatttttccttattgatggtgaacttctcatagatatgtccacttgtacttccacgtgactgatctagctttatggtgaacacctaatagataattatctttgtaatttcttgagaaatattgtgactgagcttgaatcttggatttgcagggcgagcaagatctgggattatagtgttgccttgtggtgctggtaaatctctagttggtgtttctgcagctgctcgtataaagaagagttgtctttgtttggcgacgaatgctgtctcagtggatcagtgggccttccagttcaagttgtggtctactataagagatgaccaaatatgtcgtttcacttctgatagtaaagaacgattccctggaaaatgctgttgtgttgtgacaacctataatatggttgcctttggtgg

SEQ ID NO: 144955 - DNA, 1364 bp, Arabidopsis thaliana landsberg
atgcggaggagattggtggttctgttgataaggtaaaggctagagctttaaggaaacagagagagttcgaaaaggcgaaaaaggccgtagagaggtataactctgatgctaattacagattactgtttgatagaattgcagatttgtttgcggttttgttgaaatcggatttgaagtatttgaattcggatgagttgactaagattagtttagcttcgaaatggtgtccttcggttgattcttcgtatgataaggctactttgatatgtgaggcaattgctagaaggatgtttcctagagaggagtatgaaggtattgaagaagcgcattatgcgtataggattagagatagattgaggaaagaagttcttgtgccgttgcataaagcgcttgagtttccggagttgttcatgagtgctaaggaatggaatttgttgaagtataatagagttccttctgttgctatgaagaattacaagaagctgtttgaggaacatgatagcgagaggtttaccgagtttttggaggatgtgaagtccggaaagaagaagattgcggctggtgcgttgcttcctcatcagataatcaaccagctggaggatgatagtgggagtgaagttggcgcggaagttgcagagcttcagtgggcgagaatggttgatgatcttgctaagaaagggaagcttaagaattcactggcggtttgtgatgtctctggaagtatgtctggtacacctatggaggtttgtgtagcgctcgggttactggtttcggagcttagtgaagagccgtggaaagggaaagttatcacctttagcgaaaacccggagctgcatattgtcacgggttcgagtctgagagaaaagactcagtttgttagagaaatggaatggggaatgaacacggattttcagatagtgtttgatcgtattctagaagttgcagtcgagaataacttaaccgatgaccagatgatcaagcggttgtttgtgttcagcgacatggagtttgatgatgcaatggcaaacagccattcggaggtgagttaccatctgagtgtggaggaccgattgaagatatcgaaggaacggtccaaggagaaatgggagacagattatgaggtggttcagaggaagtataaagagaagggttttcagaatgttccagaaatggtattttggaacttaagagactcatcggctactccggtggttgctaaccagaaaggagtagctatggttagcgggttttcgaagaatctactgactctgtttcttgaagaaggtgggatcgtgaatcctgaagatgtcatgtttattgccatcaaaggtgaggagtataagaagcttgttgtttttgactga

SEQ ID NO: 144956 - DNA, 235 bp, Arabidopsis thaliana landsberg
tgtcttttttttcatgtaagagtgattgctttgtacgatctgtctctcctcgtaactctatcaatgaatgtgatttgaataagaattgcttcagcaataagatatcatcatgaggtgttagtgtggaataaatctcctctttcatcattatagctttaatgggtaacgttgtatcatcttacaatgtgtaccacttcttaccgctttctcgtaccaccacaaaacttgtccacat

SEQ ID NO: 144957 - DNA, 2098 bp, Arabidopsis thaliana landsberg
gagaaaccagacaatggagaagtgcaggatttgtctgaggatgcgtcatcaccatgatcatgattcttaaaaaccccaatgatctctctctgcccttttttgtggaagaggaggggaggtgaaaagtgtttctcttttctttttttttttggcttggagatggccatggctgaaaacaatataggatgaaaccagtgatgttgtcacaggtttctcttctgtttttgactctgttaataaattttaatcagacttatcagaggaaaaatagagtttgtgttgtgacactcactaagagctctttatgaatgacaactcgaacgtaaaattacatcttttgcttttgtcaagtgtttacatcagtaatatccccaatttcaagcttatttttttttttcaattttaaaactaaaaaggttccaaattttttttatcgatgagtcatatttcatttgaacattccaaaagtaaagaaaagagttgaaaactttcctcagcctattacaattgcctttagctgttaatgagttttagagattcgattagttttaaccaacagttcctgaataattggattttactctcttgttgagtttaattattccaatatttcttcatggtgctgttttgctattgctggtgataaacagttgatctaccgacgatttgcattcgacggtggtttcttcaccagaaatcgatatctccgatggcgaaggatgacgatgggaatcttttttggctcatcttacacgtgtattattacgtgtctttggatgatctttcttgatgcaatcttcttctgtaaacggtgtattattgggctcttcttgagcttgcttttgttcgcaatctgtttatgtgtgttgggctgtaattggccttgtagcaaacggtttattgaataaagtccactattgagaaaaaaaaaaaaaaaaactgaaaagggttgtttttaggcattttttgtcggagaaaaatctgggaagaagcttcgtcctttgcgtgacagggaatctctccgttggggttttgtggctgcctacgatttctgcaagcaaaaccacagaactcaatctaattaattagccgagtcgactcaatccgagtttctacagccgcacgagggaatcatgaatcggctgagaggccgaggtacaccgattctgggttccgcactcgtgccccagctgaagaaaaaagccctaaattcattggtccccgtccaggattcatatctatccaccaaggtgatcgaagaatttcaattcataccggtttctgaagaattgggattagtaaatgttttttgcatcaggatttttgttaaaatgtcaatctataatctgcttataatgggtttcgtttaatctcttaggacttgttcgagaggcacagggtcgtgtttacagttggaacttctatagcatctgttgctacggcttggattggtatgttacaattccatattttttgcttactttatcttcaattagagaatctttacctcttaccacgtattttgatgtttaagtttctgaattggattgctttgaaaggcgagcaatggctattagtgaagtgattcagattttgggtgttgattggcttcaattcatgagtgtttcattgggatagctttagctctcaggcttgatctctaggggtgaaatccattctgtgataaatttgaggccttttccggatcagactatagattacggtttagttgatttgatctgccataagtttccaagtgtttggagatcatcttggtcagaattctgtgatgatgttcaataactaatctgtccaaaacttccaataactgaagtttagtactttgagatctctacatgatattctaggtcttttgttattctgctgggacataaaacaagttagaaactgaatttcttgtgtgatactagtgaccgttggaagaggtatctcattggtcttttgtttatgtttgtactgagtcaaatgagttttatgaccgtgttctaccgaatggatgaatgattgtgcaggttactcattacgacattacaatgaaactagaattaatcagaggctggagtccattgagaatgcg

SEQ ID NO: 144958 - DNA, 601 bp, Arabidopsis thaliana landsberg
ttatttaagatagaagagccaatggcgatgaagaatacatcacatgttcttttgctaagtcttctgctttgcctgatgtttgtgattggtcttgtagaagctagtataccaggttagttcacatgttaagagaatcgcacaattcataacctttacaatctatcatgtttttgaaatattggtaaacgatgaagtagaatgaaaatcgaaaacgatgttgtgaaaagagaattattaacttaaatgtaaaatatttttattgaatcaagataacatttttagtaaaatagggacagagaaaaacagtataaaataaaataaaatagggacagaaaattgttcttctcaattaggatgaacaattgactcagatttcagattttgaatcaaatggagcagccaaattttatcactaatatatcattaccttggctatgaattagatgacgatatgggtccagcaatatatactccaccatcaggatcatgtggagctcctatttccaaatatgatttccaagtactagccaagagaccaccaccatgtagacgtcctcgactcgaaaacacagaagatgtgacccatactacacgaccttga

SEQ ID NO: 144959 - DNA, 735 bp, Arabidopsis thaliana landsberg
gagaagtttgtctcccaaatgtccttcatggaaaatgtgagatcttcggcacagcatgatcagaggaaaatggtgagagaggaagaagattttgcagttccagtatatattaactcaagaagatctcagtctcatggcagaaccaagagtggtattgagaaggaaaaacacaccccaatggtggcacctagctctcatcactccattcgatttcaagaagtgaatcagacaggctcaaagcaaaacgtatgtttggctacttgttcaaaacctgaagttagggatcaggtcaaggcgaatgcaaggtcaggtggctttgtaatctctttagatgtatcagtcacagaggagattgatctcgaaaaatcagcatcaagtcatgatagagtaaatgattataatgcttccttgagacaagagtctagaaatcggttataccgagatggtggcaaaactcgtctgaaggacactgataatggagctgaatctcacttggcaacggaaaatcattcacaagagggtcatggcagtcctgaagacattgataatgatcgtgaatacagcaaaagcagagcatgcgcctctctgcagcagataaatgaagaggcaagtgatgacgtttctgatgattcgatggtggattctatatccagcatagatgtctctcccgatgatgttgtgggtatattaggtcaaaaacgtttctggagagcaaggaaagccattgccaagtaa

SEQ ID NO: 144960 - DNA, 1015 bp, Arabidopsis thaliana landsberg
gacatctagagagataatcatatagagaaagagagatctccagagaatattcattgtagggaaaaaaacagtctgtctttcataattgctctttctataaatcttctctcttgtgttcttacctttcttctaaaaccattctctctctctttaacacttcatcactttttacggaaaatttcttattttcaccacctgagccatctctattttcgtcaaaacttctcaacttttgtgccaaaacgtcatttcttctgagggaataaacacaaaagaacaattttcccggaaaatcatggagatttccactgctctaatgattctttcggccatcacggcgtatttcttatggctcacattcatatctcgttgtcttaaaggtccacgtgtttggcccatattgggtagtctccctggtcttatagagaactgcgagcgaatgcacgactggatctccgacaacctccgtgcttgctccggtacgtatcagacatgcatctgcgccattccgtttctagctaagaaacaaggtctcgtcactgtcacttgcgatccaagaaacctcgagcatattctcaagaatcgtttcgataattaccctaaaagtccaacgtggcaagccgttttccatgatcttctcggccaaggtatctttaactccgacggtgacacgtggctttttcagcgtaagaccgccgccttggagtttaccacaaggacactccgtcaagccatggctcgttgggttaatagagcgatcaaacttaggtttctgcctattcttgaaaatactcggctcggctctgagccgattgatcttcaagatttgcttcttcggcttacatttgataatatctgcggcttaactttcgggaaagacccgcggacttgtgcaccgggtctaccggtgaacacattcgcggtggctttcgatcgagccacggatgttcgctacaaaggtttatattgccggagatattatggaagttcaagagatggctccgactcggcttag

SEQ ID NO: 144961 - DNA, 2502 bp, Arabidopsis thaliana landsberg
  unsure (1)..(2502): unsure at all n locations
atgcagtctggcgttgagattatttataaacccctttatgtgattctagcttgtgctgcagaagcggaagggatttttactagcacatcatctgagacaccattgttcttgaaggagcacgtagagatcctccctccttgtcctgcagattatgcgaggctctttgttgatatctctgttcctagaaatgttgggtcttgtgttgctgaattagacagtgcacgggtttacaacgttgatgacctcaaggaagttgttgctgccaataaagaagacagggcgaggaaatcaatggaagctctccctataataagagaggagacaatagagtttgaagggtggagggattcgctgcagacgtttccaacaatcaggaaattaagaagcaaaacagagagaatcagagctgaatgtgttgaaaaattaatctcgaaacatgggaatggcatggacaaaaagacgagggaagcagtagagaaacaaaccagaattatagtgaacaatatcctggattacccaatgaaacatttgagatacgatgggactggtagcagcaagctgcgggagacgctagagaatatgcaggctgtgaacagaatttatgaactcgacggagagttactcgaggagaagattagagcaaagaaagacaaaaagtagaaatgttttgctctgttcttttgagtttttgctctgttttgacattatggtcttgttttttaatttttaatgaaacgttggaaaaaaaaaaaaaaacgaatttcttcttttggggttttgttttcttttagggtttttcatttttgttagcgagaggattttctcgacgcgagctccggcaatgaaaagtttatcgatttctctaatccgtcggcttcatttccacaaaatcagaccaatcccactttcaatccaccccaatgctgcttcttcatcgtcttcgtcctcttctctgatctcgccagcacgcgaaatctccactagctgcagaagaaccaatgatctgatcaagcgtcagttctgggtcaatccatatcggaatttgaatacccatgtcgaggaacctccggagatttcgtcatctgataaagaaaaaatcgatctcgaagaagcgttcgagtcagcgaacaccactgatgaaatggtacgtttgttcaaggagatggagttatcattcgaagggaacgaattaggtttatctgcttnnnnnnnnnnnnnnnnnnnnnnnnnnnnnngtgaagatcctgaaaaggttctgtcttacgctgataaagctcttaaatcattcgatggagatggtaataaacctaatcttctcgttgctatggcgtcgcaattaatgggttctgctaattacggtttgaaacgttttagtgatagtttaggttacttgaatagagctaataggattcttgtgaagttagaggcggatggtgattgtgttgtggaagacgttaggcctgttttacacgctgtgcagcttgagcttgctaatgttaagaatgctatgggaaggagagaggaagctattgagaatttgaagaagagtttggagataaaggagatgacttttgatgaagatagtaaagagatgggtgttgcgaatcggagtcttgctgatgcttatgttgcggttttgaattttaatgaggctttgccttatgcgttgaaggcgttggagattcataagaaggagttggggaataattcagctgaggttgcgcaggatcggaggctactcggtgtgatttatagtggtttggagcaacatgacaaggcgttggagcagaaccgattgtctcagagagtgttaaagaattgggggatgaagttggagctgattcgtgcggagattgatgctgctaacatgaaggttgctttgggtaaatacgaggaagcgattgatatattgaagagcgttgttcaacaaactgacaaggacagtgagatgagagctatggtgtttatatcaatgtcgaaagctttggtaaaccaacagaagtttgctgaatcaaagagatgtttggagtttgcttgtgaaatcctcgagaaaaaagaaacagctttgccagttgaagtcgctgaagcatactctgaggtagcaatgcagtacgagtcaatgaacgaatttgaaaccgccatctctttattgcagaaaactttaggtatactagagaagcttcctcaagaacagcactcagaaggaagtgtttctgctaggataggttggttgcttctattctcaggccgagtctcacaagcggttccttacttggaaagtgcagcggagaggttaaaagaaagctttggtgctaaacattttggagttggatatgtatataacaatctcggtgctgcttatttagaactcggaagacctcaatccgctgctcaaatgtttgcagttgctaaagacattatggatgtttcacttggtccaaaccatgtggattccatcgatgcttgccagaatctttctaaagcttacgctggaatgggaaa

SEQ ID NO: 144962 - DNA, 300 bp, Arabidopsis thaliana landsberg
caacttagaaaaatgaattttattggctattctcgatttttaatcgtctttgtagctcttgtaggtgctcttgttcttccctcgaaagctcaagatagcccacaagattatctaagggttcacaaccaggcacgaggagcggtaggcgtaggtcccatgcagtgggacgagacggttgcagcctatgctcggagctacgcagaacaactaagaggcaactgcagactcatacactctggtgggccttaaagggaaaacttagcctggggtagcggtgacttgtctggcgtctccgcggtg

SEQ ID NO: 144963 - DNA, 513 bp, Arabidopsis thaliana landsberg; identical to SEQ ID NO: 42976

SEQ ID NO: 144964 - DNA, 602 bp, Arabidopsis thaliana landsberg
gagcaagaatgttctcagcttaagaaggggaaaagcaaagaaacagagtctagaaacttgtgtgctgatgataatagagggcaatgttctacggttcatgcttctaagaggatagacttgtgagtgaatgttgttctcttcttgttaggcgaaatgacgcatctaaattggatctttagattgtttttgatgtacttggatctaattcgcttactggagtcacgtgaggaaggtcgtcctcctgcgtccaaggcttccatcgatgcgatgccgatcgttgagattgatggctgtgaaggagagtgtgtgatctgtttggaggagtggaagtccgaggagacggtgaaggagatgccgtgtaagcataggtttcacggtggatgtatagagaaatggttagggtttcatgggtcgtgtcctgtttgtaggtacgagatgcctgttgatggagatgagattgggaagaaaagaaacgatgggaatgagatttgggttaggttcagtttcaacgatggtcggagaattagagatttttctgcgcaggacggtggaaacagtgatggtgttgagtccgagaattaggatttacataagaagctttt

SEQ ID NO: 144965 - DNA, 1703 bp, Arabidopsis thaliana landsberg
atccaaaccggctattatccgagttactcgaatgtccaattaggaacacagaagattgaacccagcgaactggcggaagaaaaaggtaggactactcatttatatatctagaagttatgaactaaaatcgccacattcaagcaaaacctagtgattaattctgttccagaggaccaatccagactcattataacatatattcactaaatatttcaacagacaacaagcaacggcgagaaacagaagatgatatcaagaacgatcccgctacaaagccttgggataggatttggggataaaacagccaccagagagaatgttccgccaggatttggcgagcagaaagctcctgatgctgctgagaagttcgtcaaggctgcttcgagctgttgtgtctccttgtgcaacaaatgttgctgcatgtgttgtgtccaatgctgctctaagctcaatgatcaatgtgtccttgtcttcacacagctcttcacagcgattgcttgcatcgcctgctttgaatgttgctcaactgtttgctgttctggagacgatgggtagttagttaaattataaaaaaaaaatcggttttgaattcgagtgtaaagctttaaaagtttcaaagtaagtttgtacattttacatacacactgcatgtaatttctgtacggcctgatcaaatataaaagctgtgggttttctgtatagttgctacagggaagagagtgtaaaagaagagacaaatccatgtgtttccttcacaatttactcgatttcgatctcttaaaatggtccacatattataagtatataacgcaattgtggtgtaccaacaaagtccacaaagatgggatcaagtgctacaaaaatggtgacttgaagtcgtaagaaactgatatcgagggtgtatagaaacttgaacccaattttctaatcgctggctttttgctggcttctgggacttgtgtttactgtgtctttaaaaacatgggaccacttgatcatctttatctcctaaagctatttcaagaagtaaaagatcattgacagaaaaagaaaatttcttggagaacattgacagaaaaagaaaatttcttggataaacacacacatacatgtgcttttatatatgcatgtctctgaaatatgaaggttggttttcatatatgtctaaatcaaattaatagtgttgatctttctttgatcgtgcaaaaatcttgatcttgttgttctacacagatttttagttgggttcaaagaaagcttagcggaaagaagcatgtgcctacttcagattcttgtgagtaaatattcttattattcatagactacatgaacagtcttcgcataaatcatttgagcatattttcatatttttgtttcatatgtttgatgatgtatatatagctcaagaaccatcaagtcctcctttgagtaaagaagtccaaggtttgcctcaagacgaagaaaccttcttagccatcggaacacttggaaacaatatcttccccaagcaagaagaagaagaagaagaaacagattctagcaaagatataactccggttaatacagatgttactatcgggaagaagaaatcgctttcttttcttctcaagaagatgtttgtttgcacaagtggcttcaaaactccacctcctcttcttgatttatctagaggagattcattgcacaacacacgaatggaaaag

SEQ ID NO: 144966 - DNA, 262 bp, Arabidopsis thaliana landsberg
aaaacaaaaaaaaagaggaagcaattactataggggaaaaaaaaatctgaacaaaatgatgaaactcctcttggtggtggcaacttctgttgcccttatctttagcgtcactgatttatccggtgagggaccaaaacatggaggagaatccatgttgacagtccaaatccctgatttccgtctgattcctaccaccggagctttgggaccggagagttttggctttgattttttccgcgatggtccttacaccggtttattt

SEQ ID NO: 144967 - DNA, 468 bp, Arabidopsis thaliana landsberg
ggagagtttacatggtagatttcaataatctttcatcgcttgaggccttgtcgattcgaggtgtacaatggtgttgggatgcaatatgcatgatactgcagcagagcaagagacgtgaagcatctctttatgaaggttgaattcgcaggcaatgaggctcttcaacctttccctgagattgattttgtcgagttcttcaataaccatccaaagcttcatacattcgacatccatggagcaatgttcgctgcactctgccagaaaaacagccttaagaaggtaaaaataatctcttcttcatcagaaaccttccttaccgatgaagtcaaagcctacttatcaataatgtaacctccattctctttgcagcttgagaccggatttacaataccgtgtttggaggaggttgttatcacagtgagatctccactgaacgcagaacagaagatgaacacgcttgaatcacta

SEQ ID NO: 144968 - DNA, 399 bp, Arabidopsis thaliana landsberg
atgggcgaagatttattatcggaaaactacgatcgaattgttgaatcaaaattgagaaagctcgagaagaaggacaaagtcagaataacaaacttgttgttgagaagcggcgtaatcggcgtcgtcagagagatcttgtagctccgttgcttccatactcatggtgatttcaggagaagagagaggtgatgagagagatcagattaccctggagacgaagtaagtaattagagaggaagcttacgcgtcgttgagaatattcgattacgtgtgtgtatcttcattaattttgcagttaaaaaggttttaattacaggtcggcgttgtaaccgaaccgaaccaagttgtaatcgaatcgaatttagtcaactttataataatccgaataatacgaaataa

SEQ ID NO: 144969 - DNA, 880 bp, Arabidopsis thaliana landsberg
cacgaatcttctctctttctcttctctcaaacgaacatcaccatgaatcaagaatacgataacataactccaataccaaaagcttcattattgttaatggagaatgatctatgcaagagagaatcagagatctcaagaagctcatcggtgggagtttcttctagattgttctattactatcatcatcgtagtctcaacgaaggagttccttttaagtgggagatgcagccgggaacaccgatcaaccctccgccggaagaaaacgttcgtccgattactcctcctccggcgtttctcagccttggtttccctgaaccctcagtctcagtcgtcggaaattctaataaacattctctatttccggcgaatattaagctttggagatggaagaatcttcgaaagagatatttctctagatggtcgagccaaagcatgcttaataaaggtaactaaattaaaacgttacgtttatctattggagatttcacaagatagatagagaggtcaagtctaacctataatagttggtatgattaatttagattttgattgattacactatgaaatgaaggaatgtgaaaagtaaaattcggaatgaataacggagtcattaaaaaagttgcgtctattgtgagtcacatatagaaattgcagaagtatctagatttttgtcattaatcttgcatagtcaatgaacaatatatcgtagaaatggtgtgattggtaaaagattatgtaatcattttgtcattatgcaaaccataatctaagctatagttaccagtataatcaatgtgattctttagttattttttaattttttttaagaacaccgtttatatatatgtagcatctcttatatacacaatcgcaagtatga

SEQ ID NO: 144970 - DNA, 548 bp, Arabidopsis thaliana landsberg
aataaatccttttgtggaataatttcgtgatttcgtttgtgggttatccgaattttgtctgaatttgagtttttgagaaggaaaggtttgttttttcgggggatggtggaaatgaggaaatctggaggtttaagaccggagtctgaatcggcggccaggtgccgagatgagctaccggtgaaattggagattgctgaagatgatttagaagaagagcatggtcctctcaacaaacgatctagggtttgtttatttctctccttttgtttttttcttctcagatgagctgatctaattcagtttctgcgataattcaatagcaattcttagcatgcagtgatggttttatatttagctggttgtgaattgtttggtgatgtattttttttaattattgattgttgcattgaatttagttatggagtcctgggacaagctcatcgacaatggcaccagctaagtataacccgcttgatgagccgagtcctcttggattgagtcttaagaagagtccatctttgttggagttgattcagatgaagataacg

SEQ ID NO: 144971 - DNA, 650 bp, Arabidopsis thaliana landsberg
ctccacaatccccaaaattctttcaacacttgctctccattaatcttttagataataaacctaattgtttctgttttgtttttgtttctgtgagattcttccgaggcttgaagctcaatagctatggcttctctttcagtctcttcctcttcaaccatcatcgattcaagagctcctccttctcgactagcctccgcctccgcctcttctccgtcgtgcatttcacttcccacacttccgattcagtctcatacccgtgccgctaaagccactgcttactgttcgttttccataaatctgaagatttttcttttcacttttaatttcgagtttaaagtttcaaactttcgaaatgggttttggtttttaggtcggaagattgtgaggaacgttgtgacgagagctactactgaagttggtgaagctcctgccactactaccgaagctgagactactgagttacctgaaatcgtcaagactgctcaagaagctgtaaatactcatactttatttatgcaatgatgattctacctcttgcttctgggttacatgaactgaatttggttgtttgaattgaagtgggagaaagtggatgacaaaaacgctattagatctcttgccttaactggtgtagtggctctttggggttc

SEQ ID NO: 144972 - DNA, 249 bp, Arabidopsis thaliana landsberg
acaatttttatttttcatcaagtttcttagatcatcaggttgattgatactttaatcagtgtgattgtgtatgtaaatgcatgtgtattattatttttttggttttctaaatctcatgatgaatctgtgattagagtttattgaatttgattcaaaattgtagaaatggcgtctaattcttctaacgggacgacgacgacaaagccaccacctatgccgtctcctctgcgtaattccaagttttttcag

SEQ ID NO: 144973 - DNA, 5490 bp, Arabidopsis thaliana landsberg
atggaaagtgttaagtttatggcaagagagatcatagtaatgcgacggcttgatcatcctaatgtcctgaaattggaaggattgatcactgcccctgtctcatcgtccctttacttagtttttgagtacatggatcatgatctcttaggactttcttcactacctggtgtcaagtttacagagcctcaggtactgcacataaatgttgagctaccctaatgtcaaaagcatagatttttctttccgcttcaaaatccgtttcttttatgtttctgttgtttaggttaaatgttacatgcgacaacttctaagtgggcttgaacattgtcacagccgtggcgttcttcaccgtgatataaaaggctcaaacctactaattgacgacagtaagggagtcttgaagatagcagattttgggttagcaacttttttcgaccctgcaaaaagtgtttcattgactagccatgttgtcactctttggtaccggccaccagaacttttgcttggagcctctcattacggtgttggggttgatttatggagcacaggttgcatcttaggtgaattatatgccggtaaaccgatcctccctggaaaaaccgaggtatgcaaattctcgtagatttcatttcctccaaattcaggttgcatcttgtttgcttcaactcaaatgtagcccttaatctttctaggtagaacaattgcataaaatcttcaagctttgcggttcaccaacagaaaattactggagaaaacagaagttaccatcttcagctggattcaaaaccgcgattccttataggcggaaagtatcagagatgtttaaggactttcctgcaagtgttctttcacttttagagactttactctccatagatcctgatcaccggagctctgcagatcgtgcccttgagagtgaggtaactggttcatgatgttttactatgttcttggtttactgagatcatggaagcattagtgacaaaactctgttcttttgtcagtacttcaaaaccaagccgtttgcttgcgatccatcgaacttaccaaaatatcctcctagtaaagagattgatgcgaaaatgcgtgatgaagcgaaaaggcaacaacctatgagggcggagaaacaagaaagacaagactctatgacgagaatatcacacgagagaaaatttgtaccaccggtcaaagcaaataactctctgtcaatgacaatggaggtaagtaactgtaaaaggtcctagcttttatggtcacaatgaccgtggaggtaactaactgtaaagcaaatcactcttttggcaaatgcagaaacaatataaagatttgaggagtaggaacgatagtttcaagtcgtttaaggaggagaggactcctcatggaccagttcctgattatcaaaatatgcagcacaacagaaacaatcaaactggtgtgagaatttcacactcaggtccattgatgagcaaccggaacatggctaagtcaacaatgcatgtgaaggagaatgcactttctagataccctccagctagagtaaacccgaagatgttatcaggctcagtctcctccaaaacattattagaacggcaagatcaaccagtcacgaaccaaagaagaagagatcggcgagcatacaatagagctgatactatggatagtagacatatgacagcaccaattgacccatcttgggttagttaatgatctctgtttttttattttctcgtatcagagcagctgttttcttttactaacattcattgttgtgtttcagtataatcctagtgatagcaagatttacatgtcaggaccattgttggctcagccaagcagagtggaccagatgcttgaagaacatgacagacagcttcaggaattcaatagacaggcactcaagacaccacaaggctgaaatcattggaagagccaaattattgagcgttctaaaaagccgaatcagttgagtcagatttgtcactataatctattggtttcataaattgagttgatgtgatcggcttaaaggcataaaccactactgttcgtatagagttcgctgtgtgtacatatatacaaaatccctttgaattcattattccttctaaaattgattgttgttccgttgtaattataaggtttaattgtaatatttggttgcctcagaatcacaatctctctttgcagcttaagaacatccgtagattcaaattgaattatccacttaataaaccgagaattaaggtaacctatcttcaaaaccataaaattcaattacaaacagaacggaaaaacttgtttttgaaacgaaaaaagaaatttaactgaagatcagaatatgatgtcattctcatacacagaatctgtgtcagaaggtgtcctaagatttatctgatttctcatcatttctccagcattactatttttccaataccaaaagatacaaatccaatttaaacaaaaacgtcgagagaattctccaaaaccgtcaaacaaaaatataaaaaatccaacttttgtaagaatcagaaagaacgtagcgagttgaaatttttgtcgatcatatgaatcaaaagaccatcaccgatatgcaactttcatcatattctacacaaagcctcttgaaaatcaaataattcaccgaagcattaaagaaaaaccaaaacccaagattgggttgaatcgacaaatggtgacttttctcggcgttatcaagaaggagattgctatatataagagatgcacgagaaaccctaaacctaaaagcatgtttggaaacaaataatatttgggcttctcttggatgctattcgaactcggcccattattactgccacaagtacagtttgggcttcgtttctatccgtatttggcccattaaaactgcacatgtataatgtatttccctttctagcctcttattttcttcaaattagaataacagcaagtaagttttcaaattgctaaatattacgactttatttcagtttctcgaaaaaagcaagtctttttcctttgctctcgcaacgcgatcgattagcgatgtcgttgttacacactttcaaagagacattgaagccctgtggtagttttccgtcatcatcatcgttgcgagtttcatccacacaagaattggaaccgtcgagaaaacctcccaaatcgtcgctctcgcagcagcttctgcgtctcgatgattcttactttttaccctcaaagcacgaatctaaaatctcaaaaacccaagtcgaagattttgatcataacgaagatgatcacaaaagaaacatcaagttcgacgaagaagaagtagatgaagacgatgagagatcaattgaattcgggagacccgggttaagccgggctgaatttgactattccggtccttatgaaccacttatgctgtcatcaattggagagattccgatcatacatgttattttcttaccaaagtctttaacttttgctcatgtttaatggaactcaagtgttgatggttcttctcaaattctggaaattatttgaatttgccttatgattttgttgtaggtaccggcttctatcaactgtagattgcttgaacatcagcgagagggagtgaagtttatgtataatctctataaaaacaaccatggtggcattcttggcgatgacatgtgagttcttcttacatgagaatgttcttgtgcatttgaatctgtagctgtaatagtttatgtttgggtgataatggaactctgataataagtattgactcagggggttaggcaagaccattcagacaattgcatttcttgctgcagtgtatggaaaagacggtgacgctggtgagtcatgtcttttagagtctgataagggtcctgtactaataatctgtccatcttcgattattcacaactgggagagtgagttttctcgatgggcaagcttcttcaaggtttcggtgtaccacggatcaaacagagatatgattctggagaaactcaaggcacgcggtgttgaggtacttgtaaccagctttgatacgtttcgaatccaaggccccgttttgtccgggattaattgggagatagtgattgctgatgaggcacaccggttaaagaatgaaaaatcgaaactttatgaagcatgccttgagatcaagactaagaagaggattggtctcacgggtacagtgatgcagaacaagatcagtgagctattcaatctttttgagtgggtagcaccgggatcactaggcactcgtgaacatttccgagacttctatgatgaaccacttaagctagggcagagagctactgctccggaaagatttgtccagattgcagataagaggaaacagcatttgggcagtcttctccgtaagtatatgttgaggaggacaaaggaggaaaccattgggcatctcatgatggggaaagaagataatgtagtcttttgtcaaatgagtcaattgcagagacgggtttatcaaagaatgattcaactcccagaaattcagtgccttgtgaataaggacaatccatgcgcttgtggaagcccgcttaagcaatcagagtgctgcagaaggattgttcctgatggaaccatctggagttaccttcatcgagacaaccacgatggttgtgattcttgtcctttctgcttggtgcttccatgccttatgaaacttcagcagataagcaatcatctggagcttattaaaccaaacccaaaagatgagccagagaaacagaagaaggacgcagagtttgtatctacagtgtttgggacagatattgatctattaggcggaatatctgcaagcaagagcttcatggaccttagtgatgttaaacattgtgggaaaatgagagctttggagaagttgatggcttcttggatttcaaagggtgataagatacttctattcagttactctgtcaggttagtttttggatttagtttgatgaatgtaggagaatatttgtcgttgcaagcttttgatccattaaattacaggatgctggacatactggaaaagtttctaattagaaaaggttatagctttgctagacttgatggttctactccaactaatctgcgacagtctcttgtggatgatttcaatgcgagtcctagcaaacaggtttttattaaccgaacccttttcgatagagatcatgtttcttcttacctacttctgatctgatgattaaatgagcttttatgtgtcaggtttttctgatatcaactaaagctggtgggttgggactaaaccttgtgagcgcgaaccgtgtggttatatttgacccaaattggaacccgtctcatgacttgcaagcgcaagatagatcatttcggtatggacagaaacgtcatgtggtggtttttcgtttgttgagtgctggttcccttgaggaactagtttatacaagacaagtatacaaacaacagctctcaaacattgcggttgcagggaaaatggagacaaggtactttgaaggcgtccag

SEQ ID NO: 144974 - DNA, 1324 bp, Arabidopsis thaliana landsberg
caaattcagcacttctcatgaaaacaatcttcctcgtactcatttttgtctcttttgcaatctctccagcaacttcaactgcgccggaagaatgtggaagcgagtcagcgaacccgtgcgtcaacaaagctaaagctttgcctctcaaagtcatagcaatcttcgtaatcctcattgcaagcatgattggtgttggagctcctctctttagccgtaacgtttcgttcctccaaccagacggaaacatcttcactatcattaagtgtttcgcctccgggatcatccttggaaccggttttatgcacgttttacctgattctttcgaaatgttgtcatctatatgtcttgaagagaacccgtggcataaatttcctttctccggatttctcgctatgttatcgggtctaatcactctagccattgactccatggccacgagcctatacaccagcaagaacgcagttggtatcatgccccatggtcatggtcatggtcacggccccgcaaatgatgttaccttaccaataaaagaagatgattcgtcaaatgcacagctcttgcgataccgagtcattgccatggttcgtacgcacatatatacataccgaatatcattgtattttaaatgacatattaccgaatacataggtatatctaactttctacggatatataggtcttggaacttgggatcatagttcactcggtggtcattggattatctctaggagcaactagtgacacttgcaccattaaaggacttatagcagctctttgcttccatcaaatgttcgaaggcatgggtcttggcggttgtatcctccaggtaaccggaaactacatctatattgaggtgttttgagacaacaccataatcaatgtacatactaatacaaggaaatataaaagtactaataaccatattggtatatagctttgattattaatattcattattaatataatagtgccacattttgggtgacaaaaaaaaaaagaggtcggcccctttacataaacagcccattggcattttacaaaggcacaaatgacgacacaaatgtactgagtaataatttaccaagaatgtatgttggagaatcgttttgtcttacacatcaaccaattacaacagctatacaggtttcaggctacgagataatctacaaagatccacatttcgaaccaaggtagcgcaaatcgtcatcatcaagcgagagaatgaacttacgcatctcgtcatcataagaaaatcaacaaaatgataagacaagtcatgtatatttctggaacaaattaaatcaacaaaatcaacaaaagaggt

SEQ ID NO: 144975 - DNA, 534 bp, Arabidopsis thaliana landsberg
aagaagaaagtactttcctgatacaaaaacttgatgaaacagctatgccgacagaaaacggggatatcttcggttcttggctcctctcaattatcaaaggagtgatgttgagggagaagttcttatgcccaaagcaaacgggacggcttaattaacggcaagggagaagttcttcaatagagctactatgaaagagaagagagaaaacctcttattttttaccgagggaaatctaaaccagtcaaaatttgaataagactaagtattaattgcttctgtcccacttaattctcccacatcttcacacgtactaatatattatacatatatatcaactaaataaaaatatcacaaataaagaactaaaacaaataaaaacgaactttaataaaatcccatatcttgtttctctctctctctcaaagttagtatctcagtacctttacgctttgtttgtctctatcttcttcctgatattcagagaatggtttcatcagatgattggacgaagtgtgcgatgagagatggagcagt

SEQ ID NO: 144976 - DNA, 718 bp, Arabidopsis thaliana landsberg
actttacgctgcagtagatgatgatgatgatgatgaacgttcttctcttgtccccataggcctgttacccgaagatgtttaggagcaaagacagttgtccgagtttacctactgtaagcttctttgtactacaaaaatttactcgttgatcttcttctcctttagttttcgcttgcagcatcattataacttaaaaatgaaataaaaagtcgttgcacttctacattttgcctaagcttcatcgtagatcctatttagacatgaatttccaaaaacaaatctttgaggatataaaatctgcagagaaaggctacagatacaagggaaatcttaaaagaaaaagggaagaggacaacaaaagcctcccctctttatacaggaaatttggataaaaaccaaaaacacagtaaaaaccgcattgttgtgttggttttacactggtcaatgaaaggcttgtgtcgagacaccaagctgatggagaacactggttggggaagatgaggaagaagatctcagggcttcggccaatggtccgcccatgttgtgatgatggtggttggaacctccaccgctccaccagctcatgttttgctgatctctcccattgttgttgctccgggctccctcttcgttgcctgtggacagcttcagagagacgtctgaggaagagttcccgggcatggagatggagagacaagtggctgagctcatggggctt

SEQ ID NO: 144977 - DNA, 2890 bp, Arabidopsis thaliana landsberg
  unsure (1)..(2890): unsure at all n locations
gcagattcttgagaaaggcggttttacgcagtttaggcctcattatattacttggtattgtcctcatgctttcacgttgagtcgacagtgtaagtctcagtgtatcaataaaggaaggtactgtgctcctgatccagagcaggactttagctcgggatacgatggaaaagacgtggttgtggaaaatttgagacagctttgtgtttacaaggtggcgaatgaaaccggcaaaccttgggtctggtgggattatgttactgatttccagatcagatgtccaatgaaggagaaaaaatacaacaaagattgtgctgagtctgtaatcaaatctcttggtgagtgtgtctgttatatgcaaattaaagaaaggcaattttggggagaatgatgcatagttactatgtctttacaggaattgatagtaaaaaacttgacaagtgtatgggagaccctgatgctgacttggacaatccagttcttaaggaagaacaagatgctcaagtaaatattagtcattttcatctgtattttcctccggcgtttcatagttataatctttgaataatccgttcgtttgtgattgacatattatattatgtaggttggcaagggttcaaggggtgatgttaccatattgcctaccttagttgtcaacaacagacagtaccgaggtttgttccgcagtgttcaacttaagacttcaatatatgtagtttagcttattttataatcgttccattgcaggcaagttggagaagagtgcagtactcaaggctctatgctctggttttgaggagtcaactgaaccagctatatgcctcagcacaggtatgttttacatacccttacccagacccagtggtcggtcatcaaattaatggctggactgtagactatacactagtattacacttaaaacaattattgtgaaagttttgaatttgcaagtttctcttgcatttgacagatatggagacaaacgagtgcttagataacaatggcggttgttggcaagataaatcagccaacataactgcttgcaaggtacttttgatattcctgggaagaatttctattatatctattatctattaatctgattaatttgcaggatacgtttcgtggaaaagtatgcgtgtgtcctatagttgatggtgtgcgattcaaaggagatggttacagccactgtgagcgtaagtgctcgggtcatcttttgaataatttttatgattatgtcgacttatgttatacagtagcaattaagaatggcaaaatattagtcaagtttcttacaaagtaatatgttgtggtcttacagtatggcaagatacaatataatttattgtcagtgaatcgtaaacggatgttttgtttcacatgtctctggtgaaattcaaaatacgatcttcgtgctgatcacaagaactttcatagcaaaatatactcttagatgacttcgnaactgtgttctttgccgttgttgttgttgttgtgcttcgctcgttcacattttcatacgtatatggtggttgcattgcagcaagcgggccagggagatgtacaatcaacaatggaggttgttggcatgaagagagagatggacatgcgttctctgcttgtgtggttagtggtttctcctgcgccttgcttcacttttaagcgtataatctcacagtttagtaagatacttctgtctgaacttgtaatgccttcaggacaaggacagtgtgaaatgcgagtgtcctccaggatttaaaggagacggtgttaagaaatgtgaaggttagacctctgtcaaaactttggttaccctattttttttgtcttacttcataaacatcttcttaaggatttttcatacttccttcactagacatcaatgagtgcaaagagaagaaagcatgtcagtgcccggaatgtagctgtaagaacacctggggaagctatgagtgctcttgtagcggggaccttctctacatgagagaccatgacacttgcatcagtgagttttcatcatcttaagatttctagatttctataaatatgcatgtacgagtatgtcacacacgaaaagagtactcgcgcatacaaatagcctctgaattagaaaagttctctctctttatcaactgaaattggtnnnnnnnnnnnnnnnnnnnnnnnnnngggttcacaagtgaaatcagcgtgggcagccgtttggcttataatgttatcattgggacttgcagctgctggtgcatacctcgtttacaaatatagattgagggtaagctttttattcatccttctgctatttctgttagaagcaaaagattaatgttttatgttttggttgcctgagatgtctcttaaaacattgttttatgtaacccgatatcgtcttggaattgtatcgattacttgggaaaattgttatgaacttgctatgttcatggatttacagcaatacatggactcagagatcagagccataatggcacagtacatgccactggacagccaacccgaggtcccgaaccacacgaatgatgaacgtgcctaagagaacgaaatggtccatctatttattcccccggaaaggaatcaatgcgaagcgttcttttaattgatgtggcccttgatgccggtgttctttttcgcatctgtatctctgtaactctttgtaccaaacagtgtatcctatgttcttgtcaattgtgtccatgtgacttctgtaatagggaaacttcgatgtagctacggagaactggacaagctagtcaatagaatcaaaacatcaaagtgttaaagttaaatcttttagtcttggacaagttagacgactctctctttgtagtttacacataatgtcttaagatttatggtaaattaagacaacatcagatcg

SEQ ID NO: 144978 - DNA, 1360 bp, Arabidopsis thaliana landsberg
gtggaacttgggattcaaggaacactcctggcaaatacaacgcatctatgcctacaccaacaagcaacggtcatgcctctcgcgtgcagattcaagaaccaaaaataatgtctcctcttcctccttcttcttctccattcgccttcaaggtatttctctcttttgaatcaggaaacaccttgatctctgtatcttctctctctctgggttctgttttgctttctactttatgctatctgttttgatcctctctcgttgacttccatcactatttcttgactcaagaacaaaaccaagacccagcttctcttttgtctcttcgtgttttcttcatggtgctttttacttgcatgttcataacgaattcacattaaccagctttgaataacctgttgatgagacaccattcttttcatttttcttttttctgcaggaacaacaaggtagaccacctccatcaacacaacaaaccatagcaggaaaactctttagaactcttttcaagggtcttctcttctcacaactaaccttaatctcacttttggtgatcgttctcaccattcgcggtctcatctcagcaagtacacaccatttccacctcaagaaatggtaccctcctttactagcatctgttgctgtctcaggaattgcatctttagcatggcaatgcatctttatctacaatccatcaagagcagtcaaagcatcgatctggcttagcccaatactcacctgctcggtaggaatcttgcttgttttgattggctcagcggtagatgcaggtataggtgcagtatttgtccttttcgccattactcagtccctctatggtagctggattactccgaggattgaatacaccgataagatattatcacttgccacagcatttccacctgcaagaaccagagaagtagtctgtttatcaatcattgtcagcgttgtttactctggtttcttggtgactggaattggaggagcaacttccactagaacaaatcttgatatcttgttcatatccgtaatcatgataagcttagcatggacaatgcaagttctcaagaatgtacaacaagttgagatttcacgggcgagatatgtagactttgtacatggagaagatatgcacgcttggaatgctttccgcactcattatgaaacactagactgggagcatttgggttggcagagcgcttgtttcaatcattgtattcataaaaggatcaataacaagtgttactttaatgtcaaggagcaccgagcggcccatgtactaaggccatcattgggtttacaacgctgctaccgtcctcatgacacttcaaagcatagggcacttagatcatgttgttgcccatga

SEQ ID NO: 144979 - DNA, 1437 bp, Arabidopsis thaliana landsberg
ctctttctctatctcccagctcttccttcctcggcccagcgtttaatttccccgatttccctctccgtcacttctccggtaactttaatttgcgatttctggtcaattcaggtttttaatcattgttcaagcttttaggttatgtagttcacttgtttgcgtaatagattaggttcatgtcttcgcttttcatatccaaacccatttcatcaagtaactctcaaattgaatctgtgttgttgctcattttaagtttgaattttgcttactgggatataaaattttgtgcattgtctatgtttaagtgtaactactgaattgagatgaaagttatgagcacttaaaacgtcatcctttagactgattgactagttattggtttggaatcaatggactagtacttgtaaatgttatactttttaaacgaacgaaaatgtgcgtgtgatggctcacattgagtaaagtggctatcttgttcatttggttgtgattttttgcattttcttatgaaatgcaaaatagctgcaataggatatggtttctttggtactctgctgattattttatactcatgcaaggtcaagcccgctgagaacccatgtcttgttcttgcaaaggttagtccacagatccattacattaacattctgcattattcgttaatatactagctttgaaaccacaataattctttagattttgtacacatcaaaagcaaaaaggaaaactgttgatagattcttttgaaacaatgagattggaagatgatttatgtgttttgcgttttcagctcaagcgttgggaacgaaaagaatgcaaaccaaacagtcttccgattctccacaaaatgcatgtcaagtttggagatacagtcaaagtaatatctggacgcgacaagggtaaaatcggagaggttactaagattttcactcacaacagtaccattgtgatcaaagatgtgaacctcaaaacaaaacacatgaagagccgagaagagggagagcctggtcaaattgtcaaggtcagaaatcatagttttgtagctttcctttactttgcaagattggagtgatgattgaagattgtgcgaaatgtattatgctttccagatagaagcacaaatccacagctcaaatgtgatgttgtattcaaaagaaaaagacgtagtaagccgggtgggtcacaaggtacttgaagatggacagaaggtaagatatctgatcaaaacaggggaactcatcgacaccattgagaagtggaagctacttaaggaggctaaggataaggaaaccacccaagttgcagttacctccgcatcttagcgtctcatttctttcttcttcagtgcacttttgatataatagacctatgcattggatggatgtattgaatcccttttaaggtaaattataatatttctgctcccctcatgaacac

SEQ ID NO: 144980 - DNA, 440 bp, Arabidopsis thaliana landsberg
atgatgatgataaatatcagatattggaccgacaatggcatatgttgggctagatgttcccatgtccaagatatcgatgatacagccatggcatttaggctcttaagactacatggataccaagtgtccgcaggtaacaacgtaactcatattttgtttttggttatttactttagcatttaaccaaatgaaacgctcattctttaattttagatgtattcaagaactttgagaaagagggagagtttttctgctttgtggggcaatcaaaccaagcagtaaccggtatgttcaacctataccgggcatcacaattggcgtttccaagggaagagatattgaaaaacgccaaagagttttcttataattatctgctagaaaaacgggagagagaggagttgattgataagtggattataatgaaagacttacctggcgag

SEQ ID NO: 144981 - DNA, 168 bp, Arabidopsis thaliana landsberg
tcaaagggatcatgccggtggaaacgagaagattaagcagttggttcctgatatcaaagtatatggaggttctctggataaggtgaagggttgcactgatgccgttgataatggtgacaagctgactttgggtcaggatattaacatattggctctccacactccttg

SEQ ID NO: 144982 - DNA, 1497 bp, Arabidopsis thaliana landsberg
  unsure (1)..(1497): unsure at all n locations
ctttatagcctgaacttgcaaaaactatgttgtcgaacaagttaagtttctttgtcaaatcaaaggcaagacctgaggctgttaaacttgtcggctccaaaggacttgtctttatcgaaggtgctgattgggttcgccatagaagaatcttgaaccctgctttctccatcgataggctcaaggtattttaatccttctttcttagcttgacttgagaaattaaaccttagagccgaataacttaattttggttgtaaatttctcattttgttgatcagatcatgacgaccgtgatggttgattgtacgctcaagatgttagaggagtggagaaaagagagcactaaggaagaaacagagcacccgaagattaaaaaggaaatgaacgaagagttccaaagactaacagctgatataatagcaacctctgcgtttggaagcagttacgtcgaaggaatcgaagtgtttagatcacaaatggagcttaaaaggtgttatacaacttctctcaaccaagtctctatccctggaactcagtaagttaatcattctcctactttcagttctcaaacaagattcttaggttttgacatatattggtcttgtttcttgtattctaaggtaccttcctacgccttcgaacattcgggtatggaagctggagaggaaaatggataactcaattaagagaattataagttcgagactacagtcaaagtcagattatggagacgatcttctcggaatcttgttgaaagcttacaacactgaagggaaggaacggaagatgagcatcgaagagatcatacatgaatgcaggactttcttcttcggaggtcacgaaactacttcgaatttattggcatggacaacgatgttgctgagcttgcaccaagattggcaggagaaactcagagaagagatattcaaagaatgcggtaaagaaaaaannnnnnnnnnnnnnnnnnnnnnnnnnnnnnagctggtaatgttcatttttttcaaagggtctcttgtgagacaatgtttcttgcggttgaagaaacctgtttatttcttgcagatgttcatggtgatctttgagtcgcttcgactttgcggaccagtgtgagctttggcccgagaagcatcagtaaatataaagttaggtgacctagagattcccaagggcacaaccgtagtcatcccgcttctgaagatgcatagcgacaagaccctttggggatccgacgccgacaaattcaacccaatgcggtttgcaaacggcgtttcccgagccgccaatcacccaaacgctcttctagcattctccgtcggaccaagagcttgcattggccaaaactttgtcatgatcgaagccaagactgtgctcaccatgattcttcaacggtttcggtttattagcctctgtgacgagtataagcacacccctgtggataacgtcactattcagcctcagtacggcttacccgtaatgcttcagcctctggaagactga

SEQ ID NO: 144983 - DNA, 2022 bp, Arabidopsis thaliana landsberg
atgcagccgggggggggtgtttcattcagcgtatcacatgatgtgacttctgtacctcccactggttctttgcaacagaacttaccattaaactctccttttgtagatcctccagatctgagatcatcatcaattactagtggctcaaacactggtgagaatcagacaaatatagtccacctcccagctttgaccaggaatatacaccaatttgcttgggatgcttctttcagttctagagccagtaatccttcgggtattgggatgcctgcagagcgattaggaccacagtgggaaacaccgagaagcaaccaagagcagcccttgtttgcacctgcaactgacatgagacagccggtgcatgatctttggaatttcgcacgtggaagccctggttcatctgtagattctctctttgttcctcgagcagggccgagttcagctattcatacgccacagcctaatcccacatggattcctcctcagagtgccccaccacataatccatcgagaacatcagaactttctccttggtctttatttcctagtattgaatctccatctgctagtcatggtggccctcttccattattacccgcaggcccttctgtttcctcaaatgaggtgacaatgccatctagttctaatagccgaagccatcgctcacggcatagaagatcaggtttgttattggagagacaaaatgaacttctccacttgcgtcacatagggaggagcttagctgctgacggtaatggaaggaatcaaatcatttctgaggtatgagttccataaaatacttgatcttgtatgataatttggtagatgctatatatgaatctttatagtatctttcactatcttttattatccaatggtttgatagaagaatcctaccctcataagcatctcatgttagagtaagtggggttaagagtgtgcatttatgggttgttgtcttggtttgtagtttactttttcgtctttttgttttgaagtttttctatatgagaactagagcagtttgatgcactctgatatgacttccatatgcaaaccatattgatgtcttacgttttgggaatgctcgttttcttaatctagtttttaacctccttagcagctgctacatgtatttagttttgatggacttcgataagtgtttgaatagtgagttgcactttttactctatttgttgccagatacgtcaggtgttgcatgccatgagaagaggagaaaatctacgggttgaggtatgattttgaccctagtgattttcgacaatcctacctgttaatatcagttaatggatagaacacattccatttcctggtgaatctgttggcctgatgtgtgatcttccttttttcaatttgaaaaggattacatggtgttcgatccacttatctaccagggtatgactgacatgcatgataggcatcgggaaatgcggcttgatgtggacaacatgtcgtatgaggtatatatccttcttttttttttactgttaatcacaatcttcccgttttctaacaatgtgtgggaatgaatgtaggagctattggcacttggggaacgcataggtgatgtgagcactggcctaagtgaagaggtcattttgaaagcaatgaaacaacacaaacatacatcttcgtctccttcttctgttgagttgcatcagaacatagagccatgctgcatttgtcaggtatttgattaagtatgaactagaagttttttactcgtgtgatacttacctactaattgataagcataacataaagaaaagttggtattgctgagcttgcttccattattgataagcataagataaagccccaacacatgaactgatgtttaaaagctattgctgctgtttttgacaggaagagtatgtagaaggtgataatctaggaaccttgaaatgtggacatgaattccacaaggactgtatcaagcaatgggtcatgatcaagaatctctgccccatttgtaagaccgaagcattaaagacgccatag

SEQ ID NO: 144984 - DNA, 548 bp, Arabidopsis thaliana landsberg
acatacacacatttgtagtgttttgttttgtataataacatcatcgcatatagagaaaagaagttaagacgaccgtatatatcgttttgaaaaccgggtcggataaaaaaaaaccggtttctttaaccgagtcggcgcgcatggagctatgcaatcaaaacaatcacatcaccgccgtctcgggcgatccgttgaactggaacgcgacggccgaagctttgaaagggagccacctggatgaggtgaaacgaatggtgaaagagtataggaaagaggcggtgaagttaggaggtgagactttgacgattggtcaagtagccgccgtggctagaggaggaggaggatctacggtggagctagcggaggaggctcgtgccggagtcaaggcgagtagcgaatgggtgatggagagcatgaaccgaggaacggacagttatggagttaccacagggtttggtgcaacttcccatagaagaaccaatcaagacggtgcacttcaaaatgagcttattaggtcagttttttttgtcgataccttattaggttaa

SEQ ID NO: 144985 - DNA, 391 bp, Arabidopsis thaliana landsberg
ccaagagttattctctagccctgatgcttcagacactcttcctttagtccgagaatacgctgatggtcaagggaaatttttcgatgcgttcgcgaaggccaatgataaggatgagtagtctttcacctttaacagggaaacaaggagaaataagattgaactgtagagtggtgaattcgaaatctaaaatcatggatgtggtagaagatgctcttgaatttgcaagctcaatgtgaggaaatgtttttctttaacaataaataaattatcaatgttgtcaagatgttatctttttttcttacttccttgtttgttttgtgttacttatttaaattctatataactattaaaccttgaatccataaattatttttacctataatgaaagaaa

SEQ ID NO: 144986 - DNA, 1524 bp, Arabidopsis thaliana landsberg
acaatggaatgttcttttcaaacttcactcttactcttcatcactgtatcatactttgtagtaacagaatccattaaacctaaccgaatggcgatgaagctgatacaccgtgaatcagtggcccgtctcaacccaaatgctcgagttccgatcactgcagaagaccatatcaaacacctgacagatatttcatcagcccggtttaagtatctacagaattcgattgacaaagagctaggcagcagctatttccaagttgatgtgcaacaagcaatcaagaacatcattgtttcttgtgaatttctccgtaggacagcctccggtgccgcagttaactatcatggatactggaagctcacttttatggatccaatgtcaaccctgcaaacactgctcatcagatcatatgatccatcctgtcttcaatccagcattgtcttcaacatttgtagagtgttcctgcgatgatcgtttttgcaggtatgcaccaaacggacattgcggctcatcaaacaagtgtgtttacgaacaagtgtatataagcggcactgggtcaaaaggcgttctagctaaagaacggttaaccttcacaacacctaacggtaacactgttgtgacccaacctattgcttttgggtgtggctacgagaatggagagcagttggaaagtcatttcactggtattttggggttaggagccaaacccacatcacttgccgtacagcttgggtctaaattctcttactgcattggtgatttagctaacaaaaactacggttacaatcagctggttctgggagacgacgcggatattctcggcgatccaacacccattgaatttgagacagagaatagtatctactatatgaatctagaagggattagtgttggggatacacaactcaatattgaaccagtggtattcaaaagaagaggaccaagaacaggggtcatactagactcgggcacactctacacttggctagcagatatagcctacagagaactctacaatgaaataaaatccattctggatccaaaattagagagattctggtttagagacttcttgtgctaccatgggagagtgagcgaagagctcataggcttccctgtggtgacatttcattttgcaggcggagctgagctggctatggaggccacaagcatgttttatccattatcagaaccgaatacgtttaacgtcttttgtatgtcagtgaagccaaccaaagaacatggaggggaatataaggaattcacagctatagggctaatggctcaacaatactataatattggttacgacctcaaagaaaaaaacatctatctccagagaatcgactgtgttcaactcgatgactattccccatcaaagtaaatattgtacacgcagacatgtccatgtaaaagagactcagaaagcttagagagtttaccttttgaacacataagtatattttgaagaacatactcatccccaaattcatgttgtattctataacaacacattcatcttgttct

SEQ ID NO: 144987 - DNA, 586 bp, Arabidopsis thaliana landsberg
atggcattcacctttgaggtttgtgtgactgattttacctactctcgacactttcatgaaaacctgtgtcacatattcttataaccgttgctatcattgccagatctatggggacaaccaaactgcttcaagagattgctttaaaatgttcaaccctgttgatctacccaatttcaaggtactatgtttttgaattgtatcaatttctttcgaatatatacccataaaaaggaaaataaaactcacaacttggcttgctgctgttactcagagagttcttaatgactggtctgctgcattcttcacgattttccaactgggaccgctccacttagacggaaacacttccaaagctgcagataaatgggtgtctatagacgagtatttggatggctacttggtggaaaggaagaacagatatgggaaaaacatggaagtgatcgatgtcggaatgcaagagataaaaacttacttcaggctcttcttgttgtcttcagtacttctgatgttcatgttctggtccaggatagcgaagagcaagtatagtagaaactccatgcctgtcttgccatgaaactaatggagg

SEQ ID NO: 144988 - DNA, 3341 bp, Arabidopsis thaliana landsberg
tagtggctcgtttcgttgcctcagatctctcttcgatcgagcttcttgggtcaaaaccagagagctaaggcaattctcatttctcacttctctctcgattccgtcgtatctccgacgatcttgctcccgcacgatccgattgtgtaattcgttcgattttgcggtattgtgcagaaacatttgctgttgaagcagaacaagaagacgaagaagtcgaaataggaaggattaaagatggcggctggtggatttttgactcgagcatttgatacgatgcttaaggagtctggaggaaagaagtttcctgatctccagaaagctattcaagcttatcaaggttagatctcaatttctcccaattttttgctcaaaatcgttcgatcgttgcttttggtccgggtagattccacgatcatagccatctgctagatgtatttgactaaaatgtggtcgcacaagctgagatttcaggttattcccagtgtttggttttgttagtgaactttagtatgatgtggtaggatacagctaagactatgaaattcgatggaatttaagaccttctggcttatagtttgtatctgacaattagacctgtgaacaaagatgctacgtatcagaatagttttacttcttattcgttagttcgagtaatataacctttttggaagacgtaaattcttttaggaatcaatctgtgctttattgtacaagaaagttctggacagggattagttacttacatgattacagaatggtttgcttagttctttgttaaattaaagagaagtgacgtctgttgttacaaaatttgtttgaacttgtcatcttcggggtatagctacgcgtaagctgcatgtgctacttagattttcaactgatctatatcaatgaggtgatattagaagtagtatgaaggacattcactccctggtgctatccagaaatcaatgaattttaaggcttctctccacattttgtttttatttttggctctaatttggccttggtcacaaatgttttcatatgatagaagaaattaggtggtaatgatttttctgtcgctaactggtttagcttccatttgtgattgtttatagatggttcaaaggttgttacgcaggctgcaccctcgagcatagtggagaggtaatgaccaaaccagtattccattttctgctagttgttggattgagttttctcgataaaactgatagttactttgaaattttattgtaatgttaggtagtcatctggtgatgtttatcttagtcaccttttaaccatggtagctactagtcacgcttgatatcatgaaaactctttgccaaatcttatttgtcaaattttagttttctgtaagagtttgagacttccgtgtttttggttatcttttatctgaccatttcttaaagggttttgtaatttatatgtaaaggtggcttgttcaacagtttatttcgtctacactgacactttatatttaacttcagttcacaagctgaaggtggaggtgaaaaaacttgggggagaagcagatgaaccgcaaaaagtcacaagtgctgaagtagcgcagcaggctagccagtcaaaaagtgagactataaacgtttccttagcaaatgctggacacacattagggggagcggaagtggagcttgtgctgaaacctctacgccttgcatttgagacaaagaacttaaaaatatttgatgctgctttggattgtcttcatgtatgtaattttttttttttaaattgctctgagtatccctggacgtttgctccattaaagttttttcgtttgagattcatttgactctgtacttatgtaatgtatctcctgtcattctattaatgttctgtatatgtttttaattctttgtttgttgcaagcagaaactcattgcctatgatcatttggaaggggatccggggttggatggtggaaaaaattctgcacctttcaccgacattctgaacatggtttgcagctgtgttgataattcatcaccagacaggtatgtaccttcgtgtttcaaaatcttcttgagattggttataccaattcttaaagctgaaaattttgtgcagcactgtactccaagtactgaaggttcttcttacagctgttgcttcaggaaagttcaaaggtaattctctgatgtagaaagctatgttttgtaacttttagtgggctgaactgtttcctctacttattttgcttgcaatatcaatttaaattattttaatctgtttttatcgcagtgcatggggagccattgctgggagttattagagtttgctataacattgctctaaacaggtgtgttttctcttcttttttctaattttttaatcactctaggtgcaatcactaaatgcagaatttacatgtagcaagagcccaattaaccaagcaacttctaaagcaatgctgactcagatgataagcattgtattcaggagaatggagactgacattgtaagtaattctatatttctcgatgttgcatatgctttattgaatttgaatgcatgaaaacaaagtaaatgttgaatggaggtgctgaccattaaatatatatctaggtttccgcatcatccacagtgtctcaagaagaacatgtttcaggcgacacttcaagccctaaaaatgaagaaataactgcagctgacgaaaatgagaaagaaatgaccttaggagatgcactcactcaggctaaagacacaactcttgcatctgttgaagagctgcatacccttgtgggcggtgctgatattaaggttggtctttcaccttatatcgtaaacatggctccatatccgtgactggattagagatgtattcttcaaaaaaagaagtactgaaagaattatggaaaaaaagttagaaattccttagaagaaaaagattgtatattgttttgtagcgttctttctctatatacttctggcatatcctctttgttgcttctggataagtagagatattcgtctgtcacttgtctttgaatgcccactagatatattttttttaacatgtctgcgtcccataagctctatagagtttcctgtctgaattttaaatagtgaggctggaagaagttctctagaataggtttttcgttcttcctggtagatagatgactcttgtatactgtggttcaaaagttgtggcttttgcggacaatgaaattctgaatcctatgatcagggtttagaagccgcccttgacaaagctgtgcatcttgaagatggcaagaagataaaacggtatatgtcataccactcttctcaatttctgagtttaagcttttgctttactgatctatgtacca

SEQ ID NO: 144989 - DNA, 1482 bp, Arabidopsis thaliana landsberg
caatgccgacttaagatagagaaaccaaccttttgtatgatccatcgactggtacgaagacatccagagccgcagatcggtgagagtctgagatcggctggaaaacagaagcagcaccgcaaattgctacggcgagtatcaaaaccagaaaccgtacgttacctccggccatcatcactgcataagaaaactcaaaaaaacagataaactcatccaaatcaatacaattacacatctacgacggatggattccaaaatcaaccgaagatttaagcttcttacagatcggaagtagatccgtatagtggaagaagcggatcagaggtcgacgagtctcagtagtcaacggagactgaggtttgaggtaagcctaggatcgatctatagcttttgaaccagacgacgaaccagagagaaggctaaaaaatgagtgtgagtttgatgacactacctgatattaccgatttaccctcgatttgaacttaaattacacttcatgaaacgacggcgtaccttgaaaccctaaaccttgcagatcaacttcaatcaccattttcatttcaaacagagagagctctgaggaaatcagaatctgaaaatgatcagattcgcgagaccaaaacctataattgactcagtgagttacaatcttctccagaaatgttacgctagtggaacccccaaaggaaaatcgaagctgaagacaggccaatcattgaaacgcaacaaactcacaatcaaaaaaggcggtggaaacggcggtggcagaggtggtgatgaggtggataagggaaaaggaagaatctcagatcaatgcataaacgctccttgtcctgttcgttacctgagacctaaggaaagagagcgagaagcgagacgagagaagctagggctaatcagtaaagcgaggcaaaaagagattgattttcagaagaaaggtggatcctatacgatgggagttactactgcgccgatgaggattgggactccaggattggattacatattcgttagggatttttacggaagatgagttaccaaagtataaggttacagtggaggatgggattagacttgcgaaagagtatagtagagtgcttatgagagagcatagagcgagacgtgtagcggagattagtttgatgaagatgaggaacgctgcggttgaggcattgccggagaatttgaagaaggcggctttagtgcgtgatttgactccgtttccggtgagtcgaggtacggctacgcttactccacctattgaagggtatttggagaggattatgaatgctgcggctaggaagagctctggtaaagagaagttgagatgatcttgttaaggttagaggaatttgtctttgcgtcattggttttctcttgttttattagttgtgttgattggatttcgatcaatggatataactttgagacatttgtctttattttgtgatctacttgaaataaaatggtcactggcagccg

SEQ ID NO: 144990 - DNA, 470 bp, Arabidopsis thaliana landsberg; identical to SEQ ID NO: 4420

SEQ ID NO: 144991 - DNA, 371 bp, Arabidopsis thaliana landsberg
gcatcagaaacttagctaccaaatgactccagatgatgaagtggaagatatgtttgtcttgttaagtgaagtgaagagacagataccttccatcactgcagtatcgtctggtgccattgcatcagactaccaacgactgcgtgtggagagtatttgttcaaggttaggccttgtttctttggcatttttgtggaaacaagatcagacattgcttcttcaggacatggtaaactgtttcagtataagagaaaatctagattcaagcctatttcaatctcaattttttatttttctttttcgtatatgttttacttaactcgtttctcgtttacttgcagatagcaaatgggatcaaagctattttggtcaag

SEQ ID NO: 144992 - DNA, 994 bp, Arabidopsis thaliana landsberg
ggaaaatcaaattctcagacaacttttttcgaagaagacgacgaattttaaagattttgttttctatattctcttctggtaatctttttgtttgtttcttttttttgtcatccatatttgatctttctttgttgctgattgtcaacttttcttttactagctgatttttcctttttcaaaactaagcaagtttgtgttcacgtcttcatcaatgacataattgcccttagtttattccacatagttgtcatacaaattactttcgtttctatgtgttttatattcacaatcatagatgaagttcataacttagatgtttaagaaaaaaacagagttcataacttgtgattttgtgctttgtcttatttgttagattacgggtacgtaatttcttacgaaagaaggctctctttaataagataaattcatttttctctcatcttttgagttaatacttcttgacctgatttgagtttggtcgttaggtttttcttgatttcggttcaagttttctcttagctctgaattatatgtaccgtgtaagaaagtgaattatatgtaccgtgtaagaaagtgaaattttcggttcaagaagtgaaattttctttaagttgtgtttttttttttcacttatgaagtcatatgataatttgatatgaatcttaaaaagcttttttttttatgacatgatgcagatagtgaagtctcggagactgaatgatattgtttctggtcaacttaaccaatttcagaacatggcaaacagagcagacaactcaatgcgttggtttgtgacttttacaagattattgaatccttgagttcattgtgaaagagatgatgattactgattcctagtgttctgtttttatttttgtgcagttcaaatagtaagaaaccgaatgacggtatgatgctcgtaatatcgattttcgcgggaatagttatcggatttttattaggcatatctttccctacattatcactaactaag

SEQ ID NO: 144993 - DNA, 2445 bp, Arabidopsis thaliana landsberg
tataaacacattcaaaagtccacaagcactacctcattgcgtttgctgttacctaaattaattattatttgtttagtatagttttcttggacaattcttctgcttctttgaaaaatattcttgtctatgtctatttataaatgttgaatcacaattaaacttaaaccgagtctttcgtacaaaacttcaaacataagctaatttcttcctcttgatctctctagcatcattacataaccaaatcatattctcgacatggcaatgaccgcggctgcagttccatcaagtggatctttccagaaacaagacgaagagtggcgtgctgttctgtctcctgagcagtttagggttctcagactaaaaggaacagagtaagtcctctagggtttttttatttatcttatttttctgtttacttgagaagtttacctgaacatgttgttaatggttaatttggtgatttagtaaacgaggcaaaggagagtttacaaagaagttcgaggaagggacttatagttgtgctggttgtggaactgctctttataaatcgaccactaagttcgactccggttgcggttggcctgcgttcttcgacgccatccccggtgctattaaacaaactgtaattcgttgactctctttctctatagcaaataacatatttcgagcatccatattcgtgaaactcatttatatatgtgcatttaattttgacgtttttttagtttggacctaactgatatattggcggaacaacatgagacatcacatgcaattatgcaaattaaagtactttttgttgtttttataattcatcttttggcttcttcttttttatcgtatgactttttatagaagaacccgccaatttgattggccaccacgtcaagattctcgtatgtaaaaaagagttaattagttttttggtgttagaaaagtaattccaaaacaactttaaagattgactattttagcaaaaccggcaaaaccatttaaagattgtaattacaataactaatttgatgtttttttaaatgtatatagccagaagcaggtggaagaagaatggagataacatgtgcagtgtgtgatggacatctaggccatgttttcaaaggcgaaggttactctactccaaccgatcaacgtcactgcgttaacagtgtctctctcaaattcgcttctgctgattcttccaaataatcatcactgatcggtcggaccactttacctcatgttatccaaggaattatgatctacgatacgtgagatgcttgctagtttacattcctactcatgtaatattattgtaataaagcttcgtttaatcatcaatgctctatagttataataaattttggttactataaagaaaatttctatatatctgttccttactttcttctacttgaagaacatattacaacttcttttactttaagattttgtaacaataaaataaagctgggataatagacgtacgcaattaattgcacagcctattgatgtgtcaatcacagagaaattgcttccgctcaccagctttggtagattcgctaataaaaatgaaattgaaattgtttgtgacatcactctgctcaacaaagctagtggtttggatgtcggtgttctagtccctgatgataatgaggatattctgatcatctctttctccttggaaaaattccgatctcccttggcgtttgtacctcttccaagactaagagctaaagatgaagaactcactctattgtctcactatggtaactggaccagacgatccatgcatccctaagaaggaggacaaagaacaaaggtaaatgaggtaacaaaggtgaaatgtaaaggtgaaggaggtaataaaagtaaaggaggtaacaaaggcaaatgtaacggattaatattcatagaaaagacatagacaaaagacatttatatgtacacatttttcttttggtttcttttttttttccatgtagttgaggatcctatctcaagatctgaagacatgaatctggttcatgtgacattcatataaatatatgacaaacgatatgatgctgaagaagaaactgtcatgttatgtcaagttctgaaatcagcaaattcaaacaacacaaacacaagtatgaaacaaaaccaactgaatgatcaactgaacagatcatctatgtttgctgccgaagtttccatacttactctcaggtactgaaattgagcctttgcgtgtgagataacctcaacagtgtgactaagagattttcaagggtaaatagaacttgaaaatgttagctaaaaagaaagctaaaaattactaaaaaacaaggacaaaagataaatagtaactctggccattaagagtatgtatcataaaatcacaatagaccatttttaatctaattttagatatttttttatttaatagaatgcaatatgcgaatttga

SEQ ID NO: 144994 - DNA, 509 bp, Arabidopsis thaliana landsberg
ctccaccaccactcttccggaattttcagccagctgttgcaaacccaaactcccttattactgacagttctccaaagtccactgttaactctactcttcaagcacctagaagaaagtttgtagatgaaggaaagttacgtaaggtaggattcacataatcacatatctctacttgacatcagcaaatcataattttgaattattggtctttctctgtaatagtctatttcgtactcgggatgaaattttctataccaactttcttaccgtgagtgcatgtctcttatgtttgcagatttctggcagactattttctgattctggtccacgacggagttcaagactgtctgctgattcaggggcaaacattaattcaagtgttgcaacagtaagcggaaatgtgaacaacgcttccaagtatttgggaggttctaaattgagttctttggcacttcgttctgtaacacttcggaagggacactcctgggcaaatgaaaacatgaatgaag

SEQ ID NO: 144995 - DNA, 820 bp, Arabidopsis thaliana landsberg; identical to SEQ ID NO: 68735

SEQ ID NO: 144996 - DNA, 1736 bp, Arabidopsis thaliana landsberg
aggggctaagagagttcgccggctgtggatagccagtaaaactaacggcttggttaaccttagaaacgatgaagctgtcgaggttgtatatcaaaccagcctgcaaactaaaaactttcctgaccaactcaaaacccaaattctcaggaatcgaagacagtctctgtctcgtctcatcattaatcggagtaagattgtgttttctgtagatattctctaaagctgtttcaatccgacccgaaagagcgatccttatcctcgaagaagcttgattcatgctgcgaaaatttatcatttttcttcccgttcgtcggaatctcacactttcttcttcttctctcttacttcagaatttaagggttgccaaaaaaaaatacccagtagagaaacagtttctactgttagtgattggatttgatttgacgatgacacaagaagaaacagagaggaaataaaaaggtcggagctttttctctagattttcttttgactccattgaaacaaattcatctaaccgcttcggcgcttactcaagtaattgacatgaatgcctttactcttagtctgggaattaccaaaatgccagatttttgtcgtcacccgatgcaaacgccaagacatatcgcgttttctgcaaacgattaattcgtcgataaaccgggttgaaccacgggtagcctgttcagtaaacgggttcgatccctgaaacggcaccgctttgataggttttaagtagggctagctgaaacgtcgtcgttcttgcgttttcgtcccacaatctttgtcgtggttttctgctgtcttcttctccgtcgaacttctccgaccacttcgtatagagagagagagtgacgaagagtttacgggtatttgtttcatcactaccataattgactctcaatatcaaatcacattgagagaagctaatttcttcttgttcttagcaaaaagattagtctttttttgttcctgaattttgttttttgcagaatcgaatccaataatgagtactgcgtcggcttttagttcaatccaaggatgctggttcaaggtcaattcctaaaactcttcaaaatctctgttttttttcccactgaatccacattcaagctcattgtagcttgtgttgtgttattgcaatctgataatcatgtaaatgtgggttttctttgttttgaaaagggcgaaaggaaaattcgtgtagcggataagcgagccaagaggcttactttgggatcccatgtggcttcgccatcttcaatgagcttcagagtttcagctagtagttctgttaaacctgaaaaggatattaggattggtcttcttggtgcaagtggctacactggtgctgaggtttgtgcaatgttgaatctgtctgtttcaagtttaattttcttggaattgtttgttttagtgatctctttggttttgcaatgaatcagagcttaagtggtatgcatcttgttgcaagtttttgactttatgggtattggccttctaatttagcttaagctgtaaacatatgcaaagttaagcttttctcgataaaagaaagagaaaagtcttatagtcgttgctttaaagttgtttaaaattacaaggtaaagaatggatgaggcattcaaggtttcattcaaacccatgagatggtaagtttactcttatttattgaattgcagatcgttaggcttcttgcaaatcatccgcatcttcaggtcactttgatgcctgctgat

SEQ ID NO: 144997 - DNA, 547 bp, Arabidopsis thaliana landsberg
gaggagcgtaatggtcagaagtttgaagacgcacctgttgaaacaccgaacgaggataaaaaaggatttggtgatgtaagcttgcccaaagaggatgagagctcaagcaaacaagataaccaggaagagaagaaagaagagaaaactaaagaagagtttactccatccagtgagacgaaaagtgagaccgaaggtggggaagatcaaaaagatgactccaagtcagaaaatggtggtggaggtgatttagatgagaaaaaagatttgaaagacaactcagatgaagaaaatcctgacacaaatgaaaagcaaactaaaccagaaacagaggacaatgagtcgggtgaggatggtgaaaaccaaaagcaatttgagtctgataacggtgagaaaaaatccattgatgatgataaaaaatccagtgatgatgataaagaaaacaagacaggcaacgaagatactgaaaccaagactgagaaggaaaacactgagacaaatgtggatgttcaagtagagcaagagggtcaatccaaaaacgagacctcag

SEQ ID NO: 144998 - DNA, 512 bp, Arabidopsis thaliana landsberg
ttctggatggtttcagggatcaccagccagggaagctgaatcctctaaagaaggttctaggcgtgaaaggctgtctatgcttgctaaaagagctgttcaggctgcacaagtattgcagcataagaaaccgacttcaagtgttgatgctgatataacaggtggctcaacattaagctctcaggctttgccaaaacaagaagtgtcaacagcaacttctaaaagttacacattcaaagcaggcatgatgtttttcttttcatctgactgttcaacttcttttgatgtaccactcctgttttgttgaacaagcatttttatcattttcaggtgacagagttaaatttgtaggtccttcggcttctgcaatttcttctcttcaaggccagcttaggtattgtttactgtttttaaaagtcttcacatctgctgtaaatgtgtgttgtattcacaactttgctcttactttttccctgctatgtaatataggggaccggccattggttcccagggaa

SEQ ID NO: 144999 - DNA, 1006 bp, Arabidopsis thaliana landsberg
gaacaagggaagaagaatccaacttcatcaattcagattcgcacgcttgaaattatctgaataaaaatcgaaagctaataatgagctgatcgctaaaaatatctctcgaattcaatcttcctgattttcgatttctgtctctagggtttcaatatccgataagtaagttttgttcttgctcttcttacctcattcacatatctctctttgattttattttttctgaaattcaaaaagctttttctgttagattctcataacctaattcgttttgaggtatttattattatttcttgatcccacatttgtttcaatcgctttaagctccaaatttgtaatttcagtgtcatcttcgtacttgtactgaaatgcattgaaaatggcagaagcgatggagacggagatggatttctcagatggtgaacaaactaatggtaattcacatgttactgcctcccaatactttgctcctccgggttataatagaagtcttgtggctgcttatgggaatggaaacacaaccattggattagaaaaaggaatagaaaggagactagatcatcatgagcaactacctggttatatctttatgtgtaatgggagaacgaaaaccgattgctaccgttaccgtgttttcgggattccaagaggaggaaaagacgttgttgagagtataaagccaggcatgaagcttttcctctatgactttgagaagagacttctttatggtgtgtatgaagctactgttggtggcaggttggatatagaacctgaagcttttgaagggaaatatccagctcaagtaagcctgtgtgtgaaacacatatgattttgtttatatggcactgcctaagattgttcttttctctattttcttacttgattctggcaggttggatttagaattgtcatgaactgtttacccttgacagaaaacactttcaagtctgctatctatgaaaattacaaaggttccaaatttaagcaagaactttctcctcaccaa

SEQ ID NO: 145000 - DNA, 429 bp, Arabidopsis thaliana landsberg
ccttctccctcagatcaaaaaaaaccttcgtgtgcgtctctcgtcctctaaattgtcgaaaatgctggctaggctcgctgcgaagcgtcttctcgagatccgtcaagttttccgtcaaccaacctctcaggtattctctaattccttgcttcctctcagcttctctccggtcgtttcccgatctcattctccgttttggtcatttctatctacaggtgactcgtagcttatcgacggccttaaactacgtgagtgttggatattctatctgatctatgcttcaattttgtctaattttatccgaaattaattgtaatttgatttttgttgttgttgttgttttgattacttatagcatctggattctcctgataacaaacccgatcttccatgggagttttcagaggctaaccaatctaaggtcagtga

SEQ ID NO: 145001 - DNA, 1792 bp, Arabidopsis thaliana landsberg
tcatctaagcccttcttccgagatgtacgactgtcttcctcaagtcgttgtctgaattctcttttttcccaaaacagacaccacctgagtctgctgtctgaagcctcgccggagggagatgatgaagaatcttccggaggttggtaatggcggtggctcgggttttccgacggtctctgtcggaaataagaagaataagtatcagagaatggactcccacgcggaggaatcgcagaatcatcgtgaagcagaggctagaaacagtagaaccagaaaatacgttatggcttgtgccttttttgcatccttgaacaatgttcttctcggctacggtcggttttacttatataatcggattcttcttcttcttctttactttgttgacttacaaaaaggtgtgtgtgctctgtttttggtatttgtcagatgttggggtaatgagcggtgcggtgttgttcatacagcaggatctcaaaataacggaggtgcagacggaagtgctcattggtagccttagcatcatctcactctttggcagcttagccggcggcagaacctctgactctatcggtagaaaatggaccatggccttggctgctctcgtcttccagactggtgctgccgtgatggctgtcgctccgtctttcgaggttttgatgatagggagaactttagccggcattgggattgggcttggtgtcatgatcgctcctgtctacatcgccgagatatcccccaccgtagctagaggatttttcacttcgttccctgagatcttcataaatctagggatcttgctgggctatgtttcgaactacgctttctcggggctttccgtgcatatcagctggaggatcatgcttgcagttgggattcttccttcggtgttcataggatttgcgctgtgtgtgatccctgagtcgccgaggtggctggtgatgaaaggccgagtggacagtgcacgagaggtgctcatgaaaacgaatgagcgagatgacgaagcggaagagcggcttgcagagatacaactggcggctgcacatacagaaggcagcgaggacaggcccgtgtggcgtgagttcttagcccatctcctgttgtacggaaaatgctgattgttggatttggaatccagtgtttccagcagatcacaggaattgacgccacagtctactatagtccagagatcctgaaagaggctgggatacaagacgagaccaaactgctcgctgcaactgtcgctgttggtgtcacgaaaactgtgttcatactatttgccaccttcctgattgatagcgttggccggaaaccgctgctttatgtgagcacaataggaatgactctgtgtctcttttgtctaagcttcacgctcacattcctcggccaaggaacgcttgggataaccttggcgcttctctttgtttgtggaaacgttgccttcttctccataggaatgggacctgtttgctgggtcttgacatcagagatctttccattacgattaagagcccaggcatctgcgcttggggcggttgggaacagggtgtgcagcggtctggtggccatgtccttcctctctgtgtcacgtgccatcactgttggaggaaccttcttcgttttctccctcgtgtctgcactctcagttatcttcgtgtatgtgctagtccccgagacaagcgggaagtcactggagcagatagagttgatgtttcagggtgggctggaaagaaaagacggtgaagttgagcttggagatgctgagcgtcttgtgcgcaaggaacaggagttttga

SEQ ID NO: 145002 - DNA, 808 bp, Arabidopsis thaliana landsberg
atgcttttcagagatatgatcatgcttctgccaagcagcattcagataaagcatgagaggactggttagcagctgagaagctaaatgctgaagcggccaagaagatcataggtataacaaataaggataatgacatatggaagttggacctgcatggtctccatgccacagaagctgttcaagccttacaagaacgtttgcaaatgattgaaggtcactttactgtgaaccgttcagtatcaccaaatagaggtaggtcaaagaatgcagctctgcgatctgcatcacaagagccttttggtagattagatgaggaaggcatgcactgtcaaagaacttcttctagagaactgagaaactcattgcaggttataacaggtatgtcgattttctgtttatgaagcatcaagtgaactgatgtttccatggttttaagtataataggaggttcacacataaatctgtgacggtgatgttctatgtccattgtaggtattggtaaacacagtcgcggacaggcttcacttcctctagccgtgaagacattctttgaagataacaggtgaagatcactctttgatcttctgtttcatatctttgtcaatcattagtataaataacaagctgaggaatgggatgttggaattgcaggtataggtttgacgagacaaggccaggagttatcacagtgcggcttaaattccgacacagctaaaaatttgtttgatctcaaactaacaaatgcttgtgtgttacttcattgttgttgtatcatatccccttaagacatgtcatatcattctgcttt

SEQ ID NO: 145003 - DNA, 799 bp, Arabidopsis thaliana landsberg
tgcgacggtaagctcaagagaggctgagtacactgagctgcgatcggcgactgtctcttgtccgggatagtgaaagatgaagctgaaggttgtgtatcgtaaggtctccgattacatctgttacgatctgaaagaaatcgtcttaccttcatcacttcccgatcctcctcacgtcgttaaacgccgcaaattgacttggcacgagcgattcctcgtgagctttccttcactctctcttcctcttttttatttgaattttccggtagttttctattgagaggatctggggaatcaaaattttctttcaaggacaaacaaagttcgcattttttcgtgctctgattttcttgtgctctatttagtttttttgtccaatttagagtgaatgtgttctcgattaggtctttaatcagcagatgtttgagatgatacagaatctggaagtgtgtgatttcatttatgtatattgtggaatatctgaaacacaaatgtgacaattctctagtttgagcaaaaaggttcgtcctttctagaagaagtctgtaattccacgtctcactattttcagagtaattggtgttttcttctctacttgatagtaaatttagtgctaatcactgggtgaaatattcatggttgtgattaggtgttgaaggaagcttcaaggctttatgctgcaagctgggtaagagatataggtcctgaacttcgtccaaatgattacaagaagcaaggggatgctgagcctaaaaaacaagcgaaagaggcagagaacgagccctctgttttggaagatctt

SEQ ID NO: 145004 - DNA, 343 bp, Arabidopsis thaliana landsberg
atggacatggattgtttggtaaaagattcccaagtaggcaatggtttggagtttctagaagttggggatgacactggtggagtgacaggagcactgtttgagattctaagtggaggaagcgatgaaggaataccaccattcctgaggaaagggaagattgtggagatattgtgtggatcaccaactcgagaaggactcgggaatgaagaagaggaaggactgacttggtaagataagatggggctatcaaaagtggaagaaagaggactttggttatgggaagagtaaggagttgctcgagaagatgatccaaccatgtcaccaggtagaggcttgcgtccct

SEQ ID NO: 145005 - DNA, 544 bp, Arabidopsis thaliana landsberg
cacttagctcacaacgagagaacaggcaaaaggaaagaatgagagattctatcgattcataaaggaaaattgtacctctccaattctctgcttcggtcatcgtagatccatgagatcttcagcgggaaagcttctctcccattctctacggagaaactgcgggaaacttggtgatggattttggattccggctacgaggtctcagaagatgtggaattcgacggtaccgtcagatgaaaatcctgatcaaaattcgatcgatgcaggatcttcaatgcggaaaccaattagcttatggcctggaatgtatcattctccggtgactaatgcgctttgggaagctcgtcgtaatatgttcgaaattcctaccggagacgacgcttctcagtcaaaattgacggctaaatctccgtctcgaagccgaacgtcaattctctataagttttcttctgattttgttcttcgagaacaatataagaatccttggaatgagattcgtactggtaaattggttgaagatcttgacgctcttgctggaaccatc

SEQ ID NO: 145006 - DNA, 4352 bp, Arabidopsis thaliana landsberg
  unsure (1)..(4352): unsure at all n locations
atggctggagaacttgtgtcgtttggaataaaaaagctttgggacctactgagtcaagaatgcgagcaatttcagggagtcnnnnnnnnnnnnnnnnnnnnnnnnnnnnnnnnnnncttgttaagctcttttctaaaagatgcagatgcaaagaaacatacaactgcggtggtgagaaatgttgtcgacgaaataaaggaaattgtttacgacgcagaagatataattgaaacatatcttcttaaagaaaaactttggaaaacaagtggaatcaagatgcgtatgagaagacatgcttgcattatttcagatcgtaggagaaatgcattagatgttggaggcatacgtacgaggatctccgacgtgatccgagatatgcagagttttggagtgcaacaagctatcgttgatatgcaacctcaaggtgataggcaaagggagatgcgacaaagattttctaaggacgacgatagcgattttgtggggttggaggtaaatgttaagaaactggttggatatttggtggacgaagcaaacgttcaagtggtttccataaccggtatgggtggtctaggtaaaaccacacttgctaaacaggtttttaaccatgaggatgttaaacatcagtttgatgggctctcatgggtgtgtgtttcacaagattttacccgaatgaatgtatggaaaaagatcttgaaggacctcaaacccaaagaggaagaaatgaaaatcatggagatgacacaagatacactccaaagtgaactaattcgattgttggaaacgtctaagtcattaattgtcctcgatgatatatgggaaaaagaagattgggaactaatcaagccaatatttccaccgaccaaaggttacctcttatggtacacacactagccagtggtcatactcaataaactagctaactctttgtgtttgtttttgacaggttggaaagtgttgcttacttctcgaaacgagagtgtcgccatgcgtagaaatacatcatatatcaactttaaaccagaatgcctaaccactgaagacagttggacactttttcaaaggatagcccttcctatgaaagatgcagctggtacttttaatgcatctctatattgtcagtatcttggttttgtagtctacttgtaaaacgattttgacatattgataacgttgtgcagaatttaagattgatgaggaaaaggaagagttgggtaagctaatgatcaaacattgtggagggttaccattggccatcaaagtgttaggaggtttgttagctgaaaaatacacatcgcatgattggagaagattatctgagaatattggatctcatatcgtgggaggaagaactaactttaatgacgacaacaacaatacatgtaactatgtattgtctctaagctttgaagaattgccaagttatttgaagcattgtttcctctacttggcccattttccagaagattataagataaaggtagagaacttgtcatattactgggctgcagaaggaatattccaacctaggcattacgatggagagaccattcgagatgttggagacagctacatggacgagctggtgaggaggaatatggttatttccgaaagagatgtagatactgagagatttgaaacttgtcatttgcatgacatgatgagagaagtttgtttgttaaaagctaaagaagacaacttcctacaaattaccagtaaccccccttcaactgcaaacttgcagtctactgtcacatctcgcaggcttgtctaccaatatcctactactttaactactttacatgttgagaaagatataaacaatccaaaacttcgatctctcgtggttgttacctttgaagaatcattaagaatttggaagtggaacctatccggttcaagctttacaaggttagaacttctaagggtgttagatctcgttcaagccaagttgaaaggagggaagttagcttcctgcattggaaagctcatccacttaagatacttgagcttagagtatgcagaggtaactcatataccttactcactaggaaatctgaagttgttgatctatctgaatttagatatctcattatcatcaagatccaactttgtgcccaatgtcttgatggggatgcaagaactgagataccttgcgttaccaagccttatcgggaggaagataaaactagaattgagtaatctagtaaaattggagactttagagaatttctcaacaaagaatagcagcttgtaggatcttcgtggtatggtcaggctgagaacgctcaccatcgaattaattgaggagacgagtttagaaactctagctgcatctataggtggattgaaacacctggaaaaacttgaaatagatgatctcggttctaagatgaggacgaaggaagcggggatcgtatttgatttcgttcatctcaaaaggctaaggttggaactgtatatgcctaggctttctaaagaacaacacttcccttctcaccttacaaccttatgtctagaaagttgtcggttggaagaggatcccatgccgattctagagaagttgctacagttgaaagagcttgaattagggcataaatctttcagtggaaaggaaatggtttgctcgagcggtgggtttcctcaattgcagaagctttcaataagcggactagaggaatgggaagattggaaagtagaagaaagctccatgccacttcttcatactctccgtatttgggaatgtcgaaaattaaagcagcttcgtgatgaacactttccttctcaccttacatccatatctctagggtcttgttgtttggagaaggatccaatgccgactctagagagattggttcacttgaaagagcttgaattctataaatctttcggtgggaggataatggtttgcacgggcggtgggttcttttgatggaagtgagaagcaatatgatatattaccagatttctctcccgctgaagttgcagaactgtggccagctttttctggcgagcatgataatatggacgcacagagccttgtgaaatgtacttttcaaggtattgtttctacccatccactcagcaatatgttttcttacttcaaatttatttgatgacccttacatcttttgacatctcaagcagggggcagatgctcaaatgaagagaagccagttgaccggcttcttattacactgatgtctgaatgcattgaatctgatgtccaggcgcagtcagtagtaaagcccccttttcaacaagactgtggagacctgaatccctttactcgacacctggcagttgttcaccttcgctgtgtttgtcgcctgattatggtctgcaaagagcttgttcaattgccaaatatgttggatgagaagacggttgatcaagctgtccttgataaattgtcgttctgcttaagaattttgaagctgcttgggagtctttcaaaagatgttcaaagtatagaaaacgacggctcattgttacaagcagtagcttcatttacagatgcttttcctaagctgtttagggttttctttgaattcactaaccacactgctacagagggtaatattgagagtctttctcttgcgctagtggagggatttcttaatctcgtccaactcatttttggcaagagcagtgtttttcagaatgtccaggcatgtgtggcagcttctattgtcagcaatctagattcctcagtgtggagatatgatgggtcctcttgtaatttgacacctccacttgcttacttccctcggtctgtcatctacacattgaaactcattcaagatctcaagagacaaccataccatatccatgatctgagggttttagagtctgaagttacctatgaagatgtcagttccactgttgattctgtttatttccatctgcgccaggaaaagatcccgttgctcaagtgcttcacggtcgaggatataatgagagtgatatttccttcatcaagtcaatggatggataacttcttccatcttgtttatttcctccatcgcgaaggtgtaaaattacgaccaaaagtggagaggacgtattccagtttaagatccaacagttttgcagaagttgaaagccaaatttctcatgacgatgaagccctgtttggaaacttattttctgagggtagtcgttctctctgttccatagaaccaaatgatcaaccacctgtttctgtcagcagcaatttactattgcaagctgctaaggaactgttgaattttcttagagcatgcattctttgtcaagaatgggttcctagtatatatgaagatggatgtaaaaagcttgacactggtcacattgatatcctgctcaatata

SEQ ID NO: 145007 - DNA, 1285 bp, Arabidopsis thaliana landsberg
aaaaaaaaattgctacgttgtttacaaataaacaaaattgtttcgttaaatctacgtagtttagtaatcgtacaccagctgctaaacagaaacaaagaaaagagaaatcagaaaatgattagcgtttgagcagaggggattccatgaacagtggaggaatctgatcaaaggcctctgcggacgaggtttgggcgggaacatccggaggaggcaaccatgttattggtggcataggtggaaactcatccaacggcggtggaagagagaacactggcggcgtttcgtctccaaatggtggcggaggtagccataacggcggaggttgtgtcgtctgatcaccacctggtagtggcggcggaggagacggcaccaaagggggcggaaacactatcaccggcgggggcggtgaagggaagaagaaaaatggtggcggagagggaggaggaggtgaaggaacgagcggtgaaggaggaggtggtggtggtgatggaaccaaaggcggtggagacggcataagcggtggtgggcatggggacggccttggacgcagtggtggtgggggtgatgaaccaaaggtggcggtagacgtggggatggccttggacgcggtctcggacgtggtggtggacgcggtggttggaatggtagaaaagggttttccgacgaaggagttgtaggaaaaggccaatgacctcaggtgtcgaacaagtattgatacagaggatcgcagcttctgcgtccgcgattacgactgctaccactgctgcgtcttcctctgtttgattgcttttgctcctctacggttaaagcttctacgttaacgtttgacttcacttcataatctgatatggactctgttgtgtgaatgattaaaaggagtagagacaacaaaagtccaaccacgagtagttgttttgctttcatcatctctttgtgttctttggttacgttgtcttcttctttgatagaaaactcctacgtaacaacaacaattgtatatatactgtaagattaatcaaagaccattttaatatactaaattttttgtttgcccatttgatataaaatactacatgaataatgcattatgggaaaatgtagttaggaatcataaatgccgagagaaggatgaggattatcctgataacacaatttattggcaaagtggcagatcacaaaagttaaaaagtggtgactaaaaatgacctcatttatgatcacgcatggtctaaaatacatactttttttttttgtatttgcatcttctttttagtttttccgataa

SEQ ID NO: 145008 - DNA, 2843 bp, Arabidopsis thaliana landsberg
gagcctaatgatgaatatcagggaaggcctgtatttgtgaagctgcaggagatgcaggacgcaacttcgtctccaccaccaccagagtctaaacctggtcaagctgatccacctgataacatattcaatgcattaggaaacgaattttcacatcctagtggagcaggtcgaggaaagcctcttgtggaatctgctccaatccgacaagaagataaccgccaaattcgacgccctccgcctccaccgcatcagcagagagtgcaacctcagcagaagcgggctccaacggtcaaagatggaactcctaagccgcaattgagtgcgcaagaggctggaagaagagcaaggagtgagctttcgcgtggtgaagctgaagaaagcagtgtgggaggaagaggagggagagggagagggagagcaagaggagcaagagggagaggcagaggaagaggtggtgatggatggagagatgataagaaagaagaagaaggtgaacaagaggctatgcgtatatttgctggagattcagctgatggagagaagtttgctgagaaaatgggacctgaattgatgaaaacgcttgcggaaggttttgaggaaatttgcgaaaaggcattgccttctactactcacgatgccattatagatgcttatgataccaatctcatggtaaatgtttctgtgttttattttctctatgaattgtctagaaaagtatacaacttgctactgagaatggtaacactgaaacttcaaatagtattaggaatattgaattctcgagtagcaatagtattagtattgagtcatactctataatgtggtagaattggttgtggtggctttgaagttgtttgactgaaatatgcacaatgtacaaaagtaggccaccatctcgtcttgtaggattttcagatttataatagcctctatggtttttgttctttcattgtgaaatcggtcattcagtcaaaggagcgatggagaaagtgctctttttgttggtttttgagtctcttagttttctctatctattttggtttgcagattgagtgtgagcctgaatacattatgccagactttggatcaaatcctgacattgatgagaaaccaccaatgtctctgcgtgagtgccttgagaaggtgaagcctttcatagtggcttacgaaggaatcaaggatcaagaagaatgggaggtaatagtgttcaatttgtgaatttgtttttatatgaatcgacgcaatattttgtttcagttgatgatcacttgaatttctcactttctgcaggaagcaattaatgaagcgatgacacaggctccccttatgaaagagattgttgatcactacagtggtcctgatcgtgtaactgctaagaaacagaacgaggaactcgatagaattgctacaacgcttcccgcaagtgcacctgattccgtgaaacgatttgcagatcgtgcagctcttactcttaaggtttgatctctttaactaaacactcaaactcttcatctaacattactctctttctatcagatatctctagagaggtattgatgtttttctgaaatacttttggcaatgcagagtaatccaggttggggatttgataagaaataccagttcatggacaagctcgttttagaggtgtcacaaagctacaaatagagaactcaggtttcaaacttcttaaaaaacttcatcgccggttgagtttatagatcgtactctagatcttgcctctacttaaaacggtacccatttcttttgaactagtactcaaaatttgggcgttagctttttcgtcatacgttttgagggtttccgtaataacggcattgttctttcgatctttgttactgaggagattgtattgtatcccttttcatcaatgggttattaagggtttaagcctgtttttggatgtgtaattgaaaagagaatggttcttgagtgttggttctagtgtcttatacatgccgtaatagagaagaaaagagagagagagtagtgtatttgttcaatgaaatcttatcgtatgaacaattccgtagacacacatatggtcacacttgcgataattgcagctgcggttgtggccgccgcttcaaccgtagccatgaataaattactttcaagtttgaagtacgagtattttattgagtatgctccgaatttccaaaacgaaaattcttagttgatacattaaagagcaaaaaccaagaaataaaatgttgtgaaacgtaagaagtaataaaaatcaattattacattttcgtaagtataatggtcgatggtagtgatcagtaattaattcgttctgttttgtattaactctattttggctactacgagtgagtgcgttgagagaaattgtggtcaaaaattcgatagtggtagacttattggacatccaataatgcatgttgtatgttatccgaatataggactacatttatatctctatgatttaggagtctcaaagtccttcccgtaattagattaaaatcaacaaatttctggtttccttattaaatgctcactaatccctcattatgtcatatgcatcttcctcattcatctttaactctgctaagttctatagagatattatcagttttccaaacgaaacaaagaaaccatgaaattcgatgataagtacaaacttattgttgtaggcatcagcggcgttttagcgggagttgttgtcataatgtttatctgttgttacgagaacaagaagaagaagtttcagctaccggagccgccacagacaccggagtggcagcgacaaattgtttctgctccgacacttcagacaagaaacattgatgtcggaaatg

SEQ ID NO: 145009 - DNA, 586 bp, Arabidopsis thaliana landsberg
ctctttcacaaaccccccaatctccaacaagaagacctctctttcataaaaccctcacacgtgtgaccgattcatcaccatgagctcatccccggtcgtgaaaggcctaaccaatgaagagcagaaaaccctcgaaccggttatcaaaacgtaccaccagttcgaaccagacccaaccacgtgcacttctctcataacccaacgcatccacgctccggcctccgtggtttggcctcttatccgccgcttcgacaaccccgaacgctacaaacactttgtaaaaagctgccgtctcatctccggtgatggtgacgtcggaagcgtcagagaagtgaccgtaatctccggcctcccagcctcaaccagtaccgagcggcttgagttcgtcgatgacgaccaccgtgttctaagcttcagggtcgtcggcggagagcaccgactcaagaactacaaatcagtgacgtcggtcaatgagttcttgaatcaagattccggcaaggtttacacggtggttcttgaatcttacaccgttgatattcccgagggaaacacagaggaagacactaaaatgtttgtggacactgtc

SEQ ID NO: 145010 - DNA, 608 bp, Arabidopsis thaliana landsberg
ttttctctctataaattaaaaacattacttactctttctctcttccacttaactcatatcaaccttcgccggaaataatggctttcccgcgatttctttctctcctcgccgtcgtcactctctctcttttcctcaccaccactgatgcttcctctcgctctctatccactccacctaaaacgaacgtactcgacgtcgtttcatctctccagcaaacacaaactatcctctcactcgacccgactcgttcctcactcaccaccaccaaacccgagtccctatccgacccggttttcttcaattcatcttcaccactatctctagagcttcactctcgagacactttcgtcgcgtcacagcacaaagactacaaaagcttaacactcagtcgactcgagcgcgactcatcccgagtcgccggaatcatcgcgaagatccgtttcgccgtcgaaggagtcgatagatccgatctcaaacccgtttacaacgaagatacacgataccaaaccgaggatctaacgacacctgttgtctccggagcctctcaaggaagcggcgagtatttctcaagaatcggtgtcggaactccggcgcaacacatgtacttg

SEQ ID NO: 145011 - DNA, 2637 bp, Arabidopsis thaliana landsberg
tggaaataactaatcaaaactctgtatcatcgttttcaaaacctaattaatggctgtaacaaatcttcctacttgtgatggtttgttcattatcagtcttattgtcatcctttcttcaatatttgggacatcatctgcgcaactaaacgcaacattttactctgggacttgtcccaacgcctctgccatcgtacgcagcactattcagcaagctcttcaatccgatacaagaatcggagccagcctcatccgccttcattttcatgactgttttgttaatgtatactaatattttcgacgcaactgtttaacatcaattaagccatgttgtaattttcgccctaaacctactttgccttctttattatatattctgaagggttgtgatgcatcgatcttgcttgacgacactggaagcatccagagcgagaagaacgctggtccgaatgtaaactcagctagaggattcaacgttgtcgataatatcaagactgccctcgaaaacgcttgccctggtgttgtctcttgctctgacgttttagcccttgcctctgaggcttctgtgtctttggtaattacacgttctttgtgaacatatgaaacaaaacataactaaaaattattgtggtataattctatttttagctattattaagatacgtttgatcatcttcaggcaggagggccatcatggactgtattattaggaagaagagatagtctcacggccaacctcgccggtgcaaattcttccattccttctcccgtcgaaagccttagcaacatcacatcgaaattttcggctgtcgggcttaatacaaacgatctggtagccttatctggtaagttcaattcaatgtttagttacttgcgtctcaagttgaaacaaaccctaacgccaactcttgtggatcgacgtaggtgcgcatacgttcgggcgtgctcgatgtggagtattcaacaacagactatttaacttcagcgggacaggaaatcccgatccaactctaaactcaacgcttctgagcactcttcaacagctatgtcctcaaaacggtagcgcatcaacgatcaccaatcttgatttgagcacaccagatgcgttcgataacaattacttcgccaaccttcagagcaacaatgggcttcttcagtcagaccaagagctgttctctaccaccggttcatccaccatcgcgattgttacttcgtttgcaagtaaccagactctgttttttcaggcctttgcacagtccatgatcaatatggggaatattagtcccttgactgggagtaatggagagattaggttagactgtaagaaggttaatggaagttgatttccttaaagctcattttctttgaaaaaacattggcaagctttggttgaataatttttgttatcataatcacatcaaatctgtattgcacttaaatcattctaagcaaatttatgataaatgaaattaaatcaaaacaacagaaaatcagcaaaatatttaacagttttactattattaatggaacattctctttatctttgcattcacagagaagaatgcagaaaattgaaagttttcactttagtaataagaacaactttattttgtgggctccaacagagaattatcattgacaaattattttacgaatcaccaatcaataacgataacaaaaaaaaaaaaaaaccgtccaacatgttaatcgaattatctatcaaccatcattacagtccttgtggaatgatttcgccgacaaataaaaaatttcatttgaaatttaggggagacataaaataattcggtaggctgattttgcggtcaagataaagcggtccctttccacgccaaactgccgaagacgagagtgcttgattctctaattttcctctagagtactattgattttattttttgacaggaactatgaattttcggctgtaaatgtaaatattaattcattaatgacaaataatattattctattttataaagtaaaataaaaaataagaacttaatgaatatctcaaaaaatgttgacaaaaataaatttgttcaagaataccaattttttaaaaaataggtatagaaattaggttatatttttcttatcttctcacacacactgagacatacatatatacggatgaaagtcatgatctatatttatatgtttattatttaggtatcatcatcgcctctattacctacatataaataaagcaataaaaatgtaaatatactctcatatatatattgagttaccagcggaaaaaaatacgcagttctctgaattcgttaatttattatatataatgaatgtggagttattattgggacgaaagtcctaccacaatttaaacgcctcaaacatcttctttttaaaacattactaaaaagggttaaaagaagacaaaattgaatgtgaagttgttgacttgtttctatctacaactttagaatacgatagaaagcaaagttcttacaaataaaattaatattggataagtgatctgttttgtgtgataggtacgctttgagtcagaatgtcaatggttcaattcttcatatgggttactaccggtggtattatagtgtcgattacaaacgattaggagtgttgccacaagtgtcatag

SEQ ID NO: 145012 - DNA, 388 bp, Arabidopsis thaliana landsberg
cgcaaggactccaggatcatttccaccaaagcatcatgtactttctcagtccctcactctaatttctaacttttgtggatattctaaggatttcatatgacaacttcatgtttgcagatgccagtgattgactcggctccaaaacttaagcctagaaacgacagaatttcaccttctcctgctgctaaacatgaggctgaagaggcgatgtcagttaagcgtaggcaaagaacacctcctactttgccaagaagaacgtctttgatagcgcaccagtcgagacaactaggagcagatatttcaaatatggcagcaaaggaaaccgcgaagctacatccatctgtgccatcagagtctgaaactaattctcatcaatctcgtgttcatg

SEQ ID NO: 145013 - DNA, 3094 bp, Arabidopsis thaliana landsberg
cttctctgttttagtaaatgtttcttctgtctcagtctcactagacggatctgtccatgaaattttctcgtaaagggttattatggctgaaggagttgtgttgtttggagttcataagctttgggagcttctgaatcgagaatctgcgcgattgaatggaattggtgaacaagttgatggactaaagcgtcagctgggaaggttacagtcattgctgaaagatgccgatgccaagaaacatgaaagtgaaagggtgagaaactttctggaagatgtcagggacattgtttatgatgctgaggatataatcgaatcctttcttctgaacgaatttagagcaaaagaaaaagggatcaagaagcatgcgagaagacttgcttgcttcttagtggatcgccggaaatttgattcagatatcaaaggcataactaagaagatttccgaggtgattgggggaatgaagagtttaggaatacaagagattatcgatggtgctagttcgatgtcgctgcaagaaagacaaagggagcaaaaggagatccggcaaacgtttgctaacagttctgaaagcgaccttgtgggggtggaacagagtgttgaagcattggctggtcatttggtggagaatgataacattcaagtggtttctatatctgggatgggtggtattggtaaaaccactctcgcaagacaagtctttcatcatgacatggtacaacgccattttgatggattcgcatgggtctattgtttcgcaacagtttacgcagaagcatgtttggcaaaggatctggcaagaacttcaaccacatgatgcggagattttgctgatgggcgaatatgcagtccaaggtagactctataaattattggaaaccgctacatatttggttgtcctcgatgacgtatggaaagaagaacactgggatcgaataaaagcagtgtttccccgcaaaagaggtgagctcatatggtacatacataaaagcactttacttatacagtacgtgtttataaaaagagagagatgaaagcaagtttgacatacattggtgatagatgcattttattcactatcatgaaacgagaagtattttgcaggttggaaaatgttacttacttctcgcaatgaaggtcttggtttacatgcggatccaacatgttttgcctttagaccaagaatccttactcccgaacaaagttggaagctatttgagaggatagtaagctctaggagagacaaaactggtacgctctcatacataaatcaagaccaagaatcttgtattttctctaatgaatccttaataccaagaagtttaatttctctttcgcttttagatatttataatctattcagggctttaatcgtaaacatattactttgtcctggttagcagaattcaaggttgatgaagccatgggaaaggagatggtcacatattgtggaggactaccgttagccgttaaagtgctgggagggttgttagctaagaaacatacagttctagagtggaaaagagtacatagcaatattgtaactcatatagtaggaaaatctggtttaagtgacgacaattccaactcggtttaccgagtattgtctctgagttatgaagatttgcctatgcagttaaagcaccgcttcttttacttggcccattttcctgaagataacaaaatagatgtgaagatattgttcaattattgggttgcagaagaattaataacgccgtttcatgatggatcaaccattcaagatactggagaaagctatctagaagagctagtgaggagaaatatggttgttgttgaagaaagctatttgacttcgagaatagagtattgtcaaatgcatgacatgatgagagaagtatgtttatctaaagccaaagaagagaactttattcgagttgtcaaagtccctacaactacaagtactaccatcaatgcacaatctccttgtagatctcgcagacttgttctacatagtggtaatgcacttcatatgctgggacacaaagataataaaaaagccagatctgtattgatatttggagtcgaggaaaagttttggaagcctcgaggtttccaatgtttgcctttgcttagagtgttagatctttcttacgtacagtttgaaggagggaagttaccatccagcattggagatctcattcacttgagattcttgagcttatacgaggctggagtatctcatctaccttcttctctggggaatctaaagcttctgctctatttgaacttaggtgttgctgatcggttactagttcatgtgccaaatgttttgaaagagatgcaagaactgaggtaccttcagttacctatgtcaatgcatgataaaacaaagttggaattgagtgacctagtgaacctggagtctttgatgaatttttcaacaaagtacgctagtgtgatggacctcctccatatgactaagctaagggagctcagtctatttattactgacgggtctagtgacactctatcgtcatctcttggtcaattgagatccctggaggtgcttcatttatatgataggcaagaacctcgtgtagcttatcatgggggagaaattgttctgaattgtattcacctaaaggaattagagttggcgatacatatgccaaggtttcctgatcaatatctattccatccccacctttcacacatatatctatggtgttgcagcatggaggaggatccaatcccgattcttgaaaggctgctgcatttgaagtcagttatattaacatttggtgctttcgtcggaaggagaatggtgtgctcaaaaggcggttttcctcaattatgtgctctagaaatatctgaagaatcagagttggaagagtggatagtagaagaagggtcgatcccatgtcttcgtactttgactatacataattgcaaaaagttgaaggaacttcctgatggactcaagtacataacatccttaaaggagctgaagattgaaggaatgaagaggaagtggaaggagaaattggttggagaagattactacagagtccaacacattcccaacgttcaatttatcaactgtgacgacgaataa

SEQ ID NO: 145014 - DNA, 1699 bp, Arabidopsis thaliana landsberg
atggaaatacctagtcaagaaattcacatcatgattgataacacaatatcgaggcgcaaagagagaaagactaacctcgcagatgccgaacccattgtcctgatgtctgttttgagtagtctccatgcgggatatttcagaataagcctttctctatgtagccaagcattgttgtggaagattatggtgcatttgcatagcgaactcccgtctatggcgtattatctcctgtggtacctagcacttgcaacacaagtatcactctgttttttgtatgccttcaagtgtatttttctctttgacatggtgaaggaagagttctcgcactatattggagtgaactatctttacgctccatccatttcatgccttctattgcttcaagcagctcctatgatagaaccacacagcgttttatatcagacactattctggatctttgctgttccagtcttgaccctagacacaaagctttatggtcaatggttcacaacagagaaaaggtttttgtcgataatggcaaacccggcaagccaagtatcggtaatcgcaaacctagtggctgcgcggggagcagcagagatgggttggaaagagtgtgctctatgcatgttctcactcggaatggttcactatttggtcatctttgtcaccctctatcaacgcttaccgggaggaaacaacttcccagccaagttaaggccaattttcttcttgttcgtcgctgcaccagccatggcaagtctagcctggaactctatttgtggaacttttgatgccgtagcgaagatgttgttcttcctttcacttttcatcttcatgtccctggtaagttatcgacacacttattaagaaacaaggttcaaacatatattgaccttctttgtgtttaacattttcaggtctgtaggccaaatcttttcaagaaatcaatgaaaagattcaatgtcgcgtggtgggcttactcgttcccactcacttttcttgcgttagactcggttcagtatgcgcaagaggtgaaagatccggtcggttctggcttaatgcttatcttctcatctatctcagttttgatcttcctcggtatgatggtactgacagcagcaaacagcaatagactactcagacacgatcctgttcttggttctgctacagatccaaaagacaaacaaaaaacattgtcgctcaatgcgactaaccaaaactagtctacccttgagatagaagcaagaactctgttacaaatttgcagatattaaacaagaacttactcacttctatttgttctgtattctctgattttacttgtcaaccataccttgttaacctcatcctcaagtattcttcatgatgcttgagcctgataattcccaatctaaagtgtgcaactaaacttcttgagcctagatttacaatcttcttcgccagagttgtttccccaaaatattgtattgttagctcggtttgcattctcaaacaagtcactcaattttacacccatattagtacgtagttggagctgctttgactgcccaacaacgttctgatttgggtgtaaaaagattcgtaaccccgagcgtgtaatgcaaaatagcccattatgttaggaaaccgctctgatgaccaagatggcaaatcacgaaccaagataagacaacgaacaaatttccatgtcgctagtctatcaagtagttcttga

SEQ ID NO: 145015 - DNA, 773 bp, Arabidopsis thaliana landsberg
ccgacgtttactgagtaaaacctttacttctgagcaagacaagaaaaaagaagatattgagcgattatgattcgcgcagctgccaaattctccagagaagcagcggcaacgtttcgtggccgcacgatctccgttagaggaaaccttattcgatactcgacgccattgagattgattcacggtgaaatcagcgttccaaacgcgaatcatgttgctattcagatggttaattacgctctttctcacgctaggtcacaaaaatcaggtctttctctatagttataaggattttaggtgtttaaactctaagtctctgactgaattcgaaatgggtctctgtgaattctgaatttttgcagatgaatcttatgctcaagggatgctagtgcttgagcagtgtcttgggaatcaacctaacgatgatcaggtttctcatgattctaaagcaacagtcttgcttgccatgtctgatcttttatacgaaaggtttcatctttttttaccattttctctctttgtttcaattggtagcttaagatttctataaacgtatattgattggttttctatgtttacagtgggaatagtagtgaggccattgaacgccttaagcaagtcatgattctgacacactcatcgttggctattagaggttgttgttgtgaacttaagagttgttgagtgttttgtggccttctgtatctgaaactctcttttgttgtgcagttgttgctgtggaagcccttgttggtctgctgattcagtcaggacag

SEQ ID NO: 145016 - DNA, 1152 bp, Arabidopsis thaliana landsberg; identical to SEQ ID NO: 5025

SEQ ID NO: 145017 - DNA, 625 bp, Arabidopsis thaliana landsberg
gcacactcgcgagctgtggatacagcaaggtcagtttcaaaagtaacagtagaattcttcaagactctagacacacatgctaccaaattaaccgggatagtagaagaggcacagacagttaaccacaagaaattgagcgaatttgaaaacaagtttgaggtgattctggttcttggcttcttgacacatgcgcagctgcaagtgccttgtgtagactctaatgctgtttcatctgtcttgtaggaatgtgctgcaaatgaagagagacaattgctagagaaagtagcagagcttcttgcaaattctaatgctaggaagaaaaaccttgtacgtatgcaattctgcatgttagttcttaggaactgaatttgatttaagtctttaagcaaactcttcaatcttttcgtaggtccaaatgactgtacacgatctacgcgagagcgcatccaccagaactactaccctacagcatgagatgtcaacaatgcaagattcaacttcttccattaaagcagagtggagcattcacatggagaaaacagaatcaagccaccacgaggacacttcagcagttgagagcgggaagaaagctatgcaagaagttctcttaaactggtataaataa

SEQ ID NO: 145018 - DNA, 576 bp, Arabidopsis thaliana landsberg
ttagttccataccatcgtcgcaagctctcatcttcttcagctcaaaaagccatctcaaaggtaaaagtttctcgagtttgtcttctccgtttgattgcttcttcatccctatcgagattcgtatgatttacgttctaatttcgtcagatcgatgaaagatccattgacattctctagagatctgaataaaatattttctgttatcgttcacagttttgatgagatttttgtttggctctgtagatttctaagtttttaattggtttcaatttgccattatgatctatcattctcatagcttcagtaagagatctgatcgttcagtttttcagattgagaatcgaaatttgacttagaggttatgtagattctcttatttttaagatcttccctgatgatctaggactctgttcttagatcttggtgtattcagtgctagttttgtttcttagactaaatgtattagatagatttctcagtttttgttctgtgtgtttgtagtgtgtgggtataacacttaatttatcactattttcaggtatattttgaatcaaaaacaatggcagggactaatgt

SEQ ID NO: 145019 - DNA, 2005 bp, Arabidopsis thaliana landsberg
ttctctttcttctgataaacctctcggcactgcgctgtgtagtgagctttcacttccgtcgttagctgcagtttaaaatccggcgaattgcggacggagaattcaatcatatagcattattgaggagctgaaatggaggttgtgacaaagatatggtgttgattttcacttcgccgttattgctgcgatggatttcatttccgcttcttccttatcttcacccttttccacacagttgtctccgatttatttgagctcaggtatagtatcgttaaagcctagacatcgagtcaaaaatcgaaactttgggtctagagaatccaataataaatctaggaaaattgtgcccattagaggctgctttggtttttccgggagttttttgaggtcgaaacagtctgattacggtagtgaagctgtttcggaatcattgagattatgtggagagggaaatgagcttgtgctatcttccgagtataatagcgcaaagacgagagagagcgtaatacagtttgttaccaagcctctagtttacgccttgttttgtattgcaattggactttctccgattcgctcttttcaagctccagctttagctgtgcctttcgtcagtgatgttatttggaagaaaaagaaagagagagtgagagagaaagaggtggttttgaaagcagttgatcatgagttctcggattatactcggagattgttggagacagtctcggttttactgaagactattgagatagttagaaaggaaaatggagaggttgctgaagtgggagcggctttggatgcagttaaggtggagaaggagaaactgcagaaggagataatgagtgggttatatcgtgatatgaggcggttgaggaaggagagagatttgttaatgaaacgagctgataaaattgtagatgaggccctaagtttgaagaaacagagtgaaaaactgttgagaaaaggtgctagggagaaaatggagaaactggaagagagtgtggatattatggagagcgagcacaataagatatgggaaagaatagatgagattgatgatatcattttaaagaaatagtcaccaacattgagttttggggttagggagcttattttcattgaaagagagtgtgtagagttggttaagagcttcaaccgagaattgaatcaaaaaagttttgaaaggtgatatctctagccttgattttagcagatataatattattctaccttacctgtaggtgagattttggttgccctttaatgaggatattctaacagttgattgtcataagctcatctttttgcaagatttctctttgcattcatcttattgcgtgcacttctagcggtgatggtaatgttgtatcttttacttgttagattaccaattatcttgtttgtactcctgcacctagtctaactgtatctttttgttggcttttatatatgtttttaacatgtctatgctgtttttcctgtcgacataaatgtttcatgtttcacttacaagatcaattgattttctggttgtagtgttcctgaaagctccattacaaaactctcgaggtctgagattaagcaggaattagtgaacgctcaaagaaagcacttggaacaaatgatactgcccaatgttttggaactagaggaggttgatccctttttcgatcgtgactcagtggatttttctctacgcatcaaaaaacgccttgaggaatcaaaaaagctgcagagagatcttcagaatcgtatcagaaaacgtatgaaaaagtttggtgaagaaaagctttttgttcaaaagactccagaaggtgaagctgtcaagggatttcctgaagcagaggtgaaatggatgtttggagagaaagaggtggttgttccgaaagctatccagctccatctacgccatggttggaaaaagtggcaggaagaagcaaaagccgatttaaaacagaaacttttggaagatgttgattttggcaaacaatatattgcgcagagacag

SEQ ID NO: 145020 - DNA, 1381 bp, Arabidopsis thaliana landsberg
cacaactccagaagaaaaactgaaagagtttgctcgaagaagaagaagaagcaaaagctttttaaaatccatttttattttcttgtatgattccaaacttatcttcatcattctttctcaatcataccattctttcttaatctccaagctcgtattctatttcttattcgatttttatttcgttgaaatctcgaagcttctcttcgggtaatacctaaatgttgattggttactcgaaagcccagatgagattttgagagtaggccgaaattggagccgtgtttttggttcagtttctcgagggttcgatttcggattcgtgagcttttggggactggagaatatggacaacggccatgaggaaagacttgccgagaggttttcgggagtgggactcggagaatcatctggttcccatgaaaacgacgttaaaaacgatagcttgtttcaagttatcaaagctgttgaagcagcagaagccacaatcaagcagcaggtttgtgttcatcatacttagcttctctcactttctgtatctctgaaaacatttagctttagaggtaccttgctcaatcacttcatttcatcacttgaagttatcttctaaggttctctttagggcatatcaaagtagctgtagaaattgcaggttgaaatcctctaactaatgccagggaatggaaatgagttaaggagtatatttggggttgtaggatccgtttatgaatttctttgtctcgtttcattttctactgcaaattgggcggatgatttggacatagagtgtgatttgcgtccagcagatagattttctctgacaagtgacaatttttattttttttatctctgaccaggtggaagagaataacctcttaaaggctgaacttcagagaagatatctggagcttgccaaatatgtaagtcgttttatttttcattttcctggtcaaagaacagaaatatatatctcttttcgcccctaatgattctctaggattttccctagagctctgttgacatttccattgcatgactttagggtctctctgaccaaatttgtggtatatatgttgttttcatggtagtgttttttcctctctaccttccttagaaatcaggagaatccttgccccagacatctgatctaggaaaccactctaatactacaaccggtgggtcttccccgttacaccagtcggccgctggtattagtctagttgatcggaggaaaggcaaaatcaatgcttcagctgctcatccgtcaggtatgctggttgttcaccagcatgtgcatccaaatggagaggaagctactgtgagtaatcgttctgaagaccaccattctgagggaatcatgactaatggcattgtcagaggaact

SEQ ID NO: 145021 - DNA, 265 bp, Arabidopsis thaliana landsberg
ggctaaaaccaaaaatgttatttctttcaaactttctctcatcttccttcttaatattttcatcgtagccaccatcgcagccgcagcggccgtttacgccggtaccaaaggtttggattctcggccgtccaaaaccaggcgtccctggcctttcaagaagctcaacaaaccggtggttttaatgatctcttgcgacggtttccggtttggttaccaatttaaaacggacacaccaaacatcgaccttctcatatctggaggaact

SEQ ID NO: 145022 - DNA, 278 bp, Arabidopsis thaliana landsberg
aaaacagagagagaagaagaagaagaagaagaagaagaagaagaagaaagatggggctacaaggtcagctaagtgacgtctcttccgattcaatccctcttatgctcctctctctcctcgccgtcttcatcaaccatctccgatctttcctcctccgtctcacctctaaatcaaatcctaatctccccgtagacgatgtctctattgcatcgggactagccaacataatcgttctcgccgatcagcttagtttgaatcggttattctccgaccggtgc

SEQ ID NO: 145023 - DNA, 184 bp, Arabidopsis thaliana landsberg
caatcaatttccttacttcggatcgtcttctgcatcgactatgacctcctccgttaatctgccttctttccaaggcggcggaggcgtctccggggtgaattactggctaccggcgactgccgaagagaatgagtcaaaggtcggtgtgcttcatgctggacttgactgtatttggaactactga

SEQ ID NO: 145024 - DNA, 6607 bp, Arabidopsis thaliana landsberg
agcacacaaaccgctggaatgatgagaccctagtttcgcagcttgtcacgagtgtggagcctattccacgcagccacccaacagataaacgcatgttttgcgatcctgtctttaaaccagacagagctatgccacgaagtagaagcagtgcttgggtgaagagcgtcccaagttttcttcgctgagaagatatttgaaggagcatgatggtccgacttccacttatagacatcatcatgcgtacaatcaatcatactctcaggcgaaggaagagctcactttaaaatgactatagtcgggtttcttctccgactagaagagagccaccagcggggaaaccgtcaggacccggagcttgagaaggtgccctgttttaaagaactccataaccgcagctatagtggcgtctttgaccacatgccaagtttcccagaagaactcagcggggaaaccgtcaggacccggagctttgttcttaggcatggaaaaaagagagtgagtaatttcgtcctctgtgggaattgcaaccagttgagttttcaatgtctcatcacaccggaacgggtgtaactgataataggtttttaagtcaattaaacctaaagcactatcatgtcgttgtagtactgaaggttgtcaatccaaatgggtgtgatgctaacaatcaagatgtgatcagaagtcactaagtcaagccaagcaataacaggttttggtgtgttctagcagttctaagtgaacatgcagaattacagtgagttttcaaggaataccatcgcatatctgatcaactcgattgaggtttgttttaaactgttattgtttattcagcataataagactataatataatatggtatctacttttatataggttggcaaagttagagttatgtgcacaatctatacaagtcatgtaatattacatcagctgtaagtcatgtaataagaaggtcaatcatatacatgctggtgttaattgtgttaacaacaagggaaagaagcctagattctggtgtgacacatgcaagtctgttgttacaaatgtggtctctaggtaaatatgcttttaacactagacttacagagtatttaatacattcatctctttcttgagaatgatattttcattagttaatggatctgttgatgaggtttggttttgttattagttagctactttatgtaaattaaactagatttggcataccataatactgtcttgcagattgaggatctagataacctttgataagtgtgtattttgcatgttttgagcatccatttgtcatcactttagcaccatatcatcactgttttataccatttttcatcatttgtcatcactttgcatgtttaggataggattgcatgcatgctgcatatttgtgttgatttcaggtgatttggagctgttgacgagctaactggaagaagcggacctgatcatgtcaaaccactcgaccatgaggtagagtagaagcttcaagacctcaagagaccactcaaccccctggtcgagtaggggacttctcgatttcatctcatcactcgaccccctagccgagtgtcttcatccccatcacttgaccatcactcgatcacatcactcgatcccgtggtcgagtgtcttcacctccattacctgatcatcactcgaccacatcactctaccaggaagtcgagtatcaccatcaccaccactcgactacatactcgatggcaagcttcagagtcttcttcattctgcactcaaccagacactcaagcacaaggaagaaaagaagactccagctattcactcgacctcccactcgactccatgggtccagtacagttcttaatccgtcccaatactgtgtcgttttaagtattaggattttggaatatttggctataagtagcatgtacttcacattttgaaaacaagtttttttctagttttattccgcagacattgtgttctagatctttttgtaatccggatttctctttatttattcagtatttagtatgcagtatttgttcttgattttcgtttattggttttcatcctgttatcattctgctattacactgttgttatcatgttttcatcatgttcaacgtttatgctttctgttatgatgtctgagtagtgaataggtttctgaggatgggttagagtagtgtagaattcttagtatgctaggtgattgagtattgattgatagatcccttctggattagttgttcttaatgcctattgctttctgatcaactagaatttgagcccagacatttccgcgtccaaaaggtgttcgatgaaatgtttgaaccactaattccagagattcgtgaccctgtaccaaggtattggttgcagggagcgttttggctttaacttgttgattcgtaatgcctattaggttagctctcgtcaatggtgattgagtctgggactaggttagcttgagagtctctgttgcggtggcacttagatttggttaacgaacttgttgtctagggttaatttgttgaacatgtcaatcacctgtaaactgaggaaacgaaactactcgcttaccccatccttaggaattctttgtctgattgattttattgtttactctactgctgtttactgcatcctgtcacctgttgcttagtttctgcaattctttactgttactcgacctgatactcgaccacccagttgtctggcagcagactgtgcagtcgagtatctttgtttcattttctgtctgttactcgacctgtcactcgacctcacccagggctctgcaaagagctgtattggtcgagtgttttactgtttctgttttattttctgtttcctgcttgttcacttaggattgctagaacacaccaaaacctgttattgcttggcttgacttagtgacttctgatcacatcttgattgttagcatcacacccatttggattgacaacctaaaatactacaacgacatgattggtgttttgggataattgactgaaaaacctattatcaatttggcgccgttgccaattgggtgtttgtttgttacatttgagatttcagacaagcttagatcaagttctttttcaattttcttttcagttacggactgtgtgtttttcttgttgtcttctcggttgaggtacacctttgctatattcaaactcgatcaacaggcaaccagaacctccttttcaatgataacatcagccgcctagctcgtgaactcagagaaaggagaaacacagtcaaccttatacctcaacaaccactcgaaatggctgacgaacaaaatcaacagaatggccctgcaaacattggtgctggagatgcaccacgggaccaccatcagaggaaaggaattgcacctcctgctatccagaacaacaacttcgagattaagagtggtctcatcttgatgattgaggggaataaattccatggtctgccaatggaggatccactcgaccacatggatgaatttgataggctctacaacctaacaaaaatcaatggtgtcagtgaagacggattcaagctctgtttgtttccattctccttgggcgacaaagcacacatctgggaaaagaatctgccccatgactcaatcaccacctgggatgattgcaagaaggctcatttctgagtggcttttcacagaagactggtgaaagcttctgtgaagcatgggagcgtttcaagggttacaccaacaaatgccctcatcatggcttcaagaaagcttctctgcttagcactttatgcagaggagttctaccacggatcagaatgcttctggataccgccagcaatgagaattttcagaacaaagatgttgaagaagggtgggaattggttgaaaaccttgctcaatcagatggtaattacaacgaggattgcgacagaactatcagaggcacaactgactctgatgacaaacacaggaaagagatcaaagcgctgaatgacaagctggacatgattcttcttagccagcataagcatgtgcacttccttgttgatgacgagcagtttcaagtccaagatggggagggtaaccagttggaagaagtcagctacatcaacaacaaccagggtggctgcaaaggatacaagaacttcaaaaccaacaaccccaacctctcctaccgcagcaccaactttgctaatcctcaggatcaggtgtatcctccacagcaacaacaacaaacccgatgttataagcctaagtagtgtttccttgttagaagacacaaagccaaagactcatatggaatttggctacaccatgaaagctttgagaagcaagaagaaggttggttagtattttggagtcgaatatgacttaatgtcaagtgtattattgagtataagaacataaaccacaaccggatcttaaatgcgtaagaattgtatccttgttagaagacacaaagccaaagactcatatggactttggctacaccatgaaagctttgtgaagcaagaagaaggttggttagtgttttaaagtcgaatatgacatgatgtcatgtgtatgattgagtataagaacttaaaccgcaaccagatcttaaaggcgtaagaattgtatccttgttagaagacacaaagccaaagactcatatggactttggctacaccatgaaagctttgagaagcaagaagaaggttggttagtgttttggagtcgaatatgacttgatgtcatgtgtatcatgatacaagtgttttcggtgtgtcaattccctaaatgcatcttatgtcattgcagcatttaaggtgtcaatccaaatgggtgtaattgctatcaatcaggatatgattagagaatactaagtcaagccaagtgtgaataggtttggtgtgtttctactaaacctaagcaacaggttaacatgtaaatcaaattcagaaattgaactatactaagcagaagataaagaacatgagtgataaaaccaagaagtaaatgcaagaaccagaaagtaaaccaagcacaaagagaagcactcagtcgagtaaactaccaacaggtcgagtacaatactaaaaacaccaattttgcacgagacgaacagagtactaaaaacacgagttttacacaataaaacgaaacatatctcttaagaatggggtaattggtcttagtggactcctcaatccattagctaactaacaaactcaatcaagctatccctagacaatagattcaaaaccaaatcaagccacttccgtgtgaatgattctcataactttagaacttcctaatctcaattttcattgatgaaacataataaagcaggctttaaacaccaatctattaaagtcaataagcagtctaaacatccaatgccttggggtagaatctacaaatctctgaaattagttggttcagacatttcatcaaacaccttttggatggagaaagtctgaaatcaattttcaattgatcagaaagaaaatagcattaagaactcctaaaacagaagggaatcatgcatataaacacttagctagctaaagaagagaggaatccacctaaacctaactcatcctcaagaactctgaagaacactactcaagaacactgaagaacatcatagaacaaaacccagaaaattcataaaactcagaaatcattataaacttagcaaaagatagatctcaatgagataaacaagtttgcagaagaaatcaaatccaaattctcaacagaacaaccagaaaatgcaaaagaaaatcaaagaaccctaaaaaccagcggacaaaaacgaagatctcttgggcaaaaacataagaggtctatttataggcaatcctagattgccctaattgggaataagacaaaaaagataagtcggcgcaggagcgctcggccctaggccgagtagaaaagccgagtggcttggtcttggtcacacagctcggccttaggccgagtggcttggtcgagtagcttctcttcatcctttagtgcacaactcggcctccagccgagtgccttggtcgagtaggctccttgttcttcacgtgtgctccactcggcctccagccgagtacataggccgagtatacttcaaatccttccttaggtcccccgaactcgagtctgtctatcccttgtgctagaaacctccaagttgagtccaaaagtacctgattcatctgcaaaacactccaaatgcaagtatgctatgcaatgcaatgcaaaatgtgcaaaagaaggaaaagagactaagaatgcataaaaagagacttgaaactaagctaaatgcatgaaaaacaagggcttaaaaaggttaaaatctagtgttatcaacacccccaaacttagctctttgcttgtcctcaagcaacaatagaactaggctaggagtgaggtttgaaggtggggattcagaaccaaaatatgcatgtaaaatagatagtctcaatgtccatgttgctagttctagagtgctaggttaaatgacctctacttaaaaactttagccatcttcttcacaacacaacctaatctttcacttagtctattcaagccttcaaatcagcaaattccctttaacatttattaagcaagagtcatggatcatactacgcaat

SEQ ID NO: 145025 - DNA, 142 bp, Arabidopsis thaliana landsberg
  unsure (1)..(142): unsure at all n locations
tggtgatggtgatgatcatagnaagattatgatgatgatgaaaaataaaatagagttgatggctcagactcgaagttgtttctgtctaagtagtttgcaagaggaagatgatggtgatggtgatgatgatgaagatgaatga

SEQ ID NO: 145026 - DNA, 586 bp, Arabidopsis thaliana landsberg
gatgttaccgacgattcctctcaccttcttcaccactcactccctccgcctcttctcactcagtctcactcatcactctccgatcccgatccggagccggaaccttcttccgccgaatgtaactccgatctcatcactgaatcagatctcgagcatcaatccgattcgaaaactccctcgtctacaccatttgagtactgggacgaagacgagttcgaaggactaccagttgagatagagacacttgaatctccattgattacagaaaacggaactcatgctgatccaaagacgccagatctcaagacttcatcggaagctcaaggagacactaatgatcaaacgaagaagaagaagtcgtacgcggtggagatcgcttgcgtctgtttcttaatcgcactcgcaatcaactacttcgttggtaaacgtgagaacgagagtctcgcattagcttgggcggcgaaatttgcttctaaggatacaatattccagaagaattttagtatgcttggagttagtgaattagaggattcgccattgttgttaaaagaagccttaaatgtgttcaaattctacgcgagtggtc

SEQ ID NO: 145027 - DNA, 398 bp, Arabidopsis thaliana landsberg
tgaaatgtggtggctgtcaaggttcgggaatgaagatctcgatcaggcagtttggacctggaatgatgcagcaggtgcagcatgcttgtaatgattgcagaggcacaggagagaccatcaatgatcgggacaggtgtccacaatgcaaaggagataaggttgtctctgacaagaaggtgcttgaagtaaatgtggagaagggaatgcaacacaatcagaagatcacattcagtggacaagccgatgaagcggtatgtgatactctatttgtcctggctttgatcattatatatttcgtctattgacattttcctttctttttcatttggaaacagcctgatactgtcaccggagatatagtgtttgtcattcagcagaaggagcacccaaagttcaaa

SEQ ID NO: 145028 - DNA, 761 bp, Arabidopsis thaliana landsberg
gaaaaagaagaagagtacaacaagtactaagaagacgaagaaggtttcaacaatagcttattcgcagttttttcaattctggtaaaaaggcttcattaccattttatcttctactcttcttcttcttcctgttttcgatcttctgtctttttcggtaatttccgaatttgtgtttcaagaccgtatcatcttatgctacgattgaatttgttggaattccagttttgggttcttcaccaagctcagaatttcaaactgtcagaattgtttgaaagagtcaaacttgaactgggattttttttgacttagggttcgtcagatgttggatttgttaatccttgcagagtcgtttaaggggtttataaaatgctttatttataatcctaaaaagctatctactttctgatttttttccccaattcttggtttgaatcctaaagctgtttcctgtgctataacaggtgagtgtttagcactacattgctcttgctctactggagattgcgtttgtgtgttacgagagctagagttgaattggctttggtcaacacaatggggacttgtggttgctgacttttgtgattttcagttttctacttggatttagatggatgtttcttccattgtgcgaaatacaaccctaactgatcaagatcctttgttaatggaccacggtaaccgcgagcacatcgttgacattacaagcaatgacgaggaggactcttcatcaagatcttctctcgatgagcttactcctcaag

SEQ ID NO: 145029 - DNA, 1630 bp, Arabidopsis thaliana landsberg
attgtgtgcttcgtttatggatgggcaatgaagatcgacaacaatcaaagcctgaagagaaaactctgcaggaagacaactgttcagattgtttcactcatcagtatctctctgctgcatcctccatgaataaaagttgtatagagacatcaaacgcaagcactttccgcgagttcttgccttcacgggaagaggtaaaaaacaatctttcattgctatttgaggttttaagacgattagtacttttcatgaaactaaaaccgtgggggaataacagggaagtcagaataacagggtaagaaaggagtcaaactcagatttgaatgcaaaatctctggaaaacggtaatgagcaaggacctcagacttatccgatgcatatccctgtgctagtgccattggggagctcaataacaagttctctatcacatcctccttcagagccagatagtcatccccacacagttgcaggagattatcagtcgtttcctaatcatataatgtcaacccttttacaaacaccggctctttatactgccgcaactttcgcctcatcattttggcctcccgattctagtggtggctcacctgttccagggaactcacctccgaatctggctgccatggccgcagccactgttgcagctgctagtgcttggtgggctgccaatggattgttacctttatgtgctcctcttagttcaggtggtttcactagtcatcctccatctacttttggaccatcatgtgatgtagagtacacaaaagcaagcactttacaacatggttctgtgcagagccgagagcaagaacactccgaggcatcaaaggctcgatcttcactggactcagaggatgttgaaaataagagtaaaccagtttgtcatgagcagccttctgcaacacctgagagtgatgcaaagggttcagatggagcaggagacagaaaacaagttgaccggtcctcgtgtggctcaaacactccgtcgagtagtgatgatgttgaggcggatgcatcagaaaggcaagaggatggcaccaatggtgaggtgaaagaaacgaatgaagacactaataaacctcaaacttcagagtccaatgcacgccgcagtagaatcagctccaatataaccgatccatggaagtctgtgtctgacgaggtacttacttggactaaagatcaacttcctttatttcaaatcattttctcatataaatattgtacattcagggtcgaattgccttccaagctctcttctccagagaggtattgccgcacagtttacatatcgagaagacacagagaggaagaacaacaacaacaagaacaaagatatccaatggcacttgatcttaacttcacagctcagttaacgccagttgatgatcaagaggagaagagaaacacaggatttcttggaatcggattagatgcttctaatctggggagtagaggaagaacaggttttaaaccatacaaaagatgttccatggaagccaaagaaagtagaatcctcaacaacaatcctatcattcatgtggaacagaaagatcccaaacggatgcggttggaaactcaagcttccacatgagactctattttcatctgatctgttggttgtactctgttt

SEQ ID NO: 145030 - DNA, 1150 bp, Arabidopsis thaliana landsberg
acaaaaaaaacttcagagcggtgatcagattcaccgatttttctcaaaatgctaatcaaatcccaaagatcattgactcttttctctcctctcttgtccaaaacaagacggatcccggttaactcccaccaaatactggtcgcagaatcggtgataactcggagaacactcggtgcgatcaccgcaactccgagttttcatggcaatccggtggtgattcgacggaggatcaaattagagagagttacgaggaactgcgtcagaattgatcgggaaatcgacgaagaagaagaagaagaggagaaggagagaggggatctggtgaaacagagcatatgggaacagatgaaagagatagtgaagttcacaggtccggcgatggggatgtggatttgtggaccgttgatgagtctcatcgacacggtcgtcatcggccaaggaagctccatcgaactcgctgctcttggtacgcttttcaatcatacttgtctttccggtttagtagccaattttgaaccggtggactggtcccctacccaatagctaagctgtaagattcatacactgtttttggttcctttgtttagtctctttcgaatatattacacagatatggaaccaataatagttttaaaaacaggtaaacaaattaggcaagtgtccagctatatcatcttattatttaatcatttttcaagccaatcattagatttgtgtcggtttaccaacttcgaaaattagtatttgtgtaacgttttgcacgattcttctagacagaaaaaaatataatcggtaacataattaatagaacaaaatacataatgttaaagtttaaatatgttggtctgaagaaaaggcaaatggttttagtctcgctggtcaaagttaacgaccgtttccaatcatttgattatacaaattggactagtcaacgcaaggctaactaacataattcagtggttaaaaaagaaaaattgtttgatttttggtgagaatacggtaaataattgttagtatatttgatatgatggctgagaaaattaccggtttaataggaccgggaacagtactatgcgaccacatgagttatgtcttcatgttcctctccgtggctacatccaatatggttgctacttctcttgccaaacag

SEQ ID NO: 145031 - DNA, 10472 bp, Arabidopsis thaliana landsberg
aacaacaattgaaggatgaaattctgaagattcttaatgttcacaacaaccccaagaaagctaagtcaacatctcaaccaaagattgttaccgaagaagttgtagttcagaagcaaagcctaaaaccatcacttgaaccaagcgttgagccaatgcactgtaagtcttctaatctttcaaaatccagaggagacacttgttataactgtcgtaagaaaggacatttagttgcaacttgccctgaaaaacttgagctaactaatacttcattagaatcgaaactgagctcaccaaactcaagtagtgaagtagttagtcaaggtttagaaaattctagttcttgtgtcatgcacttgttcttgtcaaaggatgttgattcaggtgatattatggagcatgagaatgacaaaattgaagaaagcacaaaagaggagaatcatcatttggtgtcaaccacttcacaagcttgtctagctgactatgtttcaaaaatcaccatcttgaacaagaaaggaccgccatatgtatctcaaccagttctaaaccgagagttacctaaagaagaaccacatgaattaggaggattcactcaagttgaggctgtcatggtccacaaacaatcacctagagctgaatgcaatatttttttcaaggataaaccactagatgctacaccaccatttaaaactcgaggtaattatctaaactcccaaaaacgaatgaaagctaatttacttactcttggtgaaggttgtacactttggaggccaatcaagaagactaatgatcgggagataagcactcatcatatgagtccatcaagagatcctcgtgaagattatcaaaatcaacttcggctaaagcacatggaagaatacataggcaagcaatcaattttttttgtgagggctagtaaggttaaaaatgatttgttatcaaaaaacccatgtttattgcttaagtatgaagaatctctcatgagcttgactaaccgtgcaccggtgctgccgagtgagatgatgtctcttttgcaggattatgaggacatgttctcactggataaacctataggactaccatccatacatgatgtatctcaaagtcacgtttggagaccaggagattatctagaacgttcaaatcttacaccacatgagattttagtcattttacttcacatgtttcctgaagagcctaaatttgatctttcgtcacttggggcatttcatgcttatcactggcgaccaggagagttttagatacctttagagagaatgagttggtcacaagcaatgccttatccaaaaagaacccccggatccaacaccacttccattagtcataatgataccaagcaccgaacacactgtgaacctttctcaggtaagtaactctttaactcgatttgtttctcatgtttcaagaactggtactatgagtttatcatatttaggaaacattgagaaagagttagatttatttaaagaatatttggaatcaaactcttgtcttaggataaaagtaaaacatgaacatttcaagaatgatgcattgattaaaattgagcaatgtttacttgtttatagtgatttcatgactatgataacgcacttgctttttgccaaaggtgttgacaacattgcaggtataaaagaggagccaccagacttagaatttctatcgtccaatctttttgagaggactggaattggagttgttttgatgccacagatcgattacccgttcaaccgaacaagaaaaaaaagcgacaatgcttctgaacttaagctgcaaggtaagtataatgtgagttccaatttcaatgattcttacttggttcttttcattgtagctaaattggatttgaggtcaaatccttttcaaatgggagaggatgatgtgatcatgaaaagcacaaaggacttggaatttgatcaagagcttgtagccgcggaagagcttgaagcagaggagcagcttgaacctgaggagcattttgaagcagaaaatgaacttataacggagaaaaagtatgggaaagatgttatcttaacctcattggttttgatacataatcatcaaatgggcatgtgtctcatttgtactctttttcccttgtcaagttttgtcccaatgggttttcttgacaaggtttttaatgaggcctaagtaacactttcaagcctccctttatcagcccaattcgtggtccaaggcccactcacaatgccttggcccattctctcttttttattcaaactttgcatttattgcttttgttatttccaaaactctttgcatgagcttgcatgagtgtggacttgtgcatgctcttgcatgtctttcttctctcacctcttccctttcttcctcctctcctatataaactcattgtatttctcatttgcaatcatcaaacattttaatcaaaaaaccttctcttttacttgtttgatccgaaaagtgtgtaatatcttttcaacttgttttcttcttagtgtgtaatatctaagttggatccaagctagtagtctaagagtctttcatcactcttggaagtacaattcgttcccctttcattccgctgcatccacccgatcttgtcttcatcccggtttatcgtctttccaccgctttgttccgaatccatctattattcaccatcaagtacataattttcaattcaaaaccaacaaagtgagtctttggagcatacatccacgtccaagaatgtatcatgtggtatcagagccactttgttatcaggttttgaagttccaaccctaaacttctgtttttcttctttcagatctccgttcaatcttgcgtgaattttataaaatatttggctcgttcaaaaattgtgaaaccaattgcatttgaaccgtttacgagtctagtatttttggagttgttttgataatttttcagatccgtttttatttgcctgtttttggactgttttacttgttaaatttttaatttttcaggtacaatggtgacaagtgaagaagatgaagcgtcatctgcctctagcttggaaaggaggattttgaaaacagtcacatcagctatggcaacattaatcgatgaaaagcttagtgctctaaacttacatcaagtcaacccggacgcaaatccacgtctaagacaagaagaaccaagggaagatgaagaggcaagaaattactatagtcacgcctcctctcacagtagccaacgtaggcatcgacgagagagaccaccacctagagatcccttgggaggcctaaaactcaaaattcccgcattccatggaaccaacaatccggatacttacttggaatgggagcagaaaattgagttagtctttctttgtcaagaatttcttgagtccaacaaggttaaaattgcggctactgagttctatgactatgccttaagttggtgggatcaacttgttactagccgaagacgtacccgagactatccgatcaaaacatggaaccagctgaaaaccgtcatgcgaaagagatttgtgccgagttactatcatcgtgaactacatcagcggttgagaaatttggttcaaggaagcaaaaccgttgaagaatactttaaggaaatggaaacccttatgtaagagctgatcttcaagaagatggagaagcgctcatgtcccgattcatgggaggtcttaaccgagaaatccaagaccgtctagaaactcaacactatgtggagcttgaggagatgcttcacaaagcggtcatgttcgaacagcaaatcaagagaaagaacgcccgatcaagtcacaccaagaccaactacagcccgggaaagccaagttatcaaaaggaagagaagtttggttatcaaaaggattacaagccgttcgtcaagccaaaatcggtcgatctagatccaaaaggaaaggttaaggaagtaatcacgagggctagagatatccgatgctttaagtgtcaaggacttgggcattatgcgagcgaatgttccaacataagaatcatggtccataaagacaatggcgaagtagaatccgaagatgagagtgcgggagaagactcaatggaagaagatgtggaatcccccgctagaggagagttgcttgttgcgagaagatcgttgagtgttctaacaaaggccgaggaacaagcgtaaagggaaaacttgtttcatacacgttgcttggtcaaagataaggtatgtagtttaattattgatggtggaagttgtactaacgttgcgagtaggaacatggtcgagaaccttggtttagaagtgcttaaacacccgagaccgtattcactccaatggcgtaatgaaacgggtgagatgtccgtcaaagaacaagtcaaggtaccactatcaattgggaagtatcatgatgagatcatgtgcgatattctacatatggacgctagtcacatccttctcggatgaccatggcaatcggatcgaaaagttcttcatgatggcttcaccaaccgacaaaccttcgaacacaatggccgaaagacagctctcatcccgatgactccgcacgaagtctatctagaccagctaagtatgaaacaacgggccatcaaaccaaccgaaccaatcgatacaaagggcaagaacaaggtaagtaaaaatagtttactctttgttttcaaagaaacacttacttgtttaactaatcccgtaccggtgctaccgagtaagatcgagttgattttgcaagagtataaggacgtgtttccagaagacaatcccataggtttaccacccatctgtgggatcgagcatcaaatcgacttcgttccgggagccgctctaccaaaccgaccagcttatcgcaccaacccgaccaaaacaaaggaactcgagagacaagtgaatgagcttatggacaaaggtcatattcgagaaatcatgagtccgtgtgccattccggtcttactagtaccaaagaaagatggaagatggcgcatgtgcgtggattgccgagccatcaacaatatcacggttaagtatcgccaccctatccctcgattagatgatatgcttgataaattgcatggttctagcatcttttcaaaaattgatcttaaaagtggttatcatcaaatccggatgaaggaaggtgatgaatggaaaacggctttcaaactaaacaaggattatatgaatggttagttatgccgtttgggttaacaaatgcacctagcactttcatgagattgatgaatcatgtccttagaaagcatattggagtatttgttgttgtttattttgatgacatcttagtttatagcaaaaacttggaagatcatgtcatgcatcttaaactcgttttggacttgcttcgaaaagaaaaactttatgcgaacttgaagaagtgcaccttttgcacggataatcttgtttttctaggctttgttgtaagtgcagatggaatcaaggttgatgaagaaaaggtcaaggcgattagagaatggccgagccctaagaatgtgagggaagtgaggagctttcacggtctagcgggattttaccgacgatttgtcaaagatttcagcaccattgccgccccgcttacggaagttatcaagaaggacattggattcaaatgggacgatgcacaagaaaacgccttccaagccttgaaagagaagctcactaattctcccgttctaattcttcctaattttatgaaaacttttgagattgtgtgtgacgcctccggattaggtattagagctgttttgatgcaggattacaagcccattgcttactttagtgagaagttaggaggagcgactcacaattatacgacctacgataaggagctttacgcattggtccgcgcactacaaacgtggcaacactatctatggccgaaaaagttcgtcattcataccaaccacgagtctctcaagcacttaaagggtcaacaaaagctcaacaaacgtcatgctcggtggatcgaattcatagaaacctttccatacgtgattaagtacaaaaaaggtaaagataatgttgtagccgacgcattatctcggaggtatgttttgcttacttctttggatgcaagattgttgggttttgagcaaataaaagacttgtatgctaatgattctgattttagcaaaatatttcaatcttgtgagaagtttgcatttggaaaatattatcgacatgatgggtatttgttctttgaaaatagactttgtgtgcctcactcttctttgcgagaattgtttttaagggaatctcatggaggtggcttaatgggacactttgaagttgctaagacgtacaaggtaatgcaagaacacttccattggccgcacatgaaaagagatgtcgagcgactatgtgaacgatgtgcgacttgtaagcaagctaaggctaaggttcaaccccacagtttgtatagccctttacctattcctttgcatccttggaatgatatatctatggattttgtggtaggattgcctaggactaggactggtaaggattccatctttgtggttgttgatcgcttttctaagatggcgcattttattccatgtcataaactgatgatgcatctcatgttgctagcttgttctttagagaagttgttcgtttgcatggcattcctaagaccatagtttctgatcgtgatactaagttccttagttatttttagaaaactttgtggtcaaagttaggaactaagttgcttttctctactacatgtcatccgcaaaccgatggtcaatctgaagttgtaaatcgaaccttgtctactttattgtgtgtgctcattaaaaagaaccttaagacttgggaagactgcttgccgcatgttgaatttgcttataatcattcgatgcattccgcgactaagttttctccttttgaaattgtttatgggttcaaacccacatctcctttggatctaatgcctttacctttgagtgaaagatcaagtcttgatggtaagaagaaagccgatttagtacaacaggttcacaaggaggctaaggaaaatcttgaggctcgaacgaagcaatacgagaagtatgcgaacaaaggtcgaaaagaagtcatcttcaacgaaggcgatcaagtgtgggttcatcttaggaaggaacgttttccggaagagcgatcatccaagctaatgccaagaatcgatggaccattcaaagtgctcaaacggatcaacaacaacgcctacaaactcgatctccaaggtaagtataatgtgaatggtagtttcaacgtttctgatcttcaacctttttttgcagataatttggatttgaggtcaaatccttttcaagtgggagaggatgatgaaaacatgaccaatgcaaccaaaccacttgaaccacaagaagacgagtagcagcttgaagccgaggagcagcttgtaccggaggaagcattaatcgttccggcgggtcctctaacaagatcaaaatccaagaagttcaaccaagctatcaatggactactcaagaagctaaagaagaatcaagaagacgtggctcaatcctccttcatagtgatcacggctcaagaggctcggtaaagggttaagtgctgcttatgcactctttttcccttgtcaagttttgtcccaatggattttcttgacaaggtttttaatgaggcctaagtaacacttacaagcctccctttatcagcccactcacaatgccttggctcattctctcttttttattcaaactttgcatttattgcttttgttatttccaaaactctttgcatgagcttgcatgagtgtggacttgtgcatgctcttgcatgtctttcttctctcacctcttccccttcttcctcctctcctatataaactcattatagttctcatttgcaatcatcaaacattttaatcaaaaaaccttctcttttacttgtttgatccgaaaagtgtgtaatatcttttcaacttgttttcttcttagtgtgtaatatctaagttggatccaagctagtagtctaagagtctttcatcactcttggaattacaatttgttcccctttcattccgctgcatccacccgatcttgtcttcatcccggtttatcgtctttccaccgctttgttccgaatccatccattattcaccatcaagtacatcattttgaattcaaaaccaacaaagtgagtccttggagcatacatccacgtccaggaatgtatcatcttatctccatgattcaaggtaataagtttcatggaataccaatggaggacccattggatcatcttgataactttgatagactctgtagtctaaccaagattaatggagttagtgaggacctcttcaagctcaggttattccctttctcttttggagataaagctcatctttgggaaaagactttgcctgttgaatctatagatacttgggatgattgcaagaaggctttcctagctaagttctcctctaactcaagaacagctagactgcggaacgaaatttcaggattcacacagaagaattcacaatcattctctaaagcatgggaacgcttcaagggctacactactcaatgccctcaccatggtttgaagaaaacctcacttcttagtactctctacagaggagcattgcccaagataagaattttattggatacagcttctaatggcaactttctcaacaaagatgtagctgaaggttgggaacttgttgaaaacctagctcaatctgatgggaattacaatgaagactatgatcgctcgaatgagaggaactggaggtcgtgaggacaaacaaagcaaggatatcaaggttttgaatgaaaagttcgacaagctgccgttggctcagtagaagcagatagactacattactgatgaaaagcacttctaaatgcaagaaagggggaatgatcaaactgaagagctgtgctacatccaaaaccaagaagggttcaacaaggggtacaacaactacaagcccaacccaaacctctcctacagaagcaccaatgtagctaacccccaagatcaagtgtatccaccacaacaaaatcagtggaagccttttgttcagtccaaccaaggttatgtcccaaaacaacagttcaatggaggataccaacagctgaatccaccagggttcactcaacaaccacaacaagccccaacagctcaagatcctgaaattaagcaacttattcaacaaatcattcaaggataagctactggcgctatggcttttgacaagaagataactgaattacacaacaagatcgattgttcttacaacgatctaaatgtcaagttcgaagctctgaattccaaaatctagtatgtggagagtcaatttgcatcaacatctacttcgaagcatcatcatcaacttccagggaaagcagtccagaatcctaaggactatgctactgcaaatgctatcatcatccaccaagaaggtgagtctccaccaagtcatcagactcccaatactgaggacaatatgcttcaagaaggggggggggggaattcaactcaaattgctgcacctgccacccaacaattgatctggactatagagcacacacctttgctgaatactcattattctaaaaaaaaaaaaaaattgaaaaactcaagaaaggttaaaatcaagagatgattagcagtgtcatcactcaagaaacatacaagaaaagcttgatgatcccggttcattcactctgccatgctctctaggaccattgacattcaataggtgcctttgtgatttgggagcattcgttagccttatgtctctctctacagctaaaaagctagggatcatggaatacaagttctgcaacttagctttactcttagctgatggttctgttgcacatcctaatggtctgatagaaaatttgcctgtcaagattggaaatgttgagatacctacagattttgtggtattagacgtagatgaagaagtcaaagatcccctgatcctaggtagaccattcttagcttcagctggagcagtcatagatgtcaggaatggaaaaattgatctaaaccttgaaaaaggtatcaagataagatttgacatcagcaaagcttcggggaaatcaacaacaagaggtcagaatttggggattcaggacatggatgctgatgaggaaacagaagttggaaccccaccaagagttaactatacttctcaacttagcaagctgaagagaacttttgaccacaagaagagagcaatagaagggttagctcagactgaatatcctacaaaagataactggtatgagatgagaaaaaaaattaaatggcaaagcagagttatagagggattatcttcaagggtgatgaagctgaaagatcaactatggatgtttgaaaaaagagttaataagttttcaatgagtattgatccagagaagatggaaactgcactagctatcaaagaggacgaagatttcacggcagaatag

SEQ ID NO: 145032 - DNA, 658 bp, Arabidopsis thaliana landsberg; identical to SEQ ID NO: 24945
  unsure (1)..(658): unsure at all n locations

SEQ ID NO: 145033 - DNA, 583 bp, Arabidopsis thaliana landsberg
cgctactgtctctccaaagcagatcgaatcatgcttcgttttcgtcccattgctcctaaaccggccagcgacggtgaagtgtctctctcaccgggaagagcgctccaccacaactacaagtggtggaagctccgatctctcaggtaaatctgggagaggaaagaggaagtatcaaaaagatagttccggtgggaactcccgaaggtgcaataagaagaagagagatctcagtggagacgctgctactaccacggcggttacattgtctcttttaccagagacgcctgagaaacgagtttttccagatctgaatgcttttccggtggagaagcagaagcggcagggtccgttatggttgagtttcaaagacggcggagggatgctcacaccggcttatcagacaccggagattgtgcagaggacggtggtgatttcgtcgtgtatgacggtggagcgtgtgactgacgcttggattgacggttatggattagggaggtcagatgaagaaaggaagatgaatctagttgagagacacgtgtcctggtttcatatccgacggttcagggagagtcacgtggactaa

SEQ ID NO: 145034 - DNA, 602 bp, Arabidopsis thaliana landsberg
gactcacttactacgtgtatctgtcttttttacatatattttgaaagtttcatcctttatcccgatggatgcgaataatacaaataacctaacaaaactcgaatcagagaattccagatattacttacataagacaattttagcaattagctttcaaatctcatctctttattctctctctctatctcttctcctcaagaaccctaaaaatctccagaaaaaagatcccaaatttcgtatttcaacgatctgaatctctctctctttcgggtttattttgtttcccgatatggtttagaatttgtgatttaaatggaagctgacgtgtcaatttcctgaaaaaacccttatcgcgaaattttccagattaccaaaaaaaaaaagattgaaacttttttcgatttgtttgaagaagaagcacggtaggaacgacgacgatgaatcgtgctttggtcctacttttatatgtttgtactgtttcttgtttagcttcaagcaaagttattttgatgaggaataacatcactctctcttttgatgacatcgaagctaacttcggtgagtctcttccttatcactctgttttcatttcagatttttga

SEQ ID NO: 145035 - DNA, 268 bp, Arabidopsis thaliana landsberg
aaaatctaagttgagaaaaagagagatctctaatttaaccggaattaatattctccgaccgaagttattatgttgcagaggctcatgtcgaagaaacagagattgtctgaagaagatggagaggtagagattgagttagacttaggtctatctctaaatggaagatttggtgttgacccacttgcgaaaacaaggcttatgaggtctacgtcggttcttgatttggtggtcaacgataggtcagggctgagtagaacttgttagttgc

SEQ ID NO: 145036 - DNA, 569 bp, Arabidopsis thaliana landsberg
agcacttctggatgtccatttggtgacaattgccacttcttgcactatgtgcccggtgggtacaatgctgcagcgcagatgacaaatctccgaccaccggtttctcaagtttccagaaatatgcaaggatctggtggtcccggcggcagattctcagggagaggagatccaggatcaggccctgtttcaatctttggtgcttctacttccaagatcagtgtagatgcttctttagccggtgccatcattggaaaaggtggaatccattccaaacagatatgccgtgaaacaggagcaaaattatcgattaaagatcatgaaagagacccaaacttgaagattatcgagctggaaggaacatttgaacagatcaatgtagcgagtgggatggtgagagagcttatagggaggcttggatcagtgaagaaacctcaagggattggtggtcctgaagggaaaccacatcctgggagcaactacaaaaccaagatctgtgataggtactctaaagggaactgtacatatggagatagatgccattttgctcatggtgaatctgagctgcgcag

SEQ ID NO: 145037 - DNA, 1401 bp, Arabidopsis thaliana landsberg
atggttaagtctttgtctttagaagtttctggttctgatcggtttccgattatggatgttgcgcggtgtatgacctctggtgagctccagttcagaagcccgacacttgaagagcttaggcttgtgtttgctgtgatgaaagctctctctttggttcatcctttgctgcttcaagaggagaagcaagtcaggggattgccaaggatgataaagttttcaccttttattgagactgtcgatgttcagtggccatcagagatgggtaaaggtcatgattttgttgctgttaccggctcacatcctccaggtcaatcatatgaacagaagcgcgaagatgaccagatggaaatagtttcaggcatgaccgcatgatcaatctgcgagttggtcaaggtggagaagcgggtttaagacagtgcacaatgtgtaagaaagctattcataaagatgagtctgtttgttgtagccattgccgtgcaaccatatactgtggtttagactgcgagaaacggcattggcgagagatgcaccggagtgtttgtagtctctatgaagctatgatgagtagagaagagaagctcaagataaagatcttcactttctcgtgttatgctgagaacctaatggcttggatctttaggcatccataagaagggaatgtggagaagacaatgcagttgctattcccaccaaccttttggactcttacagtgtttttccacagaggcacaatctgaatcatggagagggctagaggacggggattatccacaagatttaccgatacagaatctgaacaacgggcgttccccgggtatgatcctcttgtcagattggtcagactactatgatttactgtgtctaccacggtcaagccttgtttatgacattctctgttaccctttaacactttaccacatattaacatcagtaagcaaccatcccaagaatctgttgctgaaagggaaagaagtgactgtccattacttaggtccagaacgagaactcgactggatcaaagcatttgcagagatcaatcacttgcttaatggtttaggaaccgtgcagatcataatgatcggacctgaagttccatctgacttatctggtacaatagcaaccacctcaacaacaaacagtagagttaaggtgagctttgtgtaaggtttgcaccaagacgaggtaacatacctgacttcaccggatatcactgtagccttgaactgtgacctggatgggtactcaagctgggcaggagcggttgaggcggtgaacaatacgggcatcccctgtttcttcactgataagagagaagaagcttgtggaaatgcaaagacagtttcgcgcaacgcagggctgaatttctctcatccggttgctcctaaccctttccgttcacct

SEQ ID NO: 145038 - DNA, 410 bp, Arabidopsis thaliana landsberg
accccacttcttaccaggaagaggttaacagctccgaagcggtttcactacgccgagctacgacatgttcaccaccagacagaatgattgggatctgaggaatattggaatagcctttgactcacatcaggactcagaatccgctgcgttttccgcttcagaagcctactcttcttcgtccatgtcaagacacaacacgacagttgcagccaccgagcatggccgaaaccaccagcagccaccatcgggaatggtacagcaccatcaggtttatgcagacggaaacggtggttcagtgagggtgaaatcagagagagtggctacggatacagcaacaatggcgtttcacgagcagtatagtaatcaagaagatcttatgagcgcacttcttaagcaggtttgatttgatt

SEQ ID NO: 145039 - DNA, 1935 bp, Arabidopsis thaliana landsberg
atggtgttcaagagcaaactcttcttctcctcgaagaaatcgagatcttctagtcccagtagcagcaacagtccacgatctgttggctccgattctccgattcgatccgataagaagtaaccgaaatcaaattctaaagaggaaactcggagccctaatacgaagaagcatgtctcagcgaagggtaaagaagcttcgttagaagttcactcttctagtccaggcaaatcaaactcgtcatcttctggttccgaggcgaagaaaccaattactgaaacgccggcgacttctgacgtgaaggaggaatcgccggcgtcggtttcgcctatcatggcttcatctttgggtttgaatagaatcaagacgaggtctggcccgttgccgcaggaaagttttttcagttttgagaatgattatgcaattccggtcttaccgtgttacaagttgtcgaagttggatactggcaagaaggaagctggaagcagcaaggtagatattggaccgctaagaagcagcaatcccgcgttgctggcttcgggaactggtatgacttcagatgctcaaaattctcttgatcatgttgttgaatgatatgttgtgtgacttgtgtccatctcatcctaagacttcttgcattttatggtggcaccgttggtatttcagttcttgcttctcaagtttgattttgatgttacaaagcaggtcaattcaaggtatcacctaccatatctggccctgaaggaagcgcagaagtttgcacaccagaggtatttctagtctgcttaccgataaaaagagagtatgtgctatctatatacatcagctctatgtgacctttgtgacttgacgtctatcgttttagaattcatacgatttggatgatccaaaagagtcagactcgcctcgttatcaagctttacttcgtatgaccagtgctccaagaaagaggtttcctggtgatatcaagagcttttctcatgagctgaactcgaaaggtgttcggccttttccattatggaagcctcgtaggttaaataacttggaggtagtctttgaggctactttttctgtattagtttcatcttaaatctgttcaatgcattctctaatcatctctcttatgcaggatatcttgaatctaattcgaaccaagtttgataaagcaaaggaagaagtaaattcggacctttttgcatttggtggggacctgttggatatttatgataaaaacaaagaaagtcatcctgagttgctggttacaattgaagacttgttggttttggcaaaaacttgtgctaagactacttcaaaagagttctggcttcagtgtgagggcatagtgcaagacttagatgatagacgtcaagagcttcctccgggcgtgctcaagcagcttcacactcggatgctttttatccttaccagatgtaccagattactttaatttcataaggaaagttgggggcaggaggaagatgctgtacaactacgtcagtcaggagtcttgcattctgccgataaaagagaccccactggagaagttagggacgggaagggttcaagtactgccaatgccttaaaggtaccatccaccaagaaagcttatagtcaggagcagcgtggtttgaattggatcgagggcttttttgttcgtccagctcctctctcttctccgtacaatgaaacgtcaaaggattctgaatcgcctgcaaacatcgataaaatgtcttcttggaaaagacttccatctccagcatcgaagggtgtacaagaagctgcagtatcgaaagagcagaatgatcgcaaagttgaacctccacaggtcgttaaaaagctagtagctataagtgatgatatggctgttgctaagttgccagaagtttcttccgcaaaagcgtcccaggaacatatgtccaagaatcggcataatatttc

SEQ ID NO: 145040 - DNA, 488 bp, Arabidopsis thaliana landsberg; identical to SEQ ID NO: 4682

SEQ ID NO: 145041 - DNA, 1110 bp, Arabidopsis thaliana landsberg
aaagatccgtaaaaattgtattgaggagctgaaaaaggcatctttggattggggagtgatgcatttgatcaaccatggaataccagctgatctaatggagcgtgtcaagaaagccgaagaagagtttttcagtttgtctgtggaagagaaggagaagtatgcaaacgatcaagccactggaaagattcaaggctatggaagtaaattggctaacaacgcgagtggacaattggaatgggaagattacttctttcatcttgcgtatcctgaagagaagagagatctatcactttggcctaagacaccaagtgattacatgtaagctttgaattgttttactaaagaaaacaaaatcttgttttggttttagaatcttttattaacgtttttcgatgattgtatagaagcaacgagtgagtacgcgaagtgtctttgtttgctagcgactaaagtcttcaaggctctctctgtcggtctaggtttagagcctgaccgtctagagaaagaagttggtggtttagaagagcttcttctacaaatgaagataaattactatccaaaatgtcctcagcctgagctagcactcggtgtggaagctcacaccgacgtaagcgctttaactttcattctacacaacatggttccgggtttgcagcttttttacgagggcaaatgggtcactgcaaaatgtgttcctgattcgattgtgatgcacattggggatactttggagattcttagtaatgggaagtataagagtatacttcatcgtgggttggtgaataaggagaaggttaggatttcttgggctgtgttttgtgaacccccaaaggataagattgttcttaagccgttgccggagatggtgagtgttgagtctccggctaagtttcctccacggacttttgctcaacatattgagcataagttgtttgggaaggaacaagaggaattggtatccgagaaaaatgattaagtttctgtgtttactcttatttttgaaactctatgtgcgagtttcttttataatgtgtttgtgtctttctcatgaatttgatgtgtttgtgccttttatagtgaatattgcggagcttaacaagcaaactttaa

SEQ ID NO: 145042 - DNA, 751 bp, Arabidopsis thaliana landsberg
tgagtcttcaaaacagccgccggagaatcttagctgcttacaactgcgactgcggcggacggaggaagctcctacccgagtcacggtttgaaggggacgaagagattgtctatctgcactgcgacgcctcacgaccctcgatgacttgccaaggtgtgatctgcttccccgagcaagattggatcatcgttttgaacccatcgactagccaactccggcgattcccttccggcttgaaccataactgcagatttagaattggtaataactaataatctgttactttataagtagaaatttttgccattagaaattgaaagaaaaaaatcgaaactttatttcaggattatggaagactttctctccgggaaactgggtaatggggtttggtagagacaaagtgaatgggaggtataaagtggtgaggatgtcttttgctttctggagagttaggcaagaggagcctgtggtggaatgtggtgttcttgatgttgatactggtgaatggcggaagctgagtccacctccttatgtggtcaatgtgggaagcaaatcggtatgcgtgaatggatctatctactggttacacattcagacggtttacagaatactagccttggatcttcacaaagaagagtttcataaagtcccagtgccgcctacgcagatcactgtggacactcagatggtgaaccttgaggaccgtctcgtacttgctataaccagagttagccctgaatggatactagag

SEQ ID NO: 145043 - DNA, 2033 bp, Arabidopsis thaliana landsberg
ccagcgcctggctcaagaggctttggaatcttacaaactagttaggcggcggaaaggtagaaagtatcagggggaactcaccctagcttctatggaactgactgctcacctggcagatgtgatggaagaaaaggactactgggagtttagtgctgaggaggtcagttttgaaacttgtctcccattttttgctcattcattcgaaatgtgtcaacttttcattcccaacatgattttatttcgtggtgattacttgtgcaagtgatccctttacctataaattcttacaatcttttggtgctgtttccattggtattatggttgaatttttccctattctgatgcagagaatcttgctgcttaagcttctatgcgatgaactgcttagttcatctcttgtccatcaacaccttgagcagtgtgccgaagcaataattgaaatgcagcagaagttacgctctctttcctcagaatggaaaaacgcaaaaatgcggcaagaattcctgacggctaaactggcaaaggttgaaccgagtattctgaaggaagtgggcgaaccacataattcaagctactttgcagaccaaatgggatgtgatccacaaccacaggagggcgttggagacggagttactcgtgatgatgagacttcctctactgcatatcttaacaagaatcaaggtaaatctccacttgaaaccgatactcaacccggagagtcgcatgttaatttcggtgagagcaaaatttcctccccggaaacaatatcatcccctgggaggcatgagctacctatagcagatacctctcctcttgtaacagataatctgcctgaaaaagatacctcggagaccttgcttaagtcagttggaaggaatcatgaaacacattcaccaaattccaatgcattatttttgccgacagctcatgatgcatcttctggggctgcccaagagttgcaggcttgtcagcaggatttgagtgccactagttatgaaattcagaatcttcagcaatcaattagaagcatagaatcacagcttctaaagcaatctatacggagagattttctgggaaccgatgctagtggtcggttatattggggttgctgcttcccagatgaaaatcctcgtatattggttgatggaagcatatctttgcagaaacctgttcaagccgatttgataggttcaaaagtcccctctccgtttctccataccgttgaccatggaagactaaggctttcaccctggacgtattatgaaactgaaaccgagatcagcgagcttgtccaatggcttcatgatgatgatctgaaagaaagagacctgagagagtctattttgtggtggaaaaggttacgatatggagacgttcaaaaggaaaagaaacaagctcagaatttatctgctccggtatttgctacgggtcttgagaccaaggctgccatgtcaatggagaagagatatggtccatgcatcaaactggagatggaaaccttaaaaaaacgggggaagaagacaaaggttgcagagcgagagaaattgtgtagatgcgaatgcttggaatccattttgccatctatgattcactgcctcatatgccataaaacattcgcaagtgatgatgagtttgaggatcacactgagagtaagtgtattccttattcattagcaactgaagaaggcaaggacatctctgattcttcaaaagccaaagaaagtctgaaatccgattatcttaatgtaaagtctagtgccggcaaagatgtagctgaaatatccaatgtttctgaacttgattctgggttgataagatatcaagaagaagaatctatttccccataccattttgaggagatctgttccaagtttgtgacaaaggattgcaacagagatttggttaaagagatcggtctgatcagttcaaatggcattccaacatttcttccatcgtcatctactcatcttaacgactccgtgctcatctctgccaaatccaataagccagatggtggtgattcaggggatcag

SEQ ID NO: 145044 - DNA, 1312 bp, Arabidopsis thaliana landsberg
tagttcgtcggagagattttgatcagaatgagcggaggaggagacgtgaacatgagtggtggagacagacgcaagggaacggtgaagtggttcgatacacagaaggggtttggtttcatcacacctagcgacggtggtgacgatctcttcgttcaccagtcttccatcagatctgaaggatttcgtagcctcgcagctgaggaatctgttgagttcgacgttgaggttgacaactccggccgtcccaaggctattgaagtgtctggacccgacggtgctcccgttcagggtaacagcggtggtggtggttcatctggtggacgcggtggttttggcggcggtggtggaagaggagggggacgtggtggaggaagttacggaggaggttatggtggtagaggaagcggtggccgtggaggaggtggaggtgataattcttgctttaagtgcggtgaaccaggtcacatggcgagagaatgctctcaaggtggtggaggatacagcggaggcgggggtggtggaaggtacgggtctggcggcggaggaggaggtggtggtggtggcttaagctgctacagctgtggagagtctgggcactttgcaagggattgcactagcggtggtgctcgttgaagcaaacaagactgtgaagaaggggtaaatcagtcatcgatccctcttctccgtgacttctatcaattattatctatcttttgttattcgactcttcaatgttgttttcggaatttattaattaggacttgtggttgttatggttatggtgccttgtgatttgagaaagaaactggattggttttagttgcatgtttatcataacttttgctcatcttcttcctctagttcaagccttcctaaaatcttttaaccataacttccgaactaatccttgaaatgattgttcttgatgaaagatatgtcattaactcctaaagttttgtttttttttttctttaattcccaaacatgaaatacaataaaaacagaccaaccaactttagatgctaaacaaacacccaaacacactacgggcttggtagatctaagaaaaacccaaatctcgtctttttctgatccgtggaaaaacgccaactttcgtggcagctagggacacttttgggccggtactaaagatttgatgcttaaaattcaaaggccgtgagtgtgattgaagtgaggatggctgattggaggaggtgagaccataaccggtggtgggcattggtagcatttggtgaagaggccaaaggtgtcaatctggtgtacaaaattgatcatactagcccaaccaccg

SEQ ID NO: 145045 - DNA, 2072 bp, Arabidopsis thaliana landsberg
  unsure (1)..(2072): unsure at all n locations
cttacattgctcgatttcagtcctctgaaaaaatctccctgctttgctatggctctgaggtgttttcccatttgggtttgtccccaaacgactcatcatcgttctcctctcatgggtctcgctgaattcnnnnnnnnnnnnnnnnnnnnnntctgtctctgggagtgctcttcttcagcttctcagagagctgtcactgccattgaaggcgagattccttttagccgcgagctcaaaaagtcctctgatgaattgggtttgactcaggagactcaatctctttcttttcacagagacttaagtatgcttcctagtgagtcatctcctttcccttctcgatttcatcgaacatgttggtttatggaaatgctgattggttcttgtgttctgacgatcatttcactttcgaaatttgtaaattttggatcttgtttagctgaattttgatctgtaggatcctttgttggggtatatacgctcagagataatgtggctgatagattcttactgatagcctagattttgtgtgaagaattacaatgattatgtccttgcatggtttttacagaaagtctttgctgatttctgttatagtttattacacttgtattaaaatatcttgaacttttgttctgttgattgttgaaattaagaaatgattgagtactaaattatgccccttgacattaataatgtctgtggctatgttgtgttcttggatccaagattagtaaatgtcctttgacattagattccttctgcttaccatatcagtagctgcacttgatgtttcagattcgatcttttcttatcatgtagtcatgtgaatgattagatcactgtcatttgcactgcgatttgtgacatagggctttgctataagtgaatcgatctaggatacttgtatttcaaacattgttaatgaaaatggtgtacttaatttgtttatttaatagtagattctcttttccatattagtagcttcatttcatgtttcagatttgatctttcttgttgtgtagtctcataattatactaaccattgtcctttgcatcgcgacataaggctttctacacgtgtatcgatctgttctgaatggactactctatatattaacttaataccaatttttccaaattagttgctgcagctgatgtttcagatttagtctttcttgtcatgtagtctcataaatatatcaaccattgttctttgcatcgaggcatagggcttgttacacgcatagcaatctgttttgaaaatggagtatcgagctgttctgaatggactactctatatattatcttaataccaatttttccaaattagttgctgcagctgatgtttcagatttagtctttcttgtcatgtagtctcataaatatatcaaccattgacctttgcatcgaggcatagggcttgttacacgtatagcaatctggtctgaaaatggagtattcaatatgtagcgttaatattccatattagtagctgcattagatgtttcatagacgatctttcttgtcgtatagtctcataaatggatcaatcattgtcatattcatcgcgccttagggactgctacacgtgttatcgatctattttgagtgagacgatactcgctattccaattgttgttaatgaacatttacataacaagcccctagaaaaattatgaaactcaaatgcattgtctgtcatatcctcgttattatcgatcttattacttttaatcgcttctcatggcaagccttaacatttaaagttgattacagaaccgctaactgcaaacagtctttactcttctgatggcgatgattcaaaagtgcgaatttcgtttcaggtgaaatattagcttcctcacttacatgcaaaactgtttttctctttctttaattttcttgtgttacaaactctcgccaattgcaggggataccaggtgcatatagtgagacagcagcactaaaagcatttccaaattgtgaaaccgttccatgtgaacagttcgaagctgcgttccaggttttgatttatcggtcacttctaatatattctatccctacacaaaaag

SEQ ID NO: 145046 - DNA, 341 bp, Arabidopsis thaliana landsberg
aaaaaaaacaatacatctttccattgaagtagaagaaaacattttcactgtccttttgaatcagaagaagaaagagaaaaaaaagagatggagagaaacacgccggtgagaaaccctcacacttccaccgccgatctgctttcttggtcggaaactcctcctcctcctcaccactcaaccccttccgccgctcgttctcaccaggtccgtttcttcaacaaatgttctcactttctctttctatagagagaagctgaggttttttcttctttcttctttcattttcagccggtccgatggaatcagcaagattctaggcggtggtcagtcacagatgaaga

SEQ ID NO: 145047 - DNA, 804 bp, Arabidopsis thaliana landsberg
gatcgagctcaagctggaggaaaaacaaagcatgggaaccgtaagttacaagcagaagaaaatcgataccattacattgagagttgtttttgtccaagatttatgtgtttgatgattcaggaattggaaatcgctgctgcttcagaaaagttggccgagtgtcaagagacgattctaaacctgggaaagcagctcaaggcattgactaactcaaaggaaacagctttactttcagaaacactcatgtccgacgttacagacaaatcgaataacctacctgatgcacaaccttcacatgagactactaaaccagagaagagattgaccagccagagatcatctcttttggatcagatgaaggcagaagatcacaacaccggggaatccaaggatcagaaaccgcaagcagcagataaaaacggaaagggaggaaacagctctgtttacaatgaaaccattgaggctctagaacagattcttctctcagacaaaagcaaaggctccgactcaaactgctttgccattgttcctcacaaaaagaccggcggagttaagagcctctggagaaagctgttggggagaaataagaaaggtaagagcaagaaggtccctaatccatttgccaactaagaagatggtggcatctgtcatctagactataatctaataccttaatcctgtttctttatatggtcccaaagacccaaactatgcaaactaaactgtcattttctagatttttttggcagtatatatataatctccacgtagagtattactctataagatgatcattctgcttta

SEQ ID NO: 145048 - DNA, 683 bp, Arabidopsis thaliana landsberg
atggcgaatgagagtaataatcttggactcgaaatcaccgaactacggctaggtcttcccggagatatcgtcgtctccggtgagtccatctccgggaagaagagggcttctccggaagtagagattgatttgaaatgtgaaccggcgaaaaagagtcaagttgtgggttggccaccggtttgttcgtaccggagaaagaatagtctcgaacggaccaaaagttcgtacgtgaaagtgagtgtagatggagctgcatttttaaggaagattgatttggaaatgtacaaatgttaccaagatcttgcttccgctctgcaaattctgttcggatgctatatcaattttggttagtttatgtttctatatatagtatatatttttggttttagtctttactaatcaaggcaactaatgatccaaaacatcgatattaactttataatctttatatatgaaaatgaagatgatacgttgaaggaaagtgaatgtgtaccaatatatgaagacaaagatggagattggatgcttgctggagatgttccttgggagtaagtttctagcgacctctataacattcaaatttactttcttttatttaattgatatctaataaattatgaaactatttgtgtgcagaatgttccttggatcatgcaagaggttaaggattatgaagagatcat

SEQ ID NO: 145049 - DNA, 598 bp, Arabidopsis thaliana landsberg
cgccgagactcgccggaatctcgccggagatgaaattccggctgattgcgagaaaacgaaggtcttttagctgagagattgttgccggtaacgcacccatgattctgccggggacaatggagagctcagtgagtgcagagagtttgcctattgctgggtcgatccgacccgataaaccgggtgaaccggctctaggatcgccgagattgagagagattactttatctccgttgcagtagacgccagcgaagccgcatggatcagaagtgaaatcccaagactcgaagaacttggaacctggcaagtcatcgagggatttacgaatagcttgcagagccaagaaatcaactgggtcgagaatcgcctccgtgaagaagccgaatcgaagcaggaacatcaaacaccaaaccaacttggtaaatctcatcatcatcttcttcttcttcttcttcagacttagccgttacaggttcaagaaacagagactatatatatacacagagggaagaacagagacgagctgtaaagtagagaaaatgggttttgttttctgatttctcgtgagagggaaagtctctggtttatgtggtggaaagaa

SEQ ID NO: 145050 - DNA, 1933 bp, Arabidopsis thaliana landsberg
ctctctctctcgtttcggcggttaagctgccataatctctcacccacctcaagcaacataacccacaaaaactcaatctttgtctcttatcttcaaaacccatctgatcattcctccggaatctttctcaagaacagagcaaatgccgcttgttaggctccaagttaggaatgtctacggtttagggcaaaaagagcttcacacaaaagtcgaccgtgaagaccccaaagcgattctcgacgacgtcgccgtttctggactcgtcgggatcttgcgtcaactcggtgatctcacagagtaagtagtactttaagtcaactctgtttcctctgtttctttttttttttataattgacttataaatgtttttaaaaaaaaaaaaatcctaagtaaaaatgtgacaatatggagtcagtgatcttctttgattctctgtaaaatctttaattttgctgtgtttggtcttcttcatttgcttattttatggttctcagccaatcttacttgtcctgagtttttatgttaaactcacattgtttcagatttgcagcagagatattccatggaatacaagaggaggtaatgataacagcatcaagaagcaacaaattgaagatgagattgaagcaaatagaagctaaagttcctacaatccaaaagacagtgcttgcacaaacaaatcacattcattttgcatacactggaggtttaatttgtcttgtttctcttgtcaatcttctttaatgtctagattcacatgtttgttctttaatcaaaaatttatatcctgttgagtttattgtaggccctagctcacatgccttttgcactaacttcttagcttaaaatactcttttttgagtttagaatttgatgatgaatgatactagtagtctttcttatggatcttaattaaaataagtcatgatctttcactatttgagttctttagaaaatttaagtatagttaatgaacatagtgtttacatgctgttttaggtctggagtggcatcctcgtataccaaatgtgcaaaatcactttatgtatgacgaattgccaccgtttattatgactccatatgaagattgccgggaacctccgcggttacacttgcttgacaagtatatacaccttttaactctcattttcttttttgttattactgtttctgctatgttttagactgatgataataaatatgatgctgattctttgcggtttttgtcagatttgatataaatggtccaggttcttgtttgaaacgatactcggatcctactcatttcaaaagagcatcaagagcttctaaaccttcagagattaaggtttgtttagagattcagtctgttaataccatgttttgtagagtttcttctttttcttgtttgctacctaaacttgtatggatgatgcagaagaaaaaatctatacaacgcggtcgagatatatcaagacttgcctctgtggctaaccagagtgacaggtaatgacatttggatttgacattgtagagatgttttcaaatatgactcaaaacatgaatatatgatatgatgttcaggaagacatgtacttctttaagcttcagtggacgaacctctacctctaaaactgcttcaacgattgaaattgagtcgaaatccgacttgcaagagcatcgttctttctctttcgattcaagaagtggtggagagaaaccgaagagggtatcttcttcttcaaggtttacaccgggttctcgcaccattgcttcagttctttctgaaagtgaaagtgaaagtgatagtccttctcaagatttaacagctcgtggttcttctagtgttagttggcacgagaaagctgagatagtggaatgcaatgttctgcagtgtgcaacagatgaagctcctgaagtaatggaaactaactttgtcttggatgctgaaccg

SEQ ID NO: 145051 - DNA, 468 bp, Arabidopsis thaliana landsberg
aatggagaatggaacttcctcaaagatatttacttggcctctgcaaccggaaaggggagcagcatgaaactcttttaacccttaccctgtatttgtcaaaaacagattgtatcatatcgtaagttagcaggaaactaccaatcttgagggttgtttcaaactgttatcttctggttcttctacactcaagagtcaatgactttgcatttttgctaatagcttttactaactccaaacttctttgattttttttttgcagaaaatgctcttaccttgcggccttcctccagaaagagaagacgagtaagagcttgtgtgcatttgaaattaaaaaaaacattctacttcttagaagcttgtgtgcaatcttctttaactgctccaccaatgtaattgccgaaaaggcttcttcttgtttctagttcataatgcagttgttgatcatgatctaaacatttgtactttgtt

SEQ ID NO: 145052 - DNA, 588 bp, Arabidopsis thaliana landsberg
ctttaactgccaacccatatcaccattgatgcgggaaaaacacagatcgctccaagtgagtttctatagttactgttatttggaatcctcctgcttaaccctagtctgacattaatagaaaaacttaatatgcctacttgttctcttcttttccagattcaaggacagtaatggctattcttggtaagttattatcatctatgagaagagatgagttatatcacaaattgtagatacaagtgcaattgtttaataagtctattacttgtgcaggacctgttgataatgttgatgaagtaacaggtggactaaagcttatgtaataactcttggattcgacattaccaacactctggcagaaaggagagcatgctaattggctcccaagttttcgacatttctcggtgacaaatctgttttcccttcttctgagtagataactccattttacatggatttgtacaattgtcttactagaagataatcatatgacaacatttgctgattatcccacaacattttaaagatgaagttttgatgctctcctttgttttgtctattgtatctataaactgaagcgtttaagct

SEQ ID NO: 145053 - DNA, 1583 bp, Arabidopsis thaliana landsberg
  unsure (1)..(1583): unsure at all n locations
acagaacatagaacgaaagaaagaatgggttctgtaccatgttccttcaagctctctgctcatcgtagatcttcttccaaggtaatcatcttctctctatctccttcaatctgagtctctgtataggtcacttatgctgagtcaactcggtctctctttgtatcgatcaaaacttagtcaaatcgttccttccattttctttcagttgattccactttaatggcgtcataatcatctcttaaatcaaacaatgactccactatctcgtttccgatctcttgttacataaagttttctgtagcattgagattgtccttttcggaattgcttttatttgcgcagcttgatggtaacaacaaacagtgtagtagtttagtagaaagactgagagataaaacgaagagtcaagttcctaagtccattacttgcattaaccgcttagagatatcgcgtatagcaccattacacgcaacgatgaatagcccgaaaggatttggacctcctcctaagaaaaccaagaagtcgaaaaagccaaaacccggaaaccaaagtgatgaagacgacgacgatgaagacgaagatgatgatgatgaagaagatgaacgtgagagaggtgtaattccagagatagtgaccaacagaatgataagcagaatgggatttacagtggggttaccactcttcattggtcttttgttcttcccattcttttactatctcaaagtgggattgaaagttgatgtgcctacatgggttccgtttattgtttcgttcgtcttctttggtacggctttagctggtgtgagctatgggatcgtgtcttcgagctgggatccgttgagagaaggttccttgttaggctggaacgaagctaagaagaactggcctgtcttttggcagtccttttggaattcctcagacaagagatagactatgcaataanagctctttggttttataaacagatgtaaattttgctgaggatttactttggagattttctatcgacgggcttcttctgcatatctcttcgaaaatttctttaccgatcctaaagggtctgaattagtgaatagtatcaaatttattgcaaacaaatagacccaagtcgatctttattgcaaaccaaattgtcacacacgcaaaaaacaaaccttaacaatacagaaattaagaaaagaaaacaaaagcagaaccattgacgaggcaaagacgcgccgtcgaaaaaaaaagaaaaaaggagacttgttttttctgatgatgtataagattattagagagtttataaagtaaaatatttgctcagaagaggcatgcttgagttactattggtttaggggtcatccggcgactttcctagagtaggcattggtggtgggttgtgttggtctaaggaacatgtcacgtgtttctcctacccaacctgccttcatcggaggtggtttcagctgttgatgctgtccaaccacagacacagagtgtcttcgagatccagttgctccaatggtcatgtttgcgagtttatcagcagtctcggatacactactacgagtgacccggttcttgttcaatgatgctgctgc

SEQ ID NO: 145054 - DNA, 672 bp, Arabidopsis thaliana landsberg
actctctatctctctctaagtatcagcaaaaaaacagagatttatagagagagaaaaaaactatggctcacataaagacctaacagacacagtagaatagtcccacttccccaccaccaaagctcagatcatgatcatcatcatcatcatcatggatccggatccggatcataaccatcgacccaacttccctctccagcttcttgattcttctacctcctcctcttccacttccttagccatcatctctactacttccgaacctaactccgaacctaagaagcctcctcctaaacgaacctctactaaagaccgacacaccaaagtcgaaggccgaggccgtcggatccgtatgcctgccatgtgtgctgcacgtgtctttcagctcacacgtgagcttggtcacaaatccgacggtgaaactattgagtggctactccaacaagcagaaccagcggttatagccgctacagggactggaaccattccggctaacttcacttctttaaacatctcacttcgtagctcaagatcttctctctctgctgctcatcttcgtacaactcctagtagctattactttcattcaccacatcagtccatgactcatcatcttcaacatcagcatcaggttcgtcccaagaacgagtcacattcttcggcttcttcttc

SEQ ID NO: 145055 - DNA, 503 bp, Arabidopsis thaliana landsberg
actcctttacaatatacaaaacctatccaaaagcgaagaagccaagcaaacatattataaaaatgaagaaggcggcagatttcgttaagcagataataaacatgttgacttgtctagcaaaggacaagacgaaggagcttaagaggaagacaagagccttcaagacacgtctcgtaatattttcgctgctccacaacagacacatggtggtgggttctttgtctcacaagctcaagagcaatcaaacatcaaaaaagatagatcatgagaacaaggatgttcaagattatcatgataaaaacatggtggttgtgtatagccaaaacgttaacgccatgtctagcactcctgtctctccgcatgtacaatatcaatatacagaggaggaagatgatgaagaaggggaagaagaaaagtatccagacttgagacactcgttgattgaggcagaaggttcggtgatagagatggtgaagcactcccaggaggacaatggaacatag

SEQ ID NO: 145056 - DNA, 687 bp, Arabidopsis thaliana landsberg
agggagtgatcaaaagtgttgtggaatggagcggctcgcggtccttcttctacaaaaagctcaataggagaatcgctgagagctctcttgtaaaaaacgtaagagaagcatctggagacaacttagcatataaatcttcaatgcgtctgattcaggattggttctgcaactctgatattgcaaaggggaaagaagaagcttggacagacgaccaagtgttctttacatggaaggacaatgttagtaactacgagttgaagctgagcgagttgagagcgcagaaactactgaaccaacttgcagagattgggaattcctcagatttgcaagctctgccacaaggacttgctaatcttctaaacaaggtataaaacaaaaccctccagaaaaacagaggttttggtcctctagtattcttatctgtatggctcggtttttaaaggcctaagtaaatatttgtgatgcaggtggagccgtcgaaaagagaagagctggtggctgctattcgaaaggtcttgggttgactgatatcgaagactttagcttctaatccaagaaagatggacatttaaagtttgcttgtgtccatttggaccatcttccttatatttgttggtcacagttgtaaatgttgttgtagctttgtcatttccgtataaacaaattacgcaataattcattcaacat

SEQ ID NO: 145057 - DNA, 1334 bp, Arabidopsis thaliana landsberg
cacaaacaaaccatttacataaaacaaaaacaatttaatacttcttagtgtgtaaatgtgtgattctttcatcaataacaaaatgacatcgatattattcatgctcgtgagtctaacaattctttccatgaatctaaaagtctctcaagccacatctcgtgtcaccttccacgagccgatcgttgctgaacaccatcagcaatggatgactcggttctctcgagtttacagtgacgagctcgagaaacaaatgagattcgatgtgttcaagaaaaacttgaagttcattgagaaatttaataagaaaggggatagaacctacaagcttggtgtcaacgagtttgcggattggaccagagaggaattcattgccactcacaccggcctcaagggggttaacgggattccatcctctgaatttgtcgatgaaatgataccttcttggaattggaatgtcagtgatgtcgctggccgtgagaccaaagattggagatacgaaggagctgtaacacctgttaaataccaaggccaatgtggtacgtaagcttgtcggaattatacatacaaaagatgattcccacacgtatctcaattatataaaaaattcgattcaatatttgaaagaattgtaataatcattcaacatacaaaacgtaaaccccaagttaggtttagtgttaggtttagttactaagagattcgataattatcaaaatataactaatcaatatatcgatgcatttatgggcaggatgttgttgggcattctcaagcgtcgcagcggtggaaggtttgacaaagattgttggaaacaacctagtatcattgtctgaacaacaacttctagattgcgacagagagcgtgacaacggttgcaacggtggaataatgtcagacgctttcagctatataatcaaaaaccgaggcattgctcagaggcatcatacccttaccaagcggcagaggggacatgccggtacaatgggaaaccctccgcatggatcagagggttccagaccgttccaagcaacaacgagcgtgcattgctcgaggctgtatccaagcagcctgtctcagtgtccattgacgcggatgggcccggtttcatgcattactcagggggagtgtacgatgagccgtactgtgggaccaacgtgaaccatgcagtgacgttcgttggatacggaacgagcccagaggggatcaaatactggctggctaagaactcctggggtgagacttggggagagaatggttacattaggatccgtagagatgtggcatggcctcaaggcatgtgtggtgtggctcagtatgctttttatccggttgcc

SEQ ID NO: 145058 - DNA, 523 bp, Arabidopsis thaliana landsberg
gtttcttcttagggctgcatattatttctcgggtggtccatttcttaggttctggattaaaagaggctatgatccacggaaagatcctgaatctcgtgtgtgagttctatctctttaagtttattcatattacaaatgcatggtctatgacacggtaatgtagaattctcgtttgtacacctcaaaatagaacagaaataggccggttttacacctctgaacttcctcgtcttctgcaaagtgtttcgagaatgatacatattctacttggctcatttgagagcgtatttatcttccaatgcagaaagtgttggtgctgacattatccgggttttggaaacttgcttgacatgaaattttcttctgtagttcatattttcctgcatccagactgcagctgtatgtcaaacctcttcacctctaaccttttttatattttatttttttcagattccagagaatggaattcagggttccacctgaattaaagggttattgtgattccaatgcaactaacaagtaa

SEQ ID NO: 145059 - DNA, 1169 bp, Arabidopsis thaliana landsberg
gatgtaatgtttgtgtgcagagctgggagtacttagctggagacttgatgctgataactatgaaaccgatgaggatttgaaaaagatccgcgaatctcgtggttactcttacatggtttgtttatatagacttgaatgctagatgtttacttttgaacaagtcttgttttaactctctagggttttactcaattgtaacacttactctactgaatgtatttaggaaaattcgttgatgatttgcaaattgttttatgtgcttgagtcttggtttgatgatggaaaagtgttcaaaatgcaggacttttgtgaggtatgcccggaaaagcttccaaactatgaagtgaaagtgaagagctttttcgaagaacatttgcacactgatgaagagatccgttactgcgttgcaggaagcggtaagtacttttattggctgctttacttgatttaagtcggtatctatattctcaacgtttcatttccttgggaaaaggttactttgatgtgagggatcgcaatgaagcttggattagagtatgggtaaagaagggaggtatgatagtcttacctgctggaatatatcatcgcttcaccgtagactcagacaactatatcaaggtgcaatgttagcttcttcagagtggttaattcatcatatatatatttggttgattagaaaattgaaatatcttgttgagcaggcaatgcggcttttcgtgggtgaaccggtctggacaccatacaatcgcccacacgaccacctccctgcaaggtacaatgttctgttttccccttttgtctcatcaaaaacttactctgcaaaagttcatccaagaaaagacacgagaaaagctgtttatggatatcgaaacggctattttacaggaaagagtacatcgataatttcgtgaaggtgaatgaaggtggtgtcatagacgcgtcagcctagaggattctcagtcttatgcatcagatttctataaactaagcatacaataaagagagctttctgtctcatgttggatattatgtcatctacagatccacttgtgaagaaactttgattcgtgtggctttggcattatggttgtgttgtaactgtatttatagtttatactccaaaaaacaaactgtgtaacattatcaatctctccaaagttttccttaaa

SEQ ID NO: 145060 - DNA, 604 bp, Arabidopsis thaliana landsberg
aacggaggtagcggtaatctccatcaccaccatcacagccacaacaataaccatcagaggtatgaataattttccgccgacgaaagtttttagatcgtctccttctccggcgccggtatcacctcttgtctcgacgtggaaagccgccgacgagatgatcggtgtttcggttcctagaaaagctcggtcaggtagagaggtggaaatttacatttgtaaacatatctctcgctgatctatctcgattgacagttcttctaatctcttcttcgatttttgtagcgtgtacgaagagacctcatgaatcatgggcgtcaagtactaccggaggtggtgtttttgcttccggtgaacaaatccatcggcaaatatcatcaacgtctccagctaatagagttagtccggcttcgattttagcatctccgtctcctcctgctcctacgtctccttcttcatcaagcatttccgtcaggaaaaaattggttagtctctcaaaatttacactcaaatctctccatctccatcttcttctttgactaatatattttttgcttctagccgtcggggacgaaacagaagccgtttccgccgaagtcttcatcga

SEQ ID NO: 145061 - DNA, 1428 bp, Arabidopsis thaliana landsberg
  unsure (1)..(1428): unsure at all n locations
ggcgatgcttttgcgacctagtccttcncaatgtagaagcttctctccatttgtcttcaactccagctccagagaagtttcttcgtcgtctcgtctctccttgaaaacctccggcgacgaagaaaactgggtttcacgtttccggtcgaaatttctcagtttggttgttctctggagctcttgctatcggtttatctctatcaggtacgtttctttgttccttttgaccaagatcatttctttttggcttaagattgaacaacatgctctttgatttcagtaacaatgtggatgtgttgcaaaacaatctaaaatatcacaaagttagaatttttgtttactctgcaatttcaagcttgtgactttaattacttgttgcattggcttatcaaagtcagaattgtgaaatttcggacctagtctcttgttccataactatgaacaatgcatatgcaatttcaagattttagctgtcaataactttgaatctctttttgcaggcgtggggtttgcagaggcaaaagttggtgttaacaaaccagaattgcttcctaaagagttcacattctgttatagatgttgctgatttcctctctaatggtcaggtatgcatgcttgtaccatccatctatttttgaggtttgattaaagcacttgtttcttgttaatgtcatgtggatctatttgcttattctgtagatttttagtgtatttctgattttgaatgttttcgccgcttttggttttcttttcttaatgatgttgttctttgagagttataggagaagagaattgctcaagaaatcgctaatcttgagaaagatacaggattcaagttgagagtcttggctcaaaactatcccgttacacctggtatgatatatgcttggaaaacaacatacttgatctctatagaagtttacttagtgacatttctctgtgtttgcaacaggactagcaatcaaagatttctggcaggtggatgatagcacaattgtgtttgtcgctgacccgacttttggtaacaccccaaacctcattgcttaagttcttgaagtatccaaatgggaaactgattgtgataaccggatttgacacagggaacatattgaatttcaatgttggagccacggttgatttagacatacctcgtagtttctggagtcgactggctgggaaatacggcaatatgttttactggaaagagaaggcaagaaagctacctcgattaaaaaaaccgatgatcgccactttctttgttttttgtttgcatgtctaaactgtttacaatatggcttgaaaccagggagaagatgcatctattgaagctgcagtgatggcgatatcaagttgcttacgagaaccagttggtcgaaacaactgtgcagagatccaatgaagtatatgaccccatcaagcgtatatgtt

SEQ ID NO: 145062 - DNA, 241 bp, Arabidopsis thaliana landsberg
ccaaaaccgggaccagttttgtttcgcaaaatcattctaccatggctacctcatcctcggtggtcagcagtgtacctcagcagcaccaagtgttcctcaatttccgtggggacgaacttcgtaataatttcgtcagccatctggataaggccttaagagggaaacagatcaatgtcttcatagatgaggctgtggaaaaaggtgaaaatctagataaccttttcaaggagatcgaaaaatc

SEQ ID NO: 145063 - DNA, 1219 bp, Arabidopsis thaliana landsberg
tggttttatatataacaatctggatccgccaccgtcgaattaatctccggaaagctcgtcgaaagatgtcgatgggaggcgacacgacgtgggttgggaagaagccgatcagacgcatcggtggattatctgatgctctctctatcgcctccgatctcggtttcgccgtcgctcctcctccgtcgcaggtaacttctcttgttcactttaatctcatccgaatcggaattgcgtctccggttagttccattagcttgagtatagcatatgctttgggttgtatgctattagattgactttgcagaacaatgcgtatgagagatctataatttgaaggagattatgtttctgaggaatgaggaattttagctgcttgttagttttgcgaatctctggaccatatgttttgattagatctttgatctcttggcttttatatactgaatctgaatttttcatcaagtagagaatatttatggttagttatctcttcaattggctcaatcattttccgatgtaggaagaattacaaagctttgcgtcttcgaatggggaaagaggtgatgatttgataagggtattgagagagttatctgttgttcaaaggaaaattgcagacttgcaggtcgagcttcaagggaggaaggtatctttctcatggttttggtttctttttcaaattgaaataagatatggatcatagtatttgcattgcctgaagccttatgataacttattggtatatctcatgtaacaacttttgttagatgctttgtatataacttcttttgttggcgaatttcaggatgataaaaatgtggcgcatttgactcatgttggtgaaatgcaaaagaaaatcgagactttgtcaaggattactcaaatattgaaagatgttatacaaaacaaggtaggatcatttttcctttctacttacctctaaaatcttctctctcttttttttctggactaaggtttatgtatctttcgagttcatttatctctcttttctgtctttaagcgatatccctcttattcactatcgttctgaaaattgagaaaattccttaagatgttttcgaaacattagcttctgagtacgtcttaagactgccttatcttttagtcaatttgtgaccctctagttgaagtttattacatcatttgtctgtttatataacaggatcgcatcattgctcgtctccgaacaaccttattc

SEQ ID NO: 145064 - DNA, 540 bp, Arabidopsis thaliana landsberg
attggaaagctcctacttcttccccctctcttccaaagttaaccattttgttggttttctctgggatcttcttaaggtaatctttgattctgtttatgagattgtgtttccgattatgaatttaggctttgtctacatgcagggctgtgttcaatgattagggttttgatttagaaccaaagcttttgggttttactggtttagtttaggcttgttgcgaagtagagaaaaaaagggaagggttttggcccttttgtggggagataatttagggtttctgtaattatgatcaaacagatatttgggaaattgcccagaaaaccttcaaaatcttcgcataatgactcgaatccaaacggagaaggtggggttaattcatattacattcccaattcgggtattagtagtatctcgaagccttcttcgaaatcatccgcatcgaattcgaatggagcaaatggaactgttattgctccttcttcaacgagctctaacagaaccaatcaagtcaatggagtttataagcattccaagcgtaga

SEQ ID NO: 145065 - DNA, 1481 bp, Arabidopsis thaliana landsberg
  unsure (1)..(1481): unsure at all n locations
atgctgaatccggtaaatcgccgccctaaacgccttagtattcaccgttcggccatctccaacgcctccaaagtcggttatcgagatcttatcgtaccggtaccgtaacggaactataccggaacacgtcgcctccgaatcaccgaacgaagacgaagaaacggcgagacatgagaagaggaaaattgacacagagagtctccacattttcgttgtagagaggtttatttaggaagagagtaaaatctgcagaattggagctaagattagtatgatatagtcgacactcgacaacgttcaataaaagaagcacgtgctgatacacgtgtatcaacgggccatataagctagaaacgtttgggctttagtggcccaataaggatgaacaactttttgttttttgtttttggcggatttttttaattctttgcttttctattttatttagggtttttattcttgttatataaagtttggatcggtttgtgaattttgtagctaagatcagaaatttcagcgatttggagattggagatggagagtcctttggtgcgtctatgcttaaaggaagcttgtaagagcggagatgcggtggaacgatggcgacttcagcggcggagtcttgagaggctgcctcctcaccttgctgatgctctcctccgtcgcctcctcaaaaagcggcttcttttcccttcgttactcgagtaaactcttcacttccttacatagttctgatcgtttctaatatgaatctgatttctgatctcgaaatgctgagctatatatatatgcttcgatttgagatattgagtgatcgcttgggatcttagtttttaaatttgattagaattttttttggttctgtattcatgttgaaataattattcctgaagtgtttagctgtagaattgtgttggtcttggtacatcgttgcggaaaatgcaatgattgcatggacactgaactattgtatctgtatcacacaactaaacaagactcttttctgtgcagaggattcaaatattctgtagagaatatagatctccgaggcaaaagctcagttaacgcagaatggatggcttacattggaggcttcgttaatctaattactctaaatctttcagattgccagagaatcaacagttccaccctctggcctatcacaggtatgttgagtgatatactccgagttttggaatggaagtttaagagaaatttaagtgtttaatatgtgatattggattttcaggattaacaagtttgacagagttggacctttcaagatgtttcaaggttacggatgctggtatgaagcacctccaatctgttgtaaatctgaaaaagttgtggatttcacagacaggtgtcactgaagttggaatttctcttcttgcttcacttaaaaaattgtctcttttggatntgggcggcttacctgtaactgatcagaacttgatttctctccaggtattacctgtgct

SEQ ID NO: 145066 - DNA, 982 bp, Arabidopsis thaliana landsberg
cttagagaaacaatccacttttgtttattaaggttaaatttatgaaattttcaaaaaacaaagcctatttcatacactcaccacaagctgcttcacaattcatcataattcataagccacgcaaaagaaaataaagtgaaagattccatggcggtaattgtgtggtggctactaacggtggttgtggtggcgtttcactcggcgtcggcggcagtagtagaatcaacgtgggaggttgagtataagtactggtggccggattgtaaagaaggaatcgttatggccatcaacggccagtttccagggccaacgatagacgcagtcgccggagacacggtcattatccacgtcgtcaacaaactctccaccgaaggtgttgttatccattggcacggtatacgtcaggttattcaatcaattctaaatttcttccttctatacaaaaatataagtatgtaatgtgacaagaagcatcaacaaacaaacaaaaaatgtgacaatgagcttattctatacaactatatgtttgattgttttacgactgaattagaaccattactttttattcaacaaaaaaaaaatacaaatgctaaccgttgttctgctgattttcagttttattttttcaatttttttgtgtgtgatgttagagcatcattattggtggtatcattattggtggtatcttaaccaaatttttaagttaagatttgtgaagaaagagctcttatataagagtttttaggtttatatttaaaatttttcttcataaatcttagctaagatttggctaagatactaccgataatagtggtcttatgttgtttctaaggcagagccactactagtattatacagtctgtataattaattcacaaaaaaaattattatcaaaaactaatttgtgatcatggaacagaaagggactccatgggctgatggagcagcaggtgtgacccagtgtcctattaatcctggcgag

SEQ ID NO: 145067 - DNA, 911 bp, Arabidopsis thaliana landsberg
taacaattcccaagaaggtcacagttttgcagagtttttggtggattggtggtatgttacgttaccagcttgacatgaggacatttgatgagtatcagatactgaagtttacgaagattctgattaaagtggaaaacttttggtgatggtttcagatcgatacagtgagggaaaatgtggcataaagatggtcttttatcaacaaagaagagagatttaagtttcttgttttctatagaacattaaaaagcttgactctttctttctgttagacaatttgtgttgtaatttttgaggattttaaacatctttttgttgttcttctggttttatattttccgagaaaatcattggtgaagaagagacggagataacgatgttagccatgttactctgttttccttaaacggtgtcgtttttcgtcaattattaaaataaactggatgactggaatatccatttgcttttgagcgagtgatagaagcggaggcgattttctagggtttttgctcggaatcgatttcacgatgggaacgagcagcgatccgattcaagatggttccgatgagcagcagaagcgatcagagatctacacatacgaagcgccatggcacatctacgcaatgaattggagcgttcgtcgcgataagaagtatcgtctcgccatcactagcctcctcgagcaatacccgaaccgtgtcgagattgtgcagctcgatgaatccaatggtgagatccgttccgatcctaacctctcctttgagcatcctttatcccccaacgaagaccattttcaaacctgtcaaggaatgccaaagacctgatcttctcgctacttcaagtgatttcaatcgtttatggagaatcgatgatgatcattcccgtgttgagctcaaatcttgtctcaatac

SEQ ID NO: 145068 - DNA, 298 bp, Arabidopsis thaliana landsberg
cagttaaaatctctctaacatagcaacaccatctaacataacaatttgagtttcaattcggattatgttagtttacatataatttatacactccgaacaaatgaaaccgttgaagattgattacataacattaaacactaatcaatctttaacttatttagctttaacaacagctttaattgaaccggagtcaccagtaatcgtatcataccggagaaataaatcggcaacgagcaaggaagccgtgagagtgacaatggccttagcagcacactgtttgttcgacgcgctcggggta

SEQ ID NO: 145069 - DNA, 635 bp, Arabidopsis thaliana landsberg
acaagttttgtctgtccgtacattttcgacgtgttgatgagaaggtaagaacaaaactgatgatgacaaagaaactttctcttacttgtaaaaattaagtggtccaaattattatttttgtttcttaacccaaagtacttaagaaccttacaagactttttccttgaaacgaagtattttttggtaatgtgacacctaagtttcaaataaagattattcgatatttcatttttccgcactaatcacaaagcaaaacatgcactagtgttatttttcgtattgatcatgatgttaatgtgaccgtttaccatattactcatatttatcagcaatgactcgtttcatttagtaaacaaattatttatttacatgtttctttgtaacagagatggcctgcattagctgaagtagtaaaatcagttcttattgattatccaaagctgaaactaacccaaggtagaaaggtaaaattaatcttaatctccctctttttactagtcactaggctaattaagtatttattacatctttacttaatctatttcatttataaaatcaggtacttgaaatccgccccacaatcaaatgggaacaaggggccagggcacctcaatttttttactaaaatcattagg

SEQ ID NO: 145070 - DNA, 982 bp, Arabidopsis thaliana landsberg
cagctttctactcttaaaatcgaatgcactgatctatgggcgaaggtagagactctacagctgttgttagatagagctacaaacaagcagagcaagcagttatagtgttacaacagaaccaagatctaagaaataaggtcgacaaaattgaggaatcacttaaagaagccaacgtttataaagaatcttcagagaaaattcaacagtacaatgagctaatgcaacataaggtgacattacttgaggagcggctcgaaaagtctgatgcagagatattctcatatgttcagttatatcaagaatcgataaaagaattccaggaaacacttgaaagtttgaaggaagaaagcaagaaaaaatcaagagatgaaccggttgatgatatgccttgggattattggagtcggttgcttttaactgttgatggatggctgcttgaaaagaaaatagcaagcaacgatgctgacttattgagagacatggtatggaagaaagatcgaagaattcatgatacctatactgacgtcaaagataagaatgaacgtgatgccatctctgcatttctcaagcttgtctcatctccaacaaggttatcatcgtctattggaaatgcttatttttttttcagtttttaaagcttttgaaaaaagtaacctattttcttcatcttgtgttgattctagttcaggattgtatgtcgttcacattgcagctgagatggcacctgtagctaaggtgtgttcagctaaaccctcaaaaatatctcttgcttacatgttagattttccgaaatagaagcattgcatggtaaattttcaactttatccccattccaaatttccttctgtaatttctgtaggtgggaggtttgggagatgttgtggcaggtcttggtaaggcattgcaaagaaaaggtcatctggtggagattattcttcccaaatatgtctgtatgcagtatgatcgcgtgcgtgacttaagg

SEQ ID NO: 145071 - DNA, 2285 bp, Arabidopsis thaliana landsberg
cagatttgtttttgtagacttttgtgcaataaagcatggaatccaacagaggtcaaggttcgatccaacagttgcttgctgctgaggtagaagctcaacacattgtcaatgctgcaaggaccggtaattttaagtttttttttttcctttgccagtttagttttcatatctgaaactctataattacttgtcaactttagaactgaaagtttccccaacactaatatctacatccaattacattcttgggagcctgcatattttatggaaatgaagttgtagttatgtgtagcacttggagcataatgcataggtttgattatatggcttgaaattgatttataacctgtttattggttgcagcaaaaatggcaagactgaagcaagctaaggaagaggcagagaaagagattgccgaatacaaagctcaaacagagcaagacttccagaggaaacttgaggaggtaaatgattttttaaaaagagaaaattgttcttagacaacctaaaatgtagtgtcctcactctaattatcatattgttgaaaacagacaagcggagactctggtgcgaatgtgaagaggctggagcaagagactgataccaaaatcgagcagttgaagaacgaagcatcgaggatttccaaagatgttgtcgaaatgcttctgaaacatgtgaccacagtgaagaactgagagatatttttataagaaagtaaaaaaaaagtttatgaaaaaagtgggagtcatttttgagtgatctgctctctttctcttttgtgagtatttctggatttgagagactcatcttatattattgttgctacttattctctgcttttttgtaatttatctctgtactcttctttttttttttttttgaacaaccatctctgcactcttctttgtattcatatatttggaacgttgtaataataatttgagcgcagaggaacacaattggattatttatgtttctaaattgttacaaaaagaaataaatctcaactggattgggcctaacttaacttatatcatagttttgttatatcgtaagcttaaggtttgggctttagttctgagaatagtgaacactgaaaaatggagatttaagaaaaaaatccaaggagaaatgtttttggtcggagaattgggaagatctatgaggagcgacgggatcttgggagttggaggttcggatcagagtcgagcaacagccgtcgtggtcgctagtagacgaagatggctaaagaggcgagaaacatggctggtggttctcggtgttgctcttcacgccgtctacatgctaagcatcttcgacatttacttcaaaacgcccatagtccacgggatggatcctgtgcctccgagattctctgagccgccggctaagcgacttgttcttctcatctgtacgtactacgtagtagtagtcctcacacactgaaatgtgtttcttacttcagctctggattctttcagttatagcttatagtaagattttagagtatatatgattctgctcgagacatttctgatttgcttttgctgatggacatttatcagcggatggtttacgtgctgacaaattctttgagccgcacgaggaaggcaaatacagagcacccttcttgaggaatattataaagaatcaggggcgttggggtgtctctcatgctcgtcctcctacagaatctagacctggccatgttgctattattgctggtttctatgaagatcctagtgctgtcactaaaggttctcttcttcttctgtatatatgcttgtagatacttacttagtcttgtcaagttggtagcggctttttgaaatgaaattgtgtgtttgcaggatggaaagctaatcctgttgaatttgattctgtttttaaccagagccggcatacgtttgcttttgggagccccgatattattcctattttctgcagtgccttacctcacagcacttggaattcttacccgcacgagtatgaagactttgctacaggtttgtttccttgtttgaaaaactatgtattagtatctggaatgaaatttgactctgcggtcaatttgcttattgcttgtgaatgcaacagaagctttttattactagaatgaactgagatgttgtatcttggtgtagatgcctcctttttggatgagtggtctttcgatcaatttgaaggccttctcaataggtctcacgcagatccaaagttgaaagagctcctccaccaggacaaactcgttgtctttcttcaccttcttggttgtgattccaatg

SEQ ID NO: 145072 - DNA, 397 bp, Arabidopsis thaliana landsberg
aaagtgttgaaactagacaagaatcacgaggacgaccttcgaacatcttctcaaaatgggcaatgaatcaaaagcaagaacctttgttctgtcttcagataggatccaagcttttaacccagacgaagcttaaaatcgatcccatttgctgaaatctgaaacaagaaaagtcaaaatcttttaactttcttgcaactacaatataagaacaagaaaaaaagaatgagaattgtaattgaagaagaagaagttttaatatttgtatatatttgagagattaattaaactaattttctctctgtgtttttctttacatttgtctatctctcatattataccttaaggtttaagctcctttgcaaatcagaagaagcaaatggactttgtagacaaaact

SEQ ID NO: 145073 - DNA, 668 bp, Arabidopsis thaliana landsberg
cgagaaaaggcgatacaaacgatttcgaatgcttcatcttctcctttgaaaatccttcttctgcttaatgctgctagatatggatctcggtgttcttcttccatcattgcaatctgtgagctgtctctttagcttttgactgttgcaattgttattgtgaaatttttgttcgcttttgatcagcttttgttaaattcgttccgagattttaggtttatgtgctggtgttttacttcgtttacttggccgttgccggagaaattctccccgggaaagttattcgcggcgtccttttatcagatggctctcaacttcgttaccgatgcaatggtatatttgatttgatttactctctctacaattcctgagagtctgtgagctcgaaagttcatttccattagttttgttaattcaatttcaggtctattggcactaatattgttggtagctattttgggaatctgtgcaaaacttggcattgtatcacctcttgtaagtgtagttacaagatttcgattgtatttctatgaatccgaatgctatatgctatatgaatccgattgcaattgctttctcacactcattccactgagatgttttgtaggtggttgcggatagaggacttgagttactctcagctacttttattttctgtgttttggtaagat

SEQ ID NO: 145074 - DNA, 338 bp, Arabidopsis thaliana landsberg
gcgtttatgttggtccttgaggcttttgcttggggttctgctttggtcatgactgttgtggaaactaaaacgtatatccatgaactccgttggtatgtcagattcgctgtcatttatgctcttgtgggagacatggtgttgttaaatcttgttctctctgttaaggagtactatggcaggttggtaaatttgcagtctgtatggtttatgcaattttgtttccctggtctggcacgatgaacttatatgcgtcattttttttttgttttttgcagttttaaactgtatctttacataagcgaggtggcagttcaggtttgcacttttagactcctttt

SEQ ID NO: 145075 - DNA, 799 bp, Arabidopsis thaliana landsberg
attaataagacaaaagcttgatcggcttaaccgaaacagctccaagagatttgtgctcattgccataggaggcactggcatattcgatgagccactggattcaggtgaaatatacgactcagcaacaaacacatggtcagaaatgcagagactcccgatgggttttggggttgtaagttgtgggattatatgcaatggaatcttctatgcttattctgagaatgataggctatcagggtatgacattgagagaggcttctggattacaatccaaacatctccagtccctcctcgggttcatgagttctaccctaaactcgtctcctgcaaccatcggttgttcatgctctctgtttcatggtgcgatgaaggagatggacagattgggaggagaaacaaggcagtgagaaagctgtgggagttggatcttgtgtacctcacatggaccgaggtttcagtacacccggacgcaccaatggattggaacgccacatatgtctcagaccagaacatactaatgggagttgagatgttcaagatatttgggcaggtattaagtttcttcactgtctgcgatgtattaactgaagaagcctcttggagacatgtttcgaggaaccaaaggagtcaaaaacttaatctatcttgtacgaacaagaccattgcattgcttcatctctgatcttcttcattctttttgttaactttcaggactcgtcgaaattgattgattcatgtattgaaaagaaatgcaatgtgctagttcctagattgatttgaaatgtaatatttatatttt

SEQ ID NO: 145076 - DNA, 440 bp, Arabidopsis thaliana landsberg
atggtaggacttgattcaagccacttgttgagagacaagatcctttgcttctccagcaggtctcacataaacaaccaacataagaagacaagttatgcattatcacttaatcacatgaaacttcctattcagagaaccttagcttttgccttagctcgcgggaaaggcgaagctgaaagtttcagcagattggaagccacctttggtgataatacctccacagaatgtacctggagttttgactttccagattctaaagatgctatgtctcatctcaagtcagaagcagacctctctggaagcaatggggccaataatgtggctagtgttatcgaaaaactgaatgctcttcggtcacatctcttagcagcagagaaatggaatgcttctcaactacacttatgtgacaggtttgttaaccattttatatatagtttgca

SEQ ID NO: 145077 - DNA, 483 bp, Arabidopsis thaliana landsberg
atggaaactaatctacaacaggtgaagaacagttctcaaactttttctgaaaagcaaaaccctaaacaagaagcttcaccttcaccaatatcatccacttgttcttctccttctcatgacttctctttcactatctctctccagcctctctcttcttcctcaaaacacatcagtcctactcttagaagcccatccaaaacgacatcgtcttatcaacaaaccgatcctttcgccgtcgacttatcccccgccgatgaaatcttcttccacggccaccttcttcctctccatctcctctctcacctccctgtctctccccgaacttccacaggctcgtataatgacggatttaccctccccgtcaaagatatattacccgaccagcccacaaacaacaacaacaacactgaaaacgctatcaccaacataagtaccgaggcaaaggacgacaacaccgaagacaaagcagagggcgagattcgg

SEQ ID NO: 145078 - DNA, 2900 bp, Arabidopsis thaliana landsberg
  unsure (1)..(2900): unsure at all n locations
atgccaatgccaatggcattatctatgggaaatactcctcaaatcccgccgcaggtgttttatcagggacatccaccacatccgatgcatcatcagggtatgatgcatcaggctcagggacatggttttgcaactccaatgggtgctcagattcatcctcagttaggccatgtgggtgtgggtttgagccctcagtatccccagcagcaaggtggaaaatatggtggggcacgcaagaccacccctgtaaagattacacatcctgacacacacgaagagctgaggcttgatcgacgtggtgacccgtattcagaaggcgattcaacggctttaaaaccacattctaacccacctcccagatcacagccagtctcatcatttgctccaagaccagtcaatttggtgcaaccctcatataactccaataccatgatatatcccccggtttcggtaccgttaaataatggtccaatgtcatccgctcaggcaccgagatatcattacccagttattgatgggtctcagagagtacaacttatcaaccaacctgctcatactgctccacagcttatcagacccgctgctcctgcacatctttcctctgattcgacttcctctgtgaaagcacgcaatgcccaaaatgtaatgtcatctgctctacctgtaaatgcgaaggtatcagtgaagccagctggggtttctgaaaagcttggatcaccaaaagacaggtcacnnnnnnnnnnnnnnnnnnnnnnnnnnnnnaagaacgtggaggcatgttcgttgagctcttcccagcagccgaaacctagctttgtctctggagtaccaaattcgtctgctccgccagcaaagtcgcctgtggagactgttccgctagcaaagtcgtctgtggagactgttccgccagtaaagtcgtctgtggagactgctccagttacaacgactgaaatcagaagagcggaaatggtgagtgagtcgatctcagttgaagatcagacatgtaaggtggaaccccctcataatctgactgaggtatgatactgtgttttgtttttgggtattattcattaattctttttcttatttgattaaattattttctttttttggctggttcactcagaatcgtggacagactatgccagactctctggtctctgatcctgaaacagcaaccgttgctgccaaggaaaatttatcactcccagctaccaacgggtttaggaagcaactcctgaaggtgtctactacatctgatgctccaacttctgactcagtagatacaagtattgacaaatctacggaaggttcaagccatgcctcatcggagatttctggttcttcaccgcaagagaaagacctaaaatgtgataaccggactgcttctgacaagctcgatgaaaggtctgtaatttctgatgcaaaacacgaaacactgtcaggtgtgcttgagaaggcacagaatgaggtagatggtgccacagatgtctgtcctgtctctgaaaaactagctgttacagatgatacgagctctgaccttccacattctactcatgttctgtcttctactgttcctcttggacattcggaaacacataaatctgctgttgaaacaaacacgagaagaaatacttctacaaaaggaaagaagaagataaaagaaatccttcaaaaagcagatgctgcagggacaacttctgatctctatatggcttacaaagggcctgaggaaaagaaagagagctcaaatgttgttcatgatgtttcgaaccagaacctgttacctgccatacctcaggctgttgaagccattgtggatactgaaccagtgaaaaatgaaccagaagactgggaagatgcagccgatgtttctacaccaaagctggaaactgcagataattctgtgaatgcaaagagaggttcctcagatgaggtcagcgacaactgcatcaatacagaaaagaagtactcccgggatttcctcctaaagtttgcagacctgtgtactgctcttcctgagggatttgacgtttcgcctgatattgctaatgccttgattgttgcatatatgggtgcatcacatcatgaacatgattcatatcctactcctggaaaggttatggatcgccaagcaagtggtgctcgtttagatcgccgtcccagcaacgtggctggtgatgatagatggacgaagaatcagggttctcttccagcaggatatgggggtaacgtaggtttccgacctggtcaaggaggaaactcgggagttttaagaaaccctcgtatgcagggaccaattatatctagaccgatgcaacctgtgggtcctatgggaggaatgggtagaaatacccccgacttagaaaggtggcaacgtggttcaaatttccaacaaaaaggactttttccttctccgcacactcctatgcaagtgatgcacaaagccgagagaaaataccaagtggggacaattgcagatgaagaacaagcaaaacaaaggcagttaaagagcatcctgaacaagttgaccccacaaaactttgagaaactgtttgagcaagttaaaagtgtcaacattgacaacgctgttacactttctggtgtcatttcacagatatttgacaaagccttgatggagccaacattctgtgagatgtatgcagatttctgttttcatctctctggggcgttacctgattttaatgagaatggtgaaaagattaccttcaaaagattgcttctcaataaatgtcaggaagaattcgagaggggggagaaagaagaggaggaagccagtagagttgccgaagaaggtcaagtagaacaaaccgaggaggaaagggaagagaaaagacttcaggtgcgaaggagaatgcttggtagcatcagacttattg

SEQ ID NO: 145079 - DNA, 380 bp, Arabidopsis thaliana landsberg
ctcagcttggaaaccaagggatatctggggttaatgttggatatggtccaatggctgtcggggctagatggttagcttatgcttccaatagtcccttgtcttctagtataggtcgtctgagccctcagaatgttactcctcctggtgtcagtccatctacctcgccaaataatggtaatctggtggcaagatacgctatggaatctagtaagcatttggcagctgggttactcaatttgggtgacaagggttacaaaactatatctaaatactgtcaagatctcaagcatgacggtcctggtccttctctttcgtccagccctggccggaaagttggtcgggtcggttctcattcagctgagtcagatgttgttggaacg

SEQ ID NO: 145080 - DNA, 1511 bp, Arabidopsis thaliana landsberg
actggcatatgctgattctgtggatgatgaacaccttgcagcagctatagcaaagaacagaaagatgttttttggtaagaagatcagcatagcacggtcaaatccaaagaagggtaaaaaagaattcactcggcgtggaaatggttagaatctatctctcttgtttgttttcctcataatgtagccagccatgtattgaattcgtatctacttctggtataaataattttaaactagtctgattattcttcagtagatggttctgggaattcaaaggacccttccctgatttctgagaaggcgaaagcaccacttggtggagaaactgagggtgaaaggaaaggaaatgaagtcgaagtgaggggtaagaacacgtttgctgtcccaagaaatgttaaaccactcggctacacgacacctaaacccagcgcagatgagacaccaaaatcaaatgatgagttcaggaatatgttccttaaaaagtgagacttttgcttggtccctatcttccttcccttagatacttgtcttgttctacttttcggaagtaatcttatgttgtagaccagcaacatcggatctgctactctcttttgtcaagataactagttgagcttctatataactaatatataaatttaagtcttgctagacgaccatgttaatatgttttgatgttatctttcatttagtttgatgttagaaccatatatattttgagagctttgccaagtgaattattcatgttttctttgaagagaaggaactaaaccccttgtcatgaagcaacctttacaagcaaaaaatttcactttgtacactgggaatcttctgtagtgactgccaaacaaaacaaacgtatatagaaaagcgatgtcacattcatatagtggcaaagcttgtaggacctctgcaagatagtgataatttaacggtcacaaagattggagatccgaaaagattaataggaaatgatgcttttgactttttgttcttcaacggttacaaaatagtagtatctttttgatacaaaacgcagtgaccattttcttaagcattaacattactcaatgaagattatgaaagcaatgaagaagctcacgttctggtcaagaaagaagaggaaacgtaagcaagcttgcccatctcagcctcaccattgctcttgtgagtactcttccacggcagtagcggtgttggttgagcccacagcgcctcctcttccgtattggttcgatgagactcggagtctttgtcccccagagacatcatcatttccttggactactcatcacttacctcaccaacaagaagaaaccatcgttgaagcaaccccgttgttgtctcaagtgtctgatcttcgcatctaccagtcttatcaacagtacatggtgccgaatccaactagtaacgtccactttgtagaaccagctacagcaaagagatcagtgggaatattcggttgtgtcatcgagttaagttcgagtctagttcgttgtttcataccgtaa

SEQ ID NO: 145081 - DNA, 580 bp, Arabidopsis thaliana landsberg
acaacacaacacaaacacatttctgatttcttcattgtttcaaaccattaaaaaaaagaacacagatttaatggaatcgagtagcgtaaatgagagtactacaagtacaggttccatctgtgaaactccggcgataactccggcgaaaaagtcgtcggtaggtaacttatacaggatgggaagcggatcaagcgttgtattagattcagagaacggcgtagaagctgaatctaggaagcttccgtcgtcaaaatacaaaggtgtggtgccacaaccaaacggaagatggggagctcagatttacgagaaacaccagcgcgtgtggctcgggacattcaacgaagaagacgaagccgctcgtgcctacgacgtcgcggttcacaggttccgtggccgtgacgccgtcacaaatttcaaagacgtgaagatggacgaagacgaggtcgatttcttgaattctcattcgaaatctgagatcgttgatatgttgaggaaacatacttataacgaagagttagagcagagtaaacgaaaaacgtaatggtaacggaaacatgactaggacgttgttaacgtcggg

SEQ ID NO: 145082 - DNA, 296 bp, Arabidopsis thaliana landsberg
gttttctcgaattttgaagattttggtgcaacctgttagtgactttggagcgtataagtgttcttcttcttcgggcgagttgggatacgttttggtttattcgttgtattcgattcattggtactgtgtcaagtatgatgagtctcaaggtaagccggttttgagaaacctcggatgtaagcagtttaagaggtttgtgattgtgagcgcttcttggagccctcatgttactggagagtgtctactcttgttagataacggtgaggtctttgtgtttgatttgagtcagagacatt

SEQ ID NO: 145083 - DNA, 368 bp, Arabidopsis thaliana landsberg
acgtaatttgaattttcaaaacgaaaattcataaatatatatatttacatcccaagtttggttacatgacaataataccaagaaaccataatcctcaaatatgagtattaccaaaaaaaagtggaaattacaaaattggtgggtgaagccgtgggagatatctctctcattttttaagatggtactgagaaagaaactcttgatatgaagatgatcgatcttgccattgagagtgaaacgtcttgtccgtaagcatagctttcatatcgaatttatcgaaattcacttcccgattttcgaagaacatctcgaccggagacaactcatcgaacagttcaagccctctttttcctacagcattatcatca

SEQ ID NO: 145084 - DNA, 252 bp, Arabidopsis thaliana landsberg
aaactcttttccacactcttcttagattattactatacgtcgccatctctcatactctgtcccctctcgccggttctttccggatttctaatgactttccggcggttttcaacttcggagactctaactctgacaccggagaacttagctcgggtcttggattccttccacaaccttcctatgaaataaccttctttagatctccaacttccggaagattctgcaatggacgtcttatcgtcgattttctaa

SEQ ID NO: 145085 - DNA, 530 bp, Arabidopsis thaliana landsberg
agaaaaagactaatataagttcaaatttacacacatagcaaaaaaattgaatggtaatcacattggcacacaaatattttgtatatataagaatcatcaacaaaaaaaaatcccatcaccaaaacaaatcaaaaccatccataaaacacaaaccttcttttaggtttcaaaaatacacaaatgaataaacgtactaaattaaatgaattaaaattcccaaccatctttcttgtttcttcattcattcaaagatcggacacataatcttatgcttgggttttggacctgtagagcaccttcttcttcttaaaggtttggttgtcaatcgtgatcacgacctttcccgcctcacttgccttgaaagaatcggttatcacaggttcatcagttaaaccgaccttccggttcttagagacaatcacggtgtagcttgcctcgttgcttggctcaaattgagctccgtagctcacgtccgcacctaaaaccctaagctcccatgagagcgtggaaccctatgtagcaaaaaacaa

SEQ ID NO: 145086 - DNA, 391 bp, Arabidopsis thaliana landsberg
gcagatgaactcgataaatgcagcaatagacagacgaatctcagagagtaggcttgctgggcggatggcgttttagaatttggcaccaaaccaaaccagcgtcaaagaaaaggcgatatggatgaaggctttgttacaacaacaagtcttcactcacttttgttcagatactgaatttatgatctgattttaagttattaactttccatctgttgtattctttagccaggtgagttagtttaccattacattgttttagggatctcagagatgttttttctcagaagtttagtcctttttttttttggtcgttggagacttggaggaagaactttgtctccttttcttctgaattgatcaaagtattatattatacagattcacccaaaat

SEQ ID NO: 145087 - DNA, 610 bp, Arabidopsis thaliana landsberg
aggagtataagcccgcgtggaagaagatctcctccaaggcgtcgcagtgttactccacctcgccgtgggaggagctacagcagatcccctccttatcgtggttcacgccgtgattctcctcgccgcagagactcgccctatggtcgacgttcgccatatgccaatgggtaaaagttcttttctcttcttggatttaggtttactttctcaatctgcatgactcaacttcagcattgtctatgtagatgtgaataacatttgaagtattttgatataaggtatatattcgtttgcgtttctgcagggtgtgaaactggaccctgaagagaaagaagctattactaagctatgatgctatatctactctgtggcgccttttaggatagatctttatatctgctattatggtattagctcttctaggtttggttgttgagcatggacatgtcatggtatgttcgagttttattagacaattggatttggtgagttctccttcatgctgttttccaacagccgtcttgacttattctctataacacgcactggcctacagatattcacacagcgtccttgaacccctacacttgaggtcgttctttggtagcca

SEQ ID NO: 145088 - DNA, 313 bp, Arabidopsis thaliana landsberg
gctcatttatagttatagccacttagcatcttctaaactgtcattagtggatgtaattgcatgtgtacggatatcttttcagttttaatttctattagcctggtatcaaaagaagaagaagaagaagaaatcactgtcaactaaaaaagaagaaagaagaagaagaaatcagcccggatctttaagctcccacgtcacgactgatgggttcgattaaggagaaaaatatataaattgattatattatccactagcattcacaaaacgagaaaaatatatattctaaatacccatatttactttctaaatagag

SEQ ID NO: 145089 - DNA, 1744 bp, Arabidopsis thaliana landsberg
  unsure (1)..(1744): unsure at all n locations
cctgaccaatacaataatctttttggggcttcttattggctcggatttcagggattttcacacttgtagtagagttgcaacatagacaaatggacgacgatggagaattggggatgttctttcctagctggaccagcaagaatcctattgacacggttgaatctcgtggtttaatgttctcttgttttgttgctgcccttgttggtatattgaccatcgcctacactgcttttcaatggcgaagaaatattaatttaagttggacgaaagccatagccaggtcaaagaaaaatccaaannnnnnnnnnnnnnnnnntgttgccccacatagctgggaactcgaccctatagctcgtgcgaaaaacttgaactgttgtgtttgcttgaagtccatgtcgccatctcaggcaattgtagcttcagaaagttttttccacaggtgcacaatctgtggagcagcagcacattttaactgttcttcaagtgcgccaaaagattgcaaatgtgtctccatggttggatttgagcatgtggtgcaccagtgggcagtgcggtggacagaaggggctgatcagactgatgactcctcgttttgtagctactgtgacgagtcatgtagtagctcctttcttgggggttctcctatatggtgctgcttgtggtgtcaacgtcttgtgcacgttgactgtcacagtaacatgtcaaatgaaactggtgacatttgtgatttaggcccgcttagaaggttaatattgtgcccactctacgttaaggaattgacgcggaatccctctggaggatttctgagctcaatcactcatggtgctaacgaacttgcatctaccgcccttgccagtatcaggattcaaagcaaaaaatacaagcaaactaatgaaacttcagctgacactggtaatagtggtagcaattgcgatgaatccacagaaagcacagctgatacaggtccaactgttaatggcgctcatgccgtactggaaaattctatcagcgttatgaatggggattcttctaacggggacagtgacagcaatggcaagctggaaaagaagccgagtgttaaaagaaccgggtcttttggtcagaaggaatatcatgcactaaggtcgaaacttaagtatgaactagctgatttgccttcagatgcaagaccgttgttggtttttattaacaaaaagagtggtgctcaacgaggtgattcccttcgtcaacgtcttcatcttcatctaaatcctgtgcaggtagagtatactgccttgaaaactcgtcacagacttaaatctgattctgtggacattttcaatgcattttcttaatctgtagtctttaaagtttattgacgcgagccgtttcttgcaggtatttgaattgagttcagtgcagggaccagaagtgggactttttctcttcaggaaggttcctcactttagagttcttgtttgtggtggagatggcaccgctggttgggtattagatgccatagagaaacagaattttatttctcctcctgcagttgctatactgcctgctggaaccgggaatgatctatcccgagtattaaattggggtggtggtttgggttctgttgagagacaaggaggcttgtcgacagtattacagaacatagagcatgctgcagtcactgtccttgatcgttggaaagtatcgattctgaatcaacaaggaaagcaactccagccgccaaaatatatgaacaattatatag

SEQ ID NO: 145090 - DNA, 198 bp, Arabidopsis thaliana landsberg
cgagaacggagctccgaagaagaggagaacggtggccgccggtggtggaatggataaggggttgacggtgaagtgcgaggttgttgaagtggcacgtggcgaccgtttattggttttataattttgatttttctttgttggatgattatatgattcttcaaaaaagaagaacgttaataaaaaaattcgtttattatt

SEQ ID NO: 145091 - DNA, 289 bp, Arabidopsis thaliana landsberg
accagtggatttgtcgagccaaagagtgacaacgtcttgctctctacgttggtgttgagagccccataaagtacggaattcacgatcaaaaggtgaagtcggtacccgggaactcgggtagtatcccggtgaaggagaacgttggctatgaccactactagggcacaacactacgagagctagaaagataagagacaaagccattttgagtgaaggaaaaccttctgagtggttactacaaaaggggaaataaacacatttaagagagacaaatatgtatgaaatgaat

SEQ ID NO: 145092 - DNA, 143 bp, Arabidopsis thaliana landsberg
ttcgaacaaattcgaaaacagcacacggcgatggcgtcgcttatactcggagctcctccgcgagtcaccgtcgcattaccttcctcacggttatcatcttctcactctgaaactgccggcgtctctctctcttgcttcactca

SEQ ID NO: 145093 - DNA, 383 bp, Arabidopsis thaliana landsberg
gggctgctaaatttggaactaatcaatcgtgctgggggcaagatatgttttgccatgaagatctctctctttttggtttataaaagtcatactttttgttgtcaatttgaacaaaggaccaacggtgggatctgatcatgtttgatgtttctgacaaaaaattatattcgaaatagatttgattttgcctttctttctcatttcttatgttattgctaacgatcggttcaaatttatttcatttcacatcccccatgcgcaagagatatgcaatcatgcgattgagtataatctattttcccgttttcataatatttaattagaacaggctcacaaaagagctattgagtctcttttttttttttttgttaaccatgatcttt

SEQ ID NO: 145094 - DNA, 256 bp, Arabidopsis thaliana landsberg
caatccactaacgatccctaaccgaaaacagagtagtcaagaaacagagtattttttctacatggatccatttttaattcagtccccattctccggcttctcaccggaatattctatcggatcttctccagattctttctcatcctcttcttctaacaattactctcttcccttcaacgagaacgactcagaggaaatgtttctctacggtctaatcgagcagtccacgcaacaaacctattcgactcggaactca

SEQ ID NO: 145095 - DNA, 424 bp, Arabidopsis thaliana landsberg
gaattcatttctcaccttgattgtcctaccagcaatctccagctttccatttaaggcaatttgtgctgcctttgaatgttcaagttgaacaaactatgcaagagaaaataaaactcagtgaggaataactaagaaaaagagtaccaacaaagtaaaaaacacgttccactaacctgaataaatccaaatcctttgcactgcccagtttcaggatcaagtggtagctgaacaagctcaacgggaccaaatgcctcaaaaatctgataaagaaaaggaaacaactgtgagaatatgaaggatactgaaagaaaaaaaaacagttgctggagtgtccatatgtaattaaacaattgacctagaaaactgaatatcacctgtctaagctgcagttccgacatgttgaaatgcaggttacccacataga

SEQ ID NO: 145096 - DNA, 380 bp, Arabidopsis thaliana landsberg
  unsure (1)..(380): unsure at all n locations
gccacntgcaccatctgcaactgctgctctctctccagccctttctccaatgcagtacaataatatgctttctaagaatgacactaggaatatgggtgctactggaattgatcgtaggaagagaaagtatgtgctcctttcttcttcttgataatgatgaccattttgtgtgtgtttttaagatgactgcaaatgtgttacgaaaaaaagcaacactctaatatgtgagtcatataatgtcaggaagggtatataagcatttcctgccctgaagcatacaccatggcgtcagtcgtcagatatggtttcctccatgtcctaggagggaagcctacttgactcaggttacaaaaatgttggaaactcggtattactcattc

SEQ ID NO: 145097 - DNA, 295 bp, Arabidopsis thaliana landsberg
atagattgcactgacgtgggaacaaacgatatgagggagcagaacgtgtttgaaacattgatcgggaaacagcagcagattttgctagctacgcaagtcgttaagatgattctaaagatcgacgatgtcatctccaattctgaatactgatgtgttgctaccattgtactaccctttggcttcttgggtgttttttgtttgctttctattagcttttgatactcttcgacatcgttttccttaacaaattcccttcgttttgcaaccttttctataagaacatcgtcaggtctta

SEQ ID NO: 145098 - DNA, 65 bp, Arabidopsis thaliana landsberg
atctggttgatgtttctgtacttttgttcttaatcttgttattgcctgtgatgtttctattgata

SEQ ID NO: 145099 - DNA, 1017 bp, Arabidopsis thaliana landsberg
cacaggttttattctagtcattgtaatctaaaagctactccttcgcataaacttggttaatgcttaatcaatccaaaacttgtgcagcatacaaaattgggtctcagacttgttctggaacaagctcgatgttaatttaccctgacatgccagatgcaatggtacactttaacaacaagtatttgtcattgagttggtcttgtagtacggtggaatttgtaatagttatccacattggcaggtgcaccatggcttttacagtgcttatcacaatacaactttacggcctgcggttttggatgcaataacacgagtgaaaaaagtctacggggcgcccatcaacatcatagtgaccggtcatacaataagaggagccatggcttccttttgtggtctagacctagttgtaatcatccttgcattgaattttttttttatcttattgttttgtcctttgagttgttaatggcttatattggatacaaatcgcaggtaaatgaaggtgaagaaaacgtacaggttatgacatttgggcaacctcgtgttgggaatgccgcttttgcatcttattacagtttgcttgtgcccaataccttccggatcacgcatgaccgtgatatggttcctcatctgcctccttactattaccatttccctcaaaaaacataccaccacttcccaacagaggtaacatcactttctcagtgcactgggtgtttatcagaatagcagttttaattttgcaaaaatctggaatactcagtagtgatcagacaaatttctccgcttggtttattaactttctgaaaaaacgaagaaagcagtaatggtgtgttccgggatgcaggtgtgggtgaaagatttcagtttttcgaattttgttctttttggtttggagaaagtttgtgacaacactggtgaagatcctacttgcagcaggtaactatcaatccctctgaaacaacttactgatataatttctctccactacattagcaagaacaaacttccaagtcg

SEQ ID NO: 145100 - DNA, 1534 bp, Arabidopsis thaliana landsberg
caggatctgttctataggctcgtacctctgtttccttgatttctcaagagacaggccctttaccctggttgatgaaccatgaccgtgcggctagagcgtgattgacggctacgatcgtcctcggacgcatccggtgctgtagaggatcgttactcggcttggtcttccttgccggggtggtcgcacggcggtctgacaggttctttttattttaccctcggtttttttattttttttattttgtttttttcaccctcaaaactttcaatttcttacattttcaccctttaattgaaacctcgctaaaaccctcagctgttttattgcagaaaacaagagataaggttgaagagtgaagcaaagcttagtaatggcttcaatgcacgaagctctgttctcttctcggcttcttcaagtcaattcttctttttccttccgttgcgctcttccaattatctcttcaccagctgcagtatcttgcgcaatcaaatcgacccagttttttaaacagcgttgtagaaccaaagtgagggacttttctctatcttcactgtcccggagagggttcgtttgcagagctgctgagtacaagtttccggatgccatacctgaattcgccgaagctgtgagctcatttcctcttcttcgtcaactcatttttgatggatgatcgaaacctaattgatgtgtgatataaccaggagactgagaaatttagggaccatatgttaatcaaactatcaaaaagagatctttttgaagactctgttgatgaaattgttggagtctgcactgaggtaatctcaaatcttctcaccttcactcatgtatatctgttcgtgtctatgtgagatgtcttgaattgtggtgtttttagtaattgtgttccatttcaaagaactcaaaagtggtgtaatttttagtctcagtttctgatattttcttaacatgcctcaaatctcttattcttgtgatgaatgagaatcctgatctgaaattgtttaggtaatgtaatcatcttttactgtcaatatgctagttttggaattgcaatggtgatgtttgatcgaagttttcctagtttgtatgattgtgattatgcaagcattttccttaaatcttgaggagtgattttgtggtcttggacttagtcgagcttaaggcctagaatggagagggtcatgtgattcggtttagaatgtgaaggagtggttttcaatttgaacccatcttgaaagctcagtgaaaaaaagtttgtattgtttgaaaatgagatgctgtggtcttagtaatgatgctttggtgaggatattaatctacgtatggtttacaatgagtcgactgtaagtttttgtttcatgagtgatactttaaaccccattctctaagtctgttatatgtcttggcatgagactcagggagttttaacagttttttgttctgcaccattgtgattattgacagatcttcgagacgttcttgcgcagtgagtatggaggacctggtacactcttggtgatacctttcattgaca

SEQ ID NO: 145101 - DNA, 378 bp, Arabidopsis thaliana landsberg
ggctctgctataccagaggttctcggactaggacagtcaggtggttgtagctgttctaaacaagacgaagattcctcgattgttataccaacaaaatatagcatagaagatatcctctctgaagaatctgcagtccaggtttttgttttaaaccttttcttgaacagcaagaaagtgatcagaatcacaatctctaaagtctaattcctatgttttcatgatttttcagggaacagagacttctagtctcaccgcgtctttgactcaactcgttgagaatcacaggaaagaaaaggaatctctactcggacacagagttctcacttctccttctatagcttcttccacaagcgaatcatctgctacatcagagactgt

SEQ ID NO: 145102 - DNA, 676 bp, Arabidopsis thaliana landsberg
agcacgaaaaccaaaatctaatccattaataacacttagtgaaaatgaatatcctaataatatataaagacatcaatgagtaatcaagagtaagacataaggtacatcacatataacttttttctttttttggacgacaagacatatattatctatttcaactgaaaaaagagttcggtcagggaaggactcaccatacagcaatccatttgtctcaagatccttccgtttgccaagaattctctcagcagtaaggttcttgacgcctgctgttgaaaagtcttgcactctaaaatccctagtacccacaacgtcttgttctctctctaatctgggtcctccctctacaaactttggtttctcctgaccatttttctttatcacctcagttttctcctctttcttctctttactacttccatttgttatgttttttggttcacttttctttatcccttcattacccaatggcttatcactctttgtcacactgtccctgcggtgattcttctcttgtagttcccgtttctttgccttatcatttttctccactggtttaactttaacctcagctcctttctgatccatgcaaggtgatactcggagaaccgcactttcagacttttttgacatagcagagtttctatgggtactgtttctcttctcgtcaactttt

SEQ ID NO: 145103 - DNA, 239 bp, Arabidopsis thaliana landsberg
tctttactttagactttactacttcaaatcaattacatttgtatatcacgttcttaatttcgctccgaaaaggtaagacaatgatcacaattctccaatgatattaggaccaaaactttgtatctgaaaccagttacagtaatttcttatgacattgtttctttaaggaatctcaatgtaaatctgaaatcacttgccttgtttctgcctgaggcgttctttgacaaaatcattacggg

SEQ ID NO: 145104 - DNA, 526 bp, Arabidopsis thaliana landsberg
attctcttttactccttcgccgaatctcacaacgccaaattttggcgtttccacagatctatacatcccggagatctccaacaaatccgacaccgttttctactccgacgaatcctcctccgtagatctagtcaaaaaacgaacctaacggtaatttctaaatatagctcaaagaaaaatcgatttcaaattgtgtttcccggtagattctttatcaatcaaaactcagatttcgcacgaatctctcatcaatgtcaaaatcattttcgattcttcttttttttttgaacagtttgtgtttaactttttctcagaaattcgaaatcctgatcggagatggctccgagtattcgaaaagcgattggtgcggttaaagaccaaacaagcataggaatcgctaaagtagcaagcaacatggctccagatctagaagtagccatcgtgaaagctacaagtcacgacgacgatcccgcaagcgagaaatacattcgtgagattctaaacctgacctctctctctggcggct

SEQ ID NO: 145105 - DNA, 216 bp, Arabidopsis thaliana landsberg
attcatttcatttcttataaaaacgaatatcaaacagcaatcatttacattttctttcaattgaagtaaccacaatgtacaacatattaagagcgacaccatctgttttggtcatatcgatcagctctctaagtaaatcgcgtctctctttccccaaacgaggccattagaagccccacagcaacagtaaacatcaccagcattgcaacaagcaaa

SEQ ID NO: 145106 - DNA, 287 bp, Arabidopsis thaliana landsberg
cctgatattactccgtctaactcggagaggttcaccattgattcaagcactattgattctgagacactcactgggtcttttcgaaacgatatcgttgatgatccttctttcttgaatagacacaacagtaaaggtttggcggaaactacgtttaaggcaatctcaggtgcttcggttagtgccaatgtttccacggctaggactgggaatcaaatggcattgtgttcaagtgacgttttggagcctgctgcttcatttgagagcacttcctcgtttgcttctattcc

SEQ ID NO: 145107 - DNA, 382 bp, Arabidopsis thaliana landsberg
tcaaagaacaaaacagttgttgctgtcgagtttggtatctccaggacaggaaccagtgcaagaattttagttggtagacctgattctgctgaaattagaaacctttcgtttgtgggtgacttgatgatggacaatggaaggactctgagctgtatgattgagtatgaggcaagttctaagagaatgatggttcgattcagaaaatctggttcggtaaagctgtttgatccgttcttctctttctcggtagacttggccaagttatggaaaggtggtgaagtcactgtgggtttaagctctgccaatgggaactcttcttccaaggcacattttctccattcatggagatttgaaataagacatcctcctccgatgtggatgc

SEQ ID NO: 145108 - DNA, 417 bp, Arabidopsis thaliana landsberg
gtgaggggtacttcttccagaacattagagagagtcgatttcgaaccctagatccagatgaagcagatctcatcttcattccaatctcttgtcacaagatgcgaggcaaagtaagaatttacaagttttgattcactgagaatttgcaatttcatgaatttgatgattgaattgtgatgatctttgttgtgcagggaacatcatatgaaaatatgactgtgattgttcaaaactatgttgatggattgatagctaagtatccttattggaatagaactttaggagcagatcacttctttgttacatgtcatgatgttggtgttagagcatttgagggatctccgcttctgattaagaatactattagggttgtgtgctcacctagctacaatgttggtttcattcctcacaaagatg

SEQ ID NO: 145109 - DNA, 95 bp, Arabidopsis thaliana landsberg
caggtttgagagttcagcattgaacaatgtggagaatgtggtgaaaccgagaccaaaggtgaatccttttggtgatgcaaaacctcgggaagtat

SEQ ID NO: 145110 - DNA, 173 bp, Arabidopsis thaliana landsberg
aaaaatttttttaccccttttatccttctatctttttttttctctcgttttgtgctgattaaaatccaaagatgtaatgatattttgggggggttttattttcgattcctaacacaattggatattatgaataaaaaaatatcatcggttctattagtaaaatatgtattgtt

SEQ ID NO: 145111 - DNA, 293 bp, Arabidopsis thaliana landsberg
accatcatcctcaagccaacgcattctctgatttctcttctttgaaacggcgcctttgtttttgagctattccgatcgattttgaaatcgattttgagctgaaaaaaagttgctctgctttttaagtcagatggaagtaaatgtgttggaagttgcttcgagatcgacgatcatactgatgatttagttgataccgttaatgtagatagccgtcgaatttctatttttcgccttttagcttgagcaagtgtggatttcgtcgaggtttttgattgatggagggtttcgattct

SEQ ID NO: 145112 - DNA, 470 bp, Arabidopsis thaliana landsberg
gaaatcggagatgttgaattcagattgataccggaaacagagaatccttcgatggagtatttaggagcttcgggacggtagattaggtagagaaccgcgaaggatattccggcgaggacgattaagatgaaaatcgtggcgaggaatgagcagaagcagcatctacagttactgcggttggtttttttacgagagagttgttcaaagcggtgtgcgttttccggcggtgggatacggtagatttgatcttttgggacttggattacgtatgttgatggtggtggtgctggttttttggggaattcgccggagctgaagttgccggagaattgtccgctttgtggtggtgaatcggcgggatagactcgttcagccattggagatagactagagtcactgagacaaaggaagtgatttgagtttgagagttgagaaatgagaaacggagaagcaaatatatgcagagaagt

SEQ ID NO: 145113 - DNA, 417 bp, Arabidopsis thaliana landsberg
atggggagaagaccatgctgtgagaagataggattgaagaaagggccatggagtgctgaagaagatcgaatcttgatcaattatattagtctccatggccatcccaattggagagctctccctaaactagccggtaaataagccattttatatttgctatttgccatatgtatatatcagtaacaaaataattttgtacctagctagcatgtgtattattgttctatagtatatagtagtgtatatttgttgtgtaaagttaataatggtgtttgtgaaatgattagggctacttcggtgcggaaaaagttgcaggcttcgttggattaattatttgagaccagacatcaaacgtggcaatttcactcctcatgaagaagatactatcatcagcttacatcaactcttaggcaacag

SEQ ID NO: 145114 - DNA, 319 bp, Arabidopsis thaliana landsberg; identical to SEQ ID NO: 32649
  unsure (1)..(319): unsure at all n locations

SEQ ID NO: 145115 - DNA, 423 bp, Arabidopsis thaliana landsberg
aatgaaaagaatcactctatataccctacatgaagctgacaacctcagacaacaactcatccactatcatactttctaattcacaaaccactgactcatcatcagcttcgagttctaaccactcatcaatgtctatgactggcactttggccaatgattttttcttggatcgcttctcttgcctagaaagtactttccagagttcttgtttcagtccacatgtgcttagcgcagtgcctagcctcctagaaacgggtttcttccatgttggtgtagctgaaaggattctagaatctctacaagacttgattgactctgtcaaacaaaatctttctgtcagatctatgccaagatgtctctgtgtaatacttcttagccagtttctcgaagatctggggggtgatgactaaatcccgttagcca

SEQ ID NO: 145116 - DNA, 410 bp, Arabidopsis thaliana landsberg
cagatagtgattatgtaagagtgaaaccagtatttaagtacccgaaaccagaacggagaccagcgacccagtcttccttgtaacacaaggctcttcctctaagatctgctactatacctctgaatagcctcttcgagctatccactctttcttcctccatatccagaatccctcaaagactccagaactcgtcgcctctggtctactctttatatgacctaaaccacaaaaacaggaagctatatattatgtatgacatctagcaatgactttaaatctagcattttgctgactacatttaatacaaaataatcttcatattatatttttctaaatttgtgacgattccagtctttttccacctctcaatagaaaaagaagattaagctgttttatcttatgtacttact

SEQ ID NO: 145117 - DNA, 201 bp, Arabidopsis thaliana landsberg
tgtgaaatagaggttcgtggactgcgaagatgattatgtttatctgtgatgagaatttagattcgattaaaatcataaacatgttcgaggatttggaaaactttggtttgtaatttggacagaactcatggatgatgcttgaggattccaaaactctttcaagtattgtttcttcatctattcatcataagtcgttgactc

SEQ ID NO: 145118 - DNA, 139 bp, Arabidopsis thaliana landsberg
cagcatgcacgagataaggaggaggaggaggaccattctggttgctcctcggacctggttttgaatgacggccagatggattcttgtgtccaggattagcctttccaccacccttagatttcgcttgaccagttacagc

SEQ ID NO: 145119 - DNA, 462 bp, Arabidopsis thaliana landsberg
tttttggtttgatttgggaactcgtgcgcggctgtggcagaggccaaacccacccgtgtactccatccgtcggatccaccaaaccaatattctttcatctctctctctctctctctctctctcttcttcttcgtcttcttctctttttattctttcttcaggaacaaattcctctgctttggcattttagggtttctcaaatttttgacgctttctcttaaaagggttgacgaaataaccctttaagggaaaaaacaaaggttgaggaagaccaccaaggtgaaaaaagaaagaagaattcgaacaacagcagcaacaagataaagttacgaatttttcctcttttgtaacctttgtttctcttcttcctcttcctccatttttttccattaaagattctgcctttgggttccaatttcgtctttcctttttcgattttgccgcgtttaacatgacattcgc

SEQ ID NO: 145120 - DNA, 1056 bp, Arabidopsis thaliana landsberg
cacaacttcggagcgaatctattcttcttcttcttcttcctccgtttttttcatcttcttctctgtttcgagagatccactggtgaaagagtcagcaccatggccatggtcaaagagaaagaacaaaacactaaagacaaaaaactcctcgtcggcgtcatttggaacttctccgccgagctcaagctcactttcatggcgttacttgttctctgcactttagctactctcttacctttcataccttcttcattctctctctccacttccgatttccgcttctgcatctcacgcttctcctccgccgtccctctcaacaccaccaccaccgtagaagaatcatcatcctcaccgtcaccggagaagaacctagatcgagttttggataacggagttattaaacggacgtttactggctacggctcagcagcttataacttcgtctcaatgagtgcttacagaggcggcgttaactcattcgccgttatcggattatcatcaaaaccattacacgtgtacggtcatccttcgtatagatgcgaatgggtctcattagacccgactcaagatccgatttcaacaaccgggtttaaaatcttaaccgattggggttacggacggatctacacaacagtcgtcgttaactgtactttctcatcaatctccgccgtgaatccacaaaactccggtggaactctcatcctccacgccaccaccggagatccaactctcaatctcaccgattcaatctcagtcctaaccgaacctcccaaatccgtcgatttcgatctctataactccacgaagaagacgaagaagtacgattatctctattgcggatcgtccttatacggtaacctaagtccgcaacgagttagagaatggatcgcttaccacgttagattcttcggtgaacggtcacatttcgtgctacacgacgccggagggattcatgaggaagtgttcgaggttttaaagccatggattgagctagggagagtgacgttacatgatattagagatcaagaacgattcgatggatattatcataatcag

SEQ ID NO: 145121 - DNA, 329 bp, Arabidopsis thaliana landsberg
caaatgactttaacgagattaataaaatctaaaactctccctctcgcttcgagaagggatacaaatgacacgagagactactactactactagcgggtggtacttcaactcaataccacctctgcatcagtataacataaaaccttaccaataaaaatgaagaaagataagaaaaggttcccaaaagatgacatcatcaaggcctcgtgcaaaatcaagcactcgaagcaccacttctttttaggtaaacctcaattgaaagaaaggaccaaattactatcatgcccctctctctaactgcttctactacaacacgtcaataccacacg

SEQ ID NO: 145122 - DNA, 583 bp, Arabidopsis thaliana landsberg
aacgaaaaataaaaaagaagaaactaacaaaacaaaaaaaaaatggaggccgggaaaacaccaccgacgacgacaacaacgacggagaagaaaacggagcaagtgaaagacaacgacttgccgaccgatagcccttacatggcgacgggtactttggaagattacaaattgaaagcttatggagccgaaggtcaccaagagcctactcctggtcttggaggtggctccaccgatgctcctactccttctggcgacgcacccgccgccactaccaccgatgcgaaagctccgtgaaaaaaaagaaagactataataatgaacgggttttgtggatcgtcggaaaacaaacccataattgtagtatgttcaataactgatccagcttcgttcttaacgtttttatggtttaattaaaaatgtatttgcgtctaatgctgaatgctaaagttcgagtttcgtatcaaatgaagttgtaacgatttaataattaatgtgaagcttatttctttttgataatgaccaatgttatctagttttatctccgtcgatcatataacttaatttattaatttagtattccatc

SEQ ID NO: 145123 - DNA, 218 bp, Arabidopsis thaliana landsberg
caagataacaacaacaacaacaaacctctccaagccgtagccatgaccaccactactgttactccctccagctatacgctcgttaccatctccggtgaaatccaaatctcagtttcaagatctacgaatcaaacgcagattcttggagcaaagaccaagaactggaatcagtcaagaacaatgattcatcattacatgatgattatgatactgacagt

SEQ ID NO: 145124 - DNA, 193 bp, Arabidopsis thaliana landsberg
agcaaaaacaaaagctatcaaatatatcaatagtactagaagtagtctgcagaaaatgaaaaacaaatgttaaaaaggaaaaaaaaaaaataaagctaaacgaaacgaacaaattattgcgaaattatccacgtggaaatagaaaactagattaagtgtctaaaatcaggagccacgtggttagtattattat

SEQ ID NO: 145125 - DNA, 166 bp, Arabidopsis thaliana landsberg
ttttttggtttcttctttgtgcagaaagtgtaagaaacaataataatgatactttacgagtttagtattcatttgttctaatctttctcctgaattttgtaacttttgattcattgatttgtaatcttggaaaaagaataacaaagagtttgtaaccttcaagcaa

SEQ ID NO: 145126 - DNA, 142 bp, Arabidopsis thaliana landsberg
aagaggtttctgcattcgagaagagtggggacaatatcggagagttgaaattggacggaggattttcgatgccgaaaatggacaccaatgacgactaagcttttttggctcctgagatgaatgcatttggccgccaattcag

SEQ ID NO: 145127 - DNA, 206 bp, Arabidopsis thaliana landsberg
cgaagaagattaatctaattttgtttaatatctacattctacaattagatccttatttttaatatatcaatgtataaatattggtatccttaccatagtaatgaatattgcgatgttttttttatatatatatacaaacctcacataagacttttcttcttattttgtaacaaaacttttgtacaatcaatacatgacaaatcatt

SEQ ID NO: 145128 - DNA, 511 bp, Arabidopsis thaliana landsberg
agaatctttagattcgatttctcactcggagctactttgaattggaatctttagattcgtcactctcaatttctgtcctgcgtttttcagatctgggggaatctccgaatttggaattggaaaattcacagatgtcgaaaccttggggtggaatcggcgcatgggctgatgaggctgagcgtgccgatgaagagcaagctgctgaagctacagccacggcggcagattcacagagtttcccgagtctgaaagaggctgcgactgctaagtcttctaagaagaagaagaagatgactttatcggagtttaccaaaggagcatacactgctccgagttctgctggattgacgagagagcagatgcttcagctacctactggtccaagacaacgttctgaggatgaaatgcaacctggtcgtctcggtggtggattctcttcttatggtggaggaaggtctagtggacctccgggaagaatgtcacgagatcgagaggtttccgatggatcttg

SEQ ID NO: 145129 - DNA, 90 bp, Arabidopsis thaliana landsberg
tcgagatctccatctgtttcctccaccccgaaatttcaacaatatcttctcgatctgtgcgtcaggatctgggctttttgaaatttgagt

SEQ ID NO: 145130 - DNA, 161 bp, Arabidopsis thaliana landsberg
agacttgcgtttatataaagttaaaaaccgaacgaggaataataaaaccctttagcgtttatataaagttacaaagattacaatttttgaagtaagtggtgattaacgtgccagaatttgcaagtaatccaaagattctaactttcgttatccaaaacttt

SEQ ID NO: 145131 - DNA, 307 bp, Arabidopsis thaliana landsberg
  unsure (1)..(307): unsure at all n locations
gacgactggagcaaattccggacacaaagatctcaaattttgacgctttatcaaatttcttacttcacccataaaaatctgagtttttagacttcaacaggacagatctttcttctctttccagatcctaaaatcttcatctcctacagatctgcagaaatggcggttacgtactgattcagatacgggagaagaaaaagaagnaagctttctgctctaacttttcccattactgnaatggcggatcctctaaacggcaagtccttctttatctggttctcccttttattctccctcactctgcttt

SEQ ID NO: 145132 - DNA, 285 bp, Arabidopsis thaliana landsberg
gtaaccagaatgtatagagtgtagacaaaatgggttgcatggagaaaattaaaaaaaagaaagaaaataaattggccttgcctgctgcaaaagttctgcttctgttgaaaatggagaccattctagtagaatagagagactggatataaaatgttctcggtcttgcaatgtcttgaactcgccagctgaagcattaaactcgtaatccaactgaatattcataaggtaacacggttatattatagaaaaacaaggtacattaatatgtgtgagagaagaaaactc

SEQ ID NO: 145133 - DNA, 397 bp, Arabidopsis thaliana landsberg
tgatcacaaacataatttatttatttatgtttgtttgggttttttttgtttgtttgttattttaaatatctatctatagtttcacatctctaccaaaaacccagctaaacgaaacagaaggttttgacacaagtttgaccctatcattagctctttcctctaacctcttgatcctctgcggcaatgtgcacaagtattcctgtgctctccttccttcccctgataaccccaatcccaaactctccaccttccaccgccgcaacagaaactcaagtatcccagcgtaatccgccgccgtgtaaactccaatccgctgcgccacggcggcgtaatgatcaaacaaatcgttatctcttccgtcgtgcataagatgagccggcattgtgatccgtttctt

SEQ ID NO: 145134 - DNA, 303 bp, Arabidopsis thaliana landsberg
ctctgttctactctctatcctaactctgttcatcaatggtcctttgataacgacagctcaatctccaccttcttcttcaacttcatgtaaccgtatctgtggaggaatcgagattccttttccttttggaatcggacgaagagactgttttctcaacgactggtacgaggttgtctgtaacagcaccacctccggtaaatccttagctccgttcctctataagatcaacagagaattagttagcatcactcttcgaagcagcatcgacagttcctacggagttgttcacattaaatctccggt

SEQ ID NO: 145135 - DNA, 230 bp, Arabidopsis thaliana landsberg
tacatttacctattagattaatatgactacataaatcgacataactcctccaacaactccaccacttgaaccatagtaggcctttctctagtcgactctttaatacaaagacaagcaatcctaaaatactcttccactcccttctcactaccacaaacacctccaaaatccaacatttcataacaccgattttgctccaccatgatcacagcccattgagccaacccaac

SEQ ID NO: 145136 - DNA, 488 bp, Arabidopsis thaliana landsberg
tcaaatactcacagcccatagaggaagaatcggggctcgaccggtgacgataagccaaacccatccgtaaccgatgaggttctgaacggcgccaacaagaagagcggcccaaagaggcaagatctcagagagagtaccggcgatgaatccgacactatcaccgagatccttggcgactccaagtctggaaagctccttctgattatagtttaaggagcttttgataaccggagaaatgcttccgaacaaataaccgatgccagcacaagactgtatccacatggcagccacgaagacgagccatctgttgtttatgaaagatacaaacttttctcgtgtagtcgacgccattgagaaaaatgctttctgggtttcctttgtttcttctctccgccaccgggagaatcctggaagaatcagatcaaaacacgattgcgaaatctgtggtgttagaaagagaaaagaaatttttttttttgaatattcgt

SEQ ID NO: 145137 - DNA, 74 bp, Arabidopsis thaliana landsberg
tcatgttttcttcttctatatgtgtaaaggttgcttgcaatcaatctatatgaagtcctttggaaatttgaatt

SEQ ID NO: 145138 - DNA, 54 bp, Arabidopsis thaliana landsberg
agagaaagcatgtataagctgtcactgaatcatttgactcttcagtctgtgtct

SEQ ID NO: 145139 - DNA, 177 bp, Arabidopsis thaliana landsberg
gttctgcaacaatgaactttactctgttgaagaatcactcaacatttttgaccattttacccctcaacacattctctcttcatcacctccaagtgatcttctcggaaccctaagtctctctcagcatattcccaccggattatatccaaatttctcagatttccaaatctacgacgc

SEQ ID NO: 145140 - DNA, 224 bp, Arabidopsis thaliana landsberg
gaacatcatacactggtggagatactatgttacttgagatctcagagcatccgacctagctcatggtttcacagggtcaataccacgaaagggtgactcgaagtcatgaactgttgaaaagaggaatgcttgaaggctgtgtacgtcaaagggtaacatgctcacctgatttgtgctggcgaaagatgattcatgctatttctttcaaagaactggcgctcttc

SEQ ID NO: 145141 - DNA, 359 bp, Arabidopsis thaliana landsberg
gacagtttctttcctgtaagacacttggcctcaccatcaaatttgccacggtctccagagcacagatcatcaatcgcttcagcagccacttgtgtatcattccctaaaactgccgcttcacgaacttcatctaactctttgccaagattctttttagcaccctggatattctttcggctcctagtcacactatgcttcaacagtttgggatcagaacgagcccatcttttatccactgcaactggtatcagttctcttttctgttctctaggcaagctagaaaattcccgtcttttacttgcaacgccaaagaattcatcttttcttctacgatagatatcaccccctccttcatcctc

SEQ ID NO: 145142 - DNA, 193 bp, Arabidopsis thaliana landsberg
aaaacaaagtctacacttctattattcagcgatacattcttgaactaacaaagttccatctctcaacaaaaccaatttagcaatgagaaagaaagagcaagtgtaacaactatgaccctttataaaaccttaatcagctttgtatcttgagctcatacacggaacaaaagcagaaaaatcgaaccgttagatc

SEQ ID NO: 145143 - DNA, 216 bp, Arabidopsis thaliana landsberg
ctgcacttgggacattgatgatgatcaaagtggtgatagattgtcctcttgtattatggtattcttttcgaaattggtggaaaacagagacaatttataggtcggtgacttgcaagtcgtcgtttaaaatgttaagaaaaatcttgtaccattgttgtgttatgtttcctctttgagtgtctgtcttttatctaagtcttgagctataagttgtgg

SEQ ID NO: 145144 - DNA, 488 bp, Arabidopsis thaliana landsberg
ctttattgcagagcaggttacctggataaagccagagatatattccatacaataccttacgagccatcaagtgctatgtgtgctactctactgaaagcgtgcctcatccacgggaacacaaacattggggagtgggctgcagataagttactactagaaacaaagccagaacacttaggtcactatatgttgcttccagatatccatgcagtaactggttcttggagcaagcttgtaacggtgaagactttactgagtgacttaggcgtgcaaaaggctcatgagtttgctttgatggaaacagattcggagttagatggagagaataataagccgatgaacgatgattctgtcatcaatcaggagcaaagttcagatgaagaacgtcttgtagaagtaggataaataatcaaattctgatagaaatattttatcaaactggagaatcaatttgtacataaatcttatatacaacaagttttaattgc

SEQ ID NO: 145145 - DNA, 424 bp, Arabidopsis thaliana landsberg
ttgatttctcatctttgaaactaacaaatccatataccttcctcgttgtcacagagaccggaaggtcacattcgtagccgttttcataatcaaaatattcataatctctttcgcaaatgacctgtgaatcaaagataaacatattatagatgaaaaaaaaattcagtaccaatgagggaaaagtgaaaagaaaaccgaacattagaatgtataacgtcaccaaactgagaaaatgcattcttaagatcattttcttctgtgtccgactccaaattgccaacatagcacgtgaattcaacatttgtggaagctattttgaaagagtaagagagttcaaaaacaagtagtgatttctaagtagaaaacatagcaattttatgagtgacataaaatgagagacactttagtcaatttatagaaaaag

SEQ ID NO: 145146 - DNA, 326 bp, Arabidopsis thaliana landsberg
aaaaaccttagtttcatgtggctgcttcccaatgcctgcttgagctcatcgaactgtatagcacaatctcgtttttgcatcccgtggaagtagattttaaggctgaggttgtttctttacttgaactcgaaaagagtgaagaagccaagtcgttgttgagaaaatccagggatgctcttgcaaatctcccttcgttaaactaagcaagcacagagaagattttagttttatgcctgaagttgatataaatgggaattgaatctcctactttgtatttgtttacttatatacaagttcacattgatatatatatcttctaagttttt

SEQ ID NO: 145147 - DNA, 104 bp, Arabidopsis thaliana landsberg
cgagcagctttcagttatttatgctctgcctaagcttgttgtttcttcgtttacacttgttcttccattctttcctactggaacttctgagagaatggaagacg

SEQ ID NO: 145148 - DNA, 628 bp, Arabidopsis thaliana landsberg
tgggagaattaccaaaggatgaaagcgatctcagacatccatgatttgcctcttttgtcttctttaccttattcgtctctcattctttgaatcccctttccctttctctcaatcttcctcacttacatttcttatctcactccctctctcactttctccttcaatgttctctcctctgcgttttcacgaaacagagaaccttatcgttccgtcttcgtagacattgaaatcgatagagaggtgattcattactttgattcgcgatcggattctgatcattgctctttttcaaaaatcgatagattcttctccgatttcgtaacaccgacacgaatttgtttttgtttttttctggtttttgcaggtgttgatttgattaggtttaatattgattcggatgaagggaagagatggttactaatagctacatggatacgcgatcaaatttgacaagtgtgaatcgaggatccaatgtggatctcgaagatcgattccagagggagctcgaatctttgctccaacaacattgtaatcagcaatcatttggccgagaacgagaacgagacattgatgttctcagaagcggaagcgcgcctcctaccgtggaaggattgttgagagctatgga

SEQ ID NO: 145149 - DNA, 1046 bp, Arabidopsis thaliana landsberg
cggcgactttgtgccacatccgaggatccatcgatcgtcgtcctctgatgtctcttagattgcttcttacactatttcccatttgaccagagactttaagcgagatgtgtcaagtcggtgatcgggtcttattcggtttaagcctaaaacgacgtcgtatgtgatgtgttattttcttcactacagcaactaaaaagattcttccttttgcttcagctgcgagctttggttggatctctcacttgcaaaaccaaatcccttatcgacttccaccgaaagatcacttcttaacctacacaaggtttgtttttctcataaaaatcaaacctttattctcttttcttgatgattttgatgctctgcttcttcttatccacaaaacatgaaaacatttcttctttgataagtttgatgttggtttgttgtaaatgattgctctttctagcaagctttactctaaagtgtgaagagaaattgtcaaattagtttgtttaggattggaactcttgtatgccttgtttattgatgaagtagttcatggctgacgtagattcatagagtcatgagttgatttcaatgatactagagttcttgttagagttttgatctccatggatattattgttcaatattgatatctaattcagtctctgattaatgactttgtctatgaattctacaggtgtttgttatgaagatcagataaataaaaggtcatttgaggataatggttgatgttcaaagattcttacttgcttatttgtgatggacaatgtaagaggttcaataatgttgcagccactgccagagatagctgagagtatcgatgatgctatctgccatgaactctccatgtggcctgatgatgctaaagatttgttattgatagtggaggcaatatcaaggggagacttgaagttggtacttgttgcttgtgcaaaagctgtttctgagaataatcttctaatggcacgatggtgtatgggtgagttgcgcggtatggtttcgatttctggtgagccaatccagagattgggagcttatat

SEQ ID NO: 145150 - DNA, 332 bp, Arabidopsis thaliana landsberg
gaaatgaagtaacgacggtcaagaacacaaaaaacgacaaaaatgatctctaatagtttctgtaaaaaattgtgtcctgtgtatagttgcttagttatcatatgaacaatataacttgtatttgcataatcatcgtatgaacactcgtaaacatttctggactctaccatgtcattgtataatccttcacttgtctttctatttgtttagtttcttcagctaatgaatcgttgagtttgcgatttccttgagatactgcttctcggaactagccattcggctttggaacattgtccattcccgtttacatctgtctctcacctttgcaacaa

SEQ ID NO: 145151 - DNA, 377 bp, Arabidopsis thaliana landsberg
gaataaaaacttaattaaatcacataatgttgcattattttgatacaagcacataacgaaatgacctttttggataacaacaaaataaaaacacaaatgacttcaaccaattactgttacaaatggacgacccatacaatagaccgtgcataatgactcggccgtgcttgcttacttgttctcaatggcgatcgcatttttttgagccacaacggttgactcatgacacgatgaatctaaccttataggcaaacgacgttgcttcatcaagtcaacgatgtgatttttcatgactactgttttcagccaagctggcctcattttcattttctcgacccatgcggctacattgggacgtgaatagatcaagtttttca

SEQ ID NO: 145152 - DNA, 807 bp, Arabidopsis thaliana landsberg
catgttactaagttttgctttcttcatctgtatttcttgtctctctgccgtgcctagctccaccggacgtttcccggctgcttctgctccgccaccggaaccttctcctccagcgccggccgatgattctccgacaggtttatcatttccgcaactaccctttttcgatgagaatagttgggatttagcgttcatgtcatcggaatcagcgttgactacttcgtcaagaagctcttgtgctgccttcaagtacttggagctaacaagattagctataccgtttgttacccccgatcctgtagagccagacccgacccggatatcttctccatgtccggacccgaatccgacgtgaataggctggtgttgttgatgatgttgctgttgctgctgctgttgagacgagagggttaaagagaggccttgctgcgcgcgtggcgtctcacacgcggcttgctggtgagtgggatccacttggtggctaccgtagagactgtactgcacgcgcggaggataaccgtgaagtacggagatgttgtcggcggctgtaatggaagcagcttcgtgacctgagagtggtattccgacgaactgctggctcgcgtttggctgcggcgcgtgggaatcgaggaaaacgaaactactgttgttgttgtttgtgtttgtgtttgtgttgttgttgttgctattgttgctgttgttgttgttgttcgagtcgttgtcttgttgggtgtactgaacgtaagtagttggattcatgaggatcaacgtttgaagaccaccgtcggatccggcagagatctccgg

SEQ ID NO: 145153 - DNA, 233 bp, Arabidopsis thaliana landsberg
ggcttctttcttcttaggcttcaaatgattttggcgggtaactgacaacaaaaatgtttgacaaaaaaaaaacaactgtttacataatgttttctgtcttctatagaatctttattaccatcaaaggaatctcaaaactgtgatctccattgaatttgatatcggagtgtgatttcttcaatcaggcgttgttagatcgagaagcagcagccgcagccgcagccgctttctta

SEQ ID NO: 145154 - DNA, 67 bp, Arabidopsis thaliana landsberg
cttcttcaacaatggcggaaccaaagacaaaagttgcagaaatcagggaatggatcatcgaacataa

SEQ ID NO: 145155 - DNA, 494 bp, Arabidopsis thaliana landsberg
atctctttcaagaattttggtatatatatattagacatactctaaactaaaataaaacttataacatatgtattgtgaaaggacagatacagaggaatgggagttatcaatgtgtgacaagtgagagcagaaaagcatgaccaaactattcaacaggtacattaaagtgttctcaggaagggaaatctaatcttttcttctgacataattttgtagccaactaaattgacaggaaacgaatcatttagatttatatacatgcataagtagttatccctcgaacatttttatatatataggaaatataacatgagtgtgtggataacagtttacatttaaaaagattggaggaaaaaggaaactttggtgcaagaaatcagaaagacagaagtggtgaaaatacaagaacttataaaattaatgagtggatacatcaaaattcaattatattaaaaaaaacaatgattaagctgataggtcttcttagtttatat

SEQ ID NO: 145156 - DNA, 429 bp, Arabidopsis thaliana landsberg
atgttgaaaacataacatattaccatcgatctatatacatgtatagtgattgtcacatacacagctatacataacttatgagaaatatcttattctacgaggaagagacgacagaagaagaagagagacgagagatttgatccatgaggaagagcatgcgatcgtgatagtcacgtgcctgttctaaagactcgacctccagctccgccagctgcgagcagagttgctcttccgcctcctccgccacaaccgttcgctgccacaacttaatcatttctgtcttcatctccgccacttctctcgagagctctatgttcctcctccttagctcatccatctcttccgccgccaccgtcacgcatcctcctcggttcgccattaaatttaagattctttgtgtaaaaggatttgattgtggttctaactttg

SEQ ID NO: 145157 - DNA, 272 bp, Arabidopsis thaliana landsberg
taattttattagcctattactggatttacacaacatattccacgtagacaacaaaccatgaaaagttacacgtgtcaacatctcattttaactccaccgtaaacaatcgaataacgaaaaatcaatcaaattatcgaaattaacaccgaaactataaaatgtaaaacataatgttttcaagatgtaaacaatgagatcctaagccaacacgacggcgtaaataatcgcggcgacaagtgaaccgacgacgaaagctttgttggttaaagcgg

SEQ ID NO: 145158 - DNA, 349 bp, Arabidopsis thaliana landsberg
ctttggtgattcccagaagaagaacccagaaatcgatcgaagatatggttcacaacgcttatgattcgtttcagcttctcaaagattgtcccgctaggatcgatgctgttgaatcctacggctccaagctcttcgctggatgttatgacggttctctccgcatttactctccaccggaatcttctgcctccgatccgtcggagctgcatcaagagacttacgtgctagagaagacggtagctggattctctaagaaaccgattgtggcgatggaggttttggcttcgagagagttgcttttgtctctctctgagtcaattgcgtttcatggacttcctaatttggagac

SEQ ID NO: 145159 - DNA, 485 bp, Arabidopsis thaliana landsberg
tcttctttatcccttttggctcttattacaacttttttttttccatgtatttcctcaaattttaatattttttctttactgtatattcatcaaatctcaagttctctaatttcccattcgacctcgaaatttgaccaatttctcttgtctcaaatttcagattctcttcctctgaaaaaaatcaaaaaccaagtcttctaattccatctcctctctgtacccatctcctaaaaatctcaactttgagtcaaaattttgtcttctctcaaaccaattcatagttctaaaaatctcacctttatctcaaatttttaatctttcatctgatttctgaaacccaaattctctaatctcatctttgagccaaaaagtttcaatctttcctctgatttctgaaaccaaaaatctctaatttcaaaaaaaaaaaatctcacctttgggtcaaaaatgtcagtagcttgtggactagaatgtgtcttctgtgt

SEQ ID NO: 145160 - DNA, 145 bp, Arabidopsis thaliana landsberg
ggtttcatttttaccggtaagattttgatcctgactgtgttaacattttacctcagttcctccacttttaatgtgattctccattccatcaatgtcaaatcaacgaaacaactgctaaagcagagctttcctatattttaacata

SEQ ID NO: 145161 - DNA, 266 bp, Arabidopsis thaliana landsberg
aacaaactttttaaaaaatgtccgtttcaacacatcaccaccacgtggtcctcttcccttacatgtcaaaaggccacatcatccctctcctccaattcggtcgtctcctcctccgtcaccaccgcaaagaaccaaccatcaccgtcaccgttttcaccactcccaagaaccaacctttcatctcagacttcctctcggacacgccggagatcaaagtcatctctctcccttttccggaaaacatcaccggaatccctccggcgtcg

SEQ ID NO: 145162 - DNA, 248 bp, Arabidopsis thaliana landsberg
tcaaaagcttattttatcaactccggctctttaagattctctctctctctctctccttcaccatctgagagattgctccactatctcatagatttggtgaccagaacaacttatctcttgagtggttcaacctctatctctctctctttctgccatgaaaatgcaaagccaaatgtaatagttagagagggagaaaccaagaactgaaagaccatgactttcaacagaagcaaccttctgttctcatt

SEQ ID NO: 145163 - DNA, 179 bp, Arabidopsis thaliana landsberg
gatgaaggttcctgtgaatataatctacggaagttataaaagtggacctgatgattcaggtaaaggtcacgatgcacctttaccaccaatgataccgatgaatataaattacggaggttataaaagtggatctgatgattcaggtaaaggtcacgatacacctttaccaccaaaggtac

SEQ ID NO: 145164 - DNA, 378 bp, Arabidopsis thaliana landsberg
attgtatcagtgagagaacccaacaacctccaaattcttcctcagatctccaaaggaatccaatgaaaaacttaaactaatgttgaaacttcctccgagattcttctctgtttactcaactctcatccacattcttgcctccttcctctgctcctccgacgtcagaggcgatttcccggcgacgagattcgatctcggaacgttgactctctcaagcctcaaacttctcggcgatgctcatctcaacaacggaactattaagctcactcgtgaactctctgttcccacttccaccgtcggaaaagctctttatgggaaaccggttaaattccggcacccggaaactaaatctccggcgagtttcactacttacttctc

SEQ ID NO: 145165 - DNA, 446 bp, Arabidopsis thaliana landsberg
ctcttctgattaagaaagatcaatggaaaccaatcttcgagacgaagtttggacagatctcaaccgttcaaatcggcaatggatgcggtggaatgggaccttacaagatacattccataacgttggagccaaacacaattttgctccctcttcttcttcattccgacatggtcttcttcgttgactctggtacataataaactgtttaaatttcttcggtttggtttacagatcagtttcggtttaggtcaaaattggattgtgatttgtataggaagtgggattctgaattgggttgacgaggaagcgaagagtaccgagatcagactaggagacgtttacaggctacgtcccggttcggttttctacttacagagcaaaccggtggatatcttccttggaaccaaacttaagctttacgcaatcttctccaacaacgatgagtg

SEQ ID NO: 145166 - DNA, 313 bp, Arabidopsis thaliana landsberg
gtacaatccaaatcctctgtttttgttgtttactttttattattatgttacatctgtaaaattcgtaatcaagaacacaaacaacactcaaaatcatcagcactcataaaattgatgtaagataaacaaatcaatgaagaatcaactgggaaaaaaaggtcagattttttcacagaaaaaaagaagaaaaacaaatcacgcaaatctgttaaaagccctcctcccaattgttgcaggcatcgaaacagtagaatcaatactcaaatttccaacggatttgagggttttgtgcttctcaagcaccacagcacca

SEQ ID NO: 145167 - DNA, 57 bp, Arabidopsis thaliana landsberg
tggaagtgcagcaactgccgatagtggagatgctgttggtgccgatagtggaggtgc

SEQ ID NO: 145168 - DNA, 172 bp, Arabidopsis thaliana landsberg
ctctctaactgtatcttcttcttcttcttcaaccttcagacttttctagttgcaactctcattcaattgttcaatttctctgtaaaaatcaaagctttttggaatctttctttggcgagatatttcttcaccggcgcaagcttctcttgagcgtgattcatcactgggtttg

SEQ ID NO: 145169 - DNA, 113 bp, Arabidopsis thaliana landsberg
ataaggtgacaagcgcttaaactccgaaaatttctgaggcataatcctccgcccaaaggatagatggttaacaacatgtgacatattcatctgagaagaatcaaaggaatgag

SEQ ID NO: 145170 - DNA, 181 bp, Arabidopsis thaliana landsberg
  unsure (1)..(181): unsure at all n locations
atgagaaaacaataaaattatcactaggttatatgtttgagttgtactgtttcttacatatatatatcaacacaactcgtgggacgtagatcttgctcttacataaatatctacggcttctcctactgncatatatatattttctggctttattttctcgtccaattttgctcgcttcaat

SEQ ID NO: 145171 - DNA, 524 bp, Arabidopsis thaliana landsberg
attagagacgaacctgaacatcgacgacagttccagcttctccaaaaatctgagagagctcagaagaagtgattgtgtaaggtaaattcccaacgtaaagcctcccttcttcaccactcgcttgcgtcgtctgtttttcttcctctacttcttcttcaccttcatctccttcttcttctacctcttcttcttcttctactgatgcctggatttcatcatcggcggaactagcttcggtttcggcggcgcagaagaagcggtggcggcggatatttgagtggaggattagtggattagggcaattggcaacgagtttgaaggattttggtgtaaagcgatagaagagttgggaattggagtgggaggagagtaatggattaaaggtagcggcggaggaagcggtggctgcggcggatacagccacggcggaggaacaataagctgacgacatttttctaaagaggtttgtgcctttgccgcgtggatgaggaagagagtggataagatatactgtatgttcttct

SEQ ID NO: 145172 - DNA, 711 bp, Arabidopsis thaliana landsberg
ttacacaattcctaaataacattgcataaactttatatacataaatcttattgagacactcaaacactcacaaacaaatccacaaatactaataagtttctgcaagagcccttacaacacatacgtccagcttcgtagagcaacaatgcaatccaaaactacatccatatatagataaagaagacggtaattacgaaattgttatacttacatgaccgatcttgggtctcaattgttgaagaaaagtcgtcaaattaggaatgggaaagtttctgaacgcatccttagaaagttcatgtgacaatctctcgaacaagccagtcgagacaaggataagcgaagtagaggatgagaaacgaccgtagagccaacaagaaagtgactagaatgtacatcgccaatatggctgcactggtcggtattgcatagagtattatcagcagaaatatgacaactaatgggaactttgctgtcaactggacaaagaaaaccagagacttcctcagtgaagtttgtatgttgtcccttggaatgcgatgatcattaacagaacgtgatggttcaggttgactgcgatgatggcgattgtggagacatggagatggagtttcccttgtatgatcattgtttccatctgtttgagctccaccaggtgagttacgtctctctccattcatcctctcgaccatccaaagcacaaagtagttcttg

SEQ ID NO: 145173 - DNA, 200 bp, Arabidopsis thaliana landsberg
cgtcgacctattgaggtaacaccaagttcgatgaaactaagaaaagaagatggctaaaactagtacgtctctctgttgtttcggaattcgaagtttctcaaccctaattattacttcttgttgttgttgaagaagaagaactgaagaagtaacaatggcggatctgagacagtaagaaagaagaaagagcggcagttgct

SEQ ID NO: 145174 - DNA, 335 bp, Arabidopsis thaliana landsberg
gacacaaatatttttcttagaaaatcaaataaaaaagaacagatggagtatctatatattaataaagataacaataaataaaatcatcaaacctaaattgtttcccacgaatcagtttcgagacattggcacgttaaattgtcgatctggtaatgaagtaagctttacatgtagtagactaaagtgttaattaggacctagaccctacagatttgggcataaaccgtcctttgttatgggacgtgttctacttggtatctctagaaccgcggtctttggcagatggatcagattatatctttttgacatttgtatttatatatgttatatgttat

SEQ ID NO: 145175 - DNA, 610 bp, Arabidopsis thaliana landsberg
ggaacagaaatttcagtatcgatcttcttcttcttcttcttcgccaatttcaacactttcgaaatctgagaatcttctgtgtgaatcggaacgaaattaacggtgttacggaggctagggctgatgggcgcggcggggtccaaactcgagaaagctctcggcgaccagttcccggaaggagaacgatacttcggtttcgaaaatttcggcaacacttgttactgtaacagtgttttgcaggtcgagtcctcatttcagtttccatgtcgttttgcttttggaattagatttattgacaaaaggtttcatttttaagtaaatgtagagtgtgtatcagttcttaaaaggttttatagatgtggtagcttatggcaggactgggttgttgatcttaggtctgttttgcattctatgtttgtgcacaagtctccaggagttgaacaagtttcatccatagactaatttgtttgatgaacctttctcttttgcaggctctttatttttgtgctccgctttcgtgaacaattgcttgaacattatgcaaataataaagctgatgctgaggagaatctcttgacctgcttggctgacttattttcgcaggttattt

SEQ ID NO: 145176 - DNA, 351 bp, Arabidopsis thaliana landsberg
ggaagtcaaaactttatacatttccctttttcataagaataaagagttcctaagataatttgtctaaaaataataatccgtataactaccaaattatgcacccctaaagagtaaagactgcccttctgggtcaactatatcaaacataaaccaaaccggtttttacatcgaacgaagaagcatcaaaccggctgcaatcagataaaaagaccaaggctctgctttcaccttcaaatcctctgcatctttcaaaggtagcaacagagaacactgcaccatttgtttcacagctacattgccggatcttaccatggatatgcttgtaagtttcctaaagatatggtctttccg

SEQ ID NO: 145177 - DNA, 393 bp, Arabidopsis thaliana landsberg
tattgaatcattgtctatatttcgtcattatttggactcgattgacagataatttcatacttgaaaactaaaacaatggaaactgaaatttgatcatctctgtacaccaacaatggatatttgtttttcaacagtctgagtgaaagaacatcatttctatgtacattaaagcagagaatgaaatgcagaggaaataacaagttcaatagctagaaaaatgagagaacaacaaaagatgaagaacaataacaaaatccaagatgttttagtttttgattgttttgctctcagcgagaagaaccagaagatcttgagaagaaattgttctcaccagattgagatccagaggttgaagaagacgaagaagaagaagacgagaacaatccactaaac

SEQ ID NO: 145178 - DNA, 1401 bp, Arabidopsis thaliana landsberg
agagaaactccgataccagagcttggtggagcagtggagacgcttccacgcgaatctcgcagtcccactcgtcttcctccttccctctcttcctttgaataccttacctctctcggtctcgctccctccctcgattcaagcctattcgtcttcttacgctgtgtcttgaaaccctaatctttttcatttcaatccctaaaggtgaagtctttattgcgtgttcgtcttctctgtcttcgtttctactcttattcgtctaatttgcgatctgggttagtgtttttttcttacggattttagtgggtccgtgttagattatcgagatattgatgtaattcgaacttgtgcgccgctggaaaaactgaattttgtgtagctatgacttttccgatttctggttaggttcatgagtcattgaaaatttgttgaattgtataattgaacttgtcagaatccatctgtgtattcttatgtttttgaattctagggttatcgagagcatttcgttctttcttatacatttatgctaacatttttatataaatttctatggatctgagatgtgtcaaaggtctttgttccatgtggattagattagattctaaggtttctcctttgtttgtttaataattgattcactgtcatgtcgcgtgagttgttctgtgaagcatgttccttttggttgtcttgtaacatgtctgcacatcttttgttatttttttattttcttttatgtaatcttattaactgtatttgatttgatgcgagactttgtctcaccagtttttattcttggtatctctatacattgattctccatctgtttgctttccataacttgtcgatttggttttgtcattgtgttagttatcttgtgagtttgaatcacttttctaggcttccaagctagtgaggtacattacttcgtttgtttgatctcttttcgtttcggtatgagttccttgatttgatttaagtttcatagattagcattgtttgttgatcatgcaattccagggatgtatgaattcaacatgtttattcgaacctccctctttgtttgctatgaggttgtgaaatatcttttatagatgcatatgtaaagcattatcatgaaatagttcccaaatcagagtgtgggatgctactactaatcatgttgtatgctgaatggtgaactggaaaaatatatgtagtttccatgaagagatatctacttgtattgttacaaacttttatgtggagttcttttgctaatttgatgaggatttgtacaggtgtgattttgagattatggccaaagctaggaaggcaggacgtagggttccttcgcgacgcttcagggcaagagcgaaacaatacaaatttccatcttctaaaagcacgtgtgcgcgagaaaca

SEQ ID NO: 145179 - DNA, 283 bp, Arabidopsis thaliana landsberg
attttttttgttgttgtaaagaataataatttattcgattgaatttgtttattcgtgtctttgttttactcaatcccctgtttccggttctgttcgattcttctctgtctctgttttgtttttcgtcattttgcctaaagccacatgcaacagtgattaactgaatttttattatccatatccattttgattcgccggaaagtttattcttttccggcgacaaatgcgaaagattcgaaaacccattttaaccaaatcaattctatgacgatgtctatattca

SEQ ID NO: 145180 - DNA, 274 bp, Arabidopsis thaliana landsberg
aaacagcaaagcattttttttacaacaatgggtaagagtcataatacacaaccaaagtctcgaattcaatgtgtaaagctttttaatctcaaatgtttgacgttttagcggcaagatggatcaatgctcgtcgatgataggtagtacgaagcttcttgtatttctgcacaaatgctgctgtatcaatctccttctctaggaacttttcttgcagggcttcggattcttcatccacctgattcatagcctctgcaaaacaagtaaaaggtgttta

SEQ ID NO: 145181 - DNA, 394 bp, Arabidopsis thaliana landsberg
ctcttctaatacctgctgcaggttagccaacacaggttttgatgcttcagaagttagacaagccgagacagggcttgggctacagaagttgatgaaccgagacagggcttgtgctacagaagttggatgagccgagacagggctgggtgctgtagaagtaggacgagtcgggacaagtgtttgtacttcagaaattggacgagctgggacaggtcttggtatttcaggggttggacgagctgtgacaggtcttggtgtttcaggggttggacgagctgggacaggtcttggtatttcaggaattggacaagccgggacaggtcttggtgcttcaggagttcgactcggcgggacacgttttggtacttgagaagttgcacgagcaggcttaact

SEQ ID NO: 145182 - DNA, 55 bp, Arabidopsis thaliana landsberg
aaaaaaaactcaaaactcaaaaccatctttgtgaaaaaaaaatggaaggaagaca

SEQ ID NO: 145183 - DNA, 141 bp, Arabidopsis thaliana landsberg
ggagacgacatttttagaggcttgcattgagaaccatacaaaagcaaacctctttatggaccaagttgattttgaacctgctaagcaatggagtgctgtaagattacagaatgaagactcaacagaagatcctccaaccag

SEQ ID NO: 145184 - DNA, 337 bp, Arabidopsis thaliana landsberg
ccaagctcaccaagcagggaagttagctgaaacagaaaacaattttctcactcaactaatcgcagatatggaagaaataccctaccatgatccatcctctacatgacagtgtgtaacgaagcataaactgtggcaatgtttatgcagaaaacagtaatattagactacgaatcaccaacctggctaaggagttttggtttatcgatggttgaaaatgtgatctcgtgcatcggtctgcataaatagacaacaaagcataacataagtgctcatagaattatacttaaacatgagagaagatatgaacaaatacaaaaacacgtactgaacaacataa

SEQ ID NO: 145185 - DNA, 452 bp, Arabidopsis thaliana landsberg
attgttaactgtttcctatcaatatagtatattgcagaaccaaccacattcgtatcaatctaaaggcaagagttaaatccatgtcctcttctactctatggttacaaagttcctcacattacattccataaaataagattcaaaccacatctagattacacttaaaccatttacgatcgggaaagcttcaccaattcaaagaatatacagccgcacacatcaatagttggcttagatggcatcttgtttacttcgcaatagcgcatgctctagatgttcgaactccttcaaattgttcactacattctcaactttctttgctatctgattactatgctcttcaacaatctttgcaaaagcatctaactgttccttgtacgctgcacataaccgcttcttgtttcgcagctctatcgtcagttcttgaattctcttatccttctcgtcctata

SEQ ID NO: 145186 - DNA, 325 bp, Arabidopsis thaliana landsberg
aaaactcagaagaaagtggagtgatcatataacgacaatgaagaatctctttaacttgttccttatgtttttctttgcaatgccaattctttcactctccgagaatccaaccaatttcagcgagagttgcgaagacgggagtggagaaaccggttcaagctttggcatagggttcgatttggttcttgattttggtttataccggaatagctgccccgaagcagagtctatcgtctactcgtgggtggaaaccacggtgttagaggatccaagaatggctgcttctcttctccgtcttcatttccacgactgttttgtcaatgca

SEQ ID NO: 145187 - DNA, 485 bp, Arabidopsis thaliana landsberg
aggcatgataccaacaaaagcaaaggtagtagtcatctcactgatttgggctattctggtgttggaaagtgcaacagtgtcaagtgcagtagaagatttggtggtggaacagtgcaagcacaactgtaaacatgatatccacaacaagaagaaagagtgtgaagataagtgcaatgaactgttgatgatggagatagagaaagagacaagtggacgacaagaagaagaacacaatcccttctgtgaggcattttgcaacccctttgaaggactctttcaacattgcatggccgtttgccctcgcaccaagtccaaaccagagatgatggtcataggaggagaaggtgttgctaatgagggtttgcagacaaaatgcaacagaaaatgcctgtcttacaccgaaccagaggcctataaaaaatgcatatccggatgcttcatgtccaacgaggaagtctgtgagacatcttgcagtattcttcaag

SEQ ID NO: 145188 - DNA, 588 bp, Arabidopsis thaliana landsberg
cgaagacttcgtcgcatagactttgtagatttatcgttgagagtacctcaaacaaaaaaaaattgaaaaccaaattagggtttttaatttccaggtaaaaatcccctctttcttatcatctcccagctgctcaatgaagattttaatttcgctttctgaatttattttttctgcagattgttttgtttatttgaataaatctccgcaagtttcaattaggttgcaaaaatcgaagaaattttcttcgattcaaaaaaaatgggaaaattttgttgcttcacttccgcttctgaggtaatgattatcgaatttttggctatataacaatttctttttttttgttatgagatgaaataattgtgtcttagaagtgaaagatctgagagctttgtgttttgattgatcttattggtgtgggtttttaggttgtgggaggacaatcatcatcacgatcaggtaaaggaagaagtgatgaagggatgatcaagtatggttttagtctagtgaaaggaaaagctaaccatcccatggaagattatcatgttgctaactttatcaacatccaagaccatgaattgggtctttttg

SEQ ID NO: 145189 - DNA, 316 bp, Arabidopsis thaliana landsberg
ggagccacaatgactttagcttgctcctctaatgtgaagtttgcccatttgaattcagggttgatgttgtctctgtacatctctaggatctcgttgtggctcaccacacctgggtttgtgaagttccagattcctttcaagtttcttttcgccatctcgatggagattggtaataactcgtccaacacagtcatgctgtttgggatgttcactactttgttgtacctggagatcttggtgatgaagttgcgcgggttgtttagatccgaggagatcggcatccttaccctcaatgtgcatacgttgtcatactcct

SEQ ID NO: 145190 - DNA, 563 bp, Arabidopsis thaliana landsberg
agtcaacgatttttttcccaccaaagtccccaaatacactcgtttgcgtttaaacctttcacttgaaactctgttttagactcttttatttgttagacttttttgtttgtttcgtcgttgttgttttttgaccaaaccaccatgcgattcgtcgcgccaccgcctcgttccggcgataactcaccgtcaccttcaccatcttccggtatatccgaagagattctctcccgttcttcggatcctcctttagagtttagtcctccattgatcgccatggtggtggttctagccgccgcttttctattcgtaacttactctcgtctcatctcccgccgttttctttcacctctattccgtcgttttagaaggtggcgatgccgtcgacgccgtctccttcacttatcttcagcttcctctgcttcaacttcatcctccgatctccgatcattttcacctttccctttcgactcttttcattactcttcttactcaccttacggattagacgattccgttatcaaaactttaccgctgtttctctactccgccgctgcttgcaccgg

SEQ ID NO: 145191 - DNA, 175 bp, Arabidopsis thaliana landsberg
tttgtaaaatgattttcttttgctggaaacacattctggagatctcaagattgagaaagcttcgtagctttttcaagaacacaagaaatggccaaattcaaaacaatcctcaaaaccagtttgtaaggataaagaataaagtttagaacaatttttacattttttcaaagggtca

SEQ ID NO: 145192 - DNA, 163 bp, Arabidopsis thaliana landsberg
acaactctcttctcctctctacccagagcgagtcaccttatcgtctctctatctcctccttcctatatccccttgctctctgggtttttgctcagtgtgctacgtgagagatagagagatggaaggtctgattcaaaccagaggaattctctctttacccgcg

SEQ ID NO: 145193 - DNA, 482 bp, Arabidopsis thaliana landsberg
ttttcaaatagagattagggttttctactttcacgcttgcccacactacttttttttttgtttatatatacagtaaaaaaaaattgtgaagaaaaataaatacttacgtataggtgtatagccttttaaccaaaataaaaggacgtgatttacattttttttttttttgaaatatttcagtaaaattgttgctactaaattagtttttctgtaagacatttcaagtaggtaaagtagggcgcttaggctggctgaaaacagataaaggattgcgttagcctaacttggtctgttcatcgcgacgaggaagagcagcggcaaagctttctagaattgattcagcttgcttccaattccgtatctactagattctttcaacattgagtttctttcattaggtcagctcaaagcataaaggtgttcttcatataaaagacattaaaccagatagtaaaccataaacttaggtaacattaaatcag

SEQ ID NO: 145194 - DNA, 472 bp, Arabidopsis thaliana landsberg
cccttcccttttgggatattttcgccgcgtggattgatatgacgactctctttcgccggaagtcaatcggaatccgcgacaacttcttccttcaatccctttgatttttttttggctctacttatcccaaacccttcaaatcttcaggtccaatctcttcttctatttgttttttaattaaaaaaatccggcgaaaggtgaagctcttggattcgagtggtggctagtaatcgatttcggtagtttagaagtagtttataggttttatcagctttcgatttgatggagccgcgagtcggaaacaagtttcggctcggaaggaagatcggcggtggatcattcggagagatctatcttggtatcctctttattctgattcacctctcgtttgtggtctctgtgactgcgatgattatagaagtatttgttttacatgggtttttaggtaccaatatccaaacgatggaggaag

SEQ ID NO: 145195 - DNA, 111 bp, Arabidopsis thaliana landsberg
ctgctttcttcgatttgcttctgctttcttcgatttgcttctgctttcatcgcggttcaggtcactcttttctcagccatggcgattcctttcatggaaaccgtcgtgggt

SEQ ID NO: 145196 - DNA, 343 bp, Arabidopsis thaliana landsberg
agaatgtgagatcaacaacgattgatgcttctatcaagattgcattctacaatcccaaacaaattgtttgtattcactatacacttttagtcttaatacgtctgaacaattaaaatgatagatcctactagctcagagtgtaagtaatagtacttagttttgtcgtcacttttgatgcaagctttgtatcaatgcgtatggaccattttgcttttcaaacaatatgctagctacgatgttctgttcttgttcgcttatcgttttaataagaaacaaaagcatgacagtagcatgtttgaggtaagccaaattttcaattttgaacttgatttcagtttttaga

SEQ ID NO: 145197 - DNA, 433 bp, Arabidopsis thaliana landsberg
ggtacgacttctgtgaattcgattcgtgacttatggcctcgcgtttgctatcgacgacgacactcgtcacaccgccggcttatctcaacaaatcgccggcgtttttaacggccagagttggggtgagaagaggaagggctaacgttaaggctgtgagcaatagttcgcaaggagccgtcgatggaaccgtttacaaaggtgtttacggtccttggaccattgaccaagccgatgtcaaagaggtctcttctcttctctccttacgattcctgcccaattcacacttgggttcctcaaagttgaatccttttgatagttttaggccaatttgttcatattctcatagtcatgtagtttagaggtagctcaagttgttgatgagtacctttttctcttcaggttattttgtacagatcaggactagtaactgctg

SEQ ID NO: 145198 - DNA, 1021 bp, Arabidopsis thaliana landsberg; identical to SEQ ID NO: 7472

SEQ ID NO: 145199 - DNA, 282 bp, Arabidopsis thaliana landsberg
aaattttgtaaactcagatttactccaaaattctgtctatttttaaccatgagctaagtttaaaatctacttaagcatataattatatcaaaaatatttggctgttttaaaataaaccattacattcccagtatggcatatattggtaaagaatttgtacaagtaatcagagagattattttatttcaaggtttggtggtcatgattgtattattgagttattaatttaagtatataacatctctcatgtgattgcctaattaattattagtttcatgacac

SEQ ID NO: 145200 - DNA, 482 bp, Arabidopsis thaliana landsberg
gtggtttcaaatttctttttctcgtcagtggttacaaacttacaatttaaaaatcttatcttaagctctcctctcttctctctccaaaatctttcagagaggagagcttgataatcgttttgtctccggtttgatccggatttgtttatattctcgtctctatgcgagatcaataattttcgattacatatcggatcttctgttatcggctatgacaggtcttttctccgttttaacggaacttgatctctatctccatcgttgctcacccatcgatctcaacgttttcttccaagatctttgttgtctccatttcttcgtggattaacatcttcgtcacctccgattgctcaagacgcaagagcaaaaatggactttagactacatcaagatagatgtagtcggtggtggagtctcccgaaactggtgattccaaagaatttgtgaagcagctttaccctttaatccggtaaatgatttcg

SEQ ID NO: 145201 - DNA, 375 bp, Arabidopsis thaliana landsberg
agttgcggtagtagggtatggaacaacgatagacggaacaaagtattggattgttaagaattcatggggagaggaatggggagagaaaggatacataagaatgcagagagggattcgtcataaagaaggactttgtggtattgcaatggaagcttcttatcctctcaagaactccaacactaacccttctagactttccttggactcgcttaaggatgaactctaaattaaatctctttatattaagattaaatagacattgacaagtttgtttatgatgattgtttttttttttaaatatatttctttttcattaataggttatggttttcaatgtatgaagttgatgggaatcgtttgaattcgttaaatgaa

SEQ ID NO: 145202 - DNA, 151 bp, Arabidopsis thaliana landsberg
tttttaaggacctattttatatacacaacaataaagaattgcatgtattgttaggatgaaacataaccaaagaaaaaaaaaaaaagaggagagacttgttattattcccacattttttttttccaaatacagaggacactttctacaaaag

SEQ ID NO: 145203 - DNA, 360 bp, Arabidopsis thaliana landsberg
agttgaagttggtagctaagatctttagtcgggccaattcttcgtccactacaaggatacaagcttgttccgcatgttgccacccaaatccggtatggaggatatatgatcgtctcttgagatgggattgtgttgttcgctaaccgatctcattctccgttcacagagagtagaaagattatatatgtagagggcttttgattgttgtaattgtgcaatctttgattattttcttggtcattgtaaaataatccagcttttgagatatttacttgattaacttaaaaaccatattgtaaacaagaaagaaaaaaccagaatttatcggtcataccgccatggaaaaataaatcatatttt

SEQ ID NO: 145204 - DNA, 1002 bp, Arabidopsis thaliana landsberg
ctcaaaaccaaaatcactaaaagaggagaagattgctaaagtttgataaaacattcaaaaatcaatggctgataggatcaaaggtccatggagtcctgaagaagacgagcagcttcgtaggcttgttgttaaatacggtccaagaaactggacagtgattagcaaatctattcccggtagatcggggaaatcgtgtcgtttacggtggtgcaaccagctttcgccgcaagttgagcatcggccgttttcggctgaggaagacgagacgatcgcacgtgctcacgctcagttcggtaataaatgggcgacgattgctcgtcttctcaacggtcgtacggacaacgccgtgaagaatcactggaactcgacgctcaagaggaaatgcggcggttacgaccatcggggttacgatggttcggaggatcatcggccggttaagagatcggtgagtgcgggatctccacctgttgttactgggctttacatgagcccaggaagcccaactggatctgatgtcagtgattcaagtactatcccgatattaccttccgttgagcttttcaagcctgtgcctagacctggtgctgttgtgctaccgcttcctatcgaaacgtcgtcttcttccgatgatccaccgacttcgttaagcttgtcacttcctggtgccgacgtaagcgaggagtcaaaccgtagccacgagtcaacgaatatcaacaacaccacttcgagccgccacaaccacaacaatacggtgtcgtttatgccgtttagtggtgggtttagaggtgcgattgaggaaatggggaagtcttttcccggtaacggaggcgagtttatggcggtggtgcaagagatgattaaggcggaagtgaggagttacatgacggagatgcaacggaacaatggtggcggattcgtcggaggattcattgataatggcatgattccgatgagtcaaactggacccgggagaatcgagtagccaaagtgagtaaatataaa

SEQ ID NO: 145205 - DNA, 452 bp, Arabidopsis thaliana landsberg
ttgttacatacacacatgttcctcgttctcgaatctccacgaccaacgaaccaactgggtcccaaaagtataaggcacggaatatttcgggcgaaattgtcacaaaacgaaactactggggtaagttaaagtaaaataaaaacataaggtcacgttcgctaagtcttttttcttctcctctttatgacgacgtatctaccgccgcaactccgccgctagtttccacgccgatgcagcgattagaggtttcgtttgccacgcaagcattaggcttccgtcgttctcctccactctgtatccatctccaccgccagataacgccaatagcaaactcgcttgcttaaacgcgtctgatccgaggttaaccgggtcaaacccggcggatcccatacgttttcgccactgagccagcgtctcgtgtcgctcgatcctatcgcttccttccgtcgcca

SEQ ID NO: 145206 - DNA, 92 bp, Arabidopsis thaliana landsberg
caaaaacactttccttttcctctcatcaagaaactccctaatccgacgtcgttcgttttaattcagtgacacaatcttccacatcttcaaac

SEQ ID NO: 145207 - DNA, 1122 bp, Arabidopsis thaliana landsberg
cgccataactctctctctctctctcccacttcccacagatagaaacattcatgccagcaatgccaggtctcgtctcagtcaaaactccttccgatacaccgccgctacgtgtagccgtaccagacacgcaacctctctcaaacccgccgcgaactccgatgaagaaaaccccttcctctacaccatctcgatccaaaccatcaccaaatagatccaccggcaaaaaagattcaccaaccgtatcctcctccaccgcagccgtaatcgacgtcgacgatccatctctagataatccagatctcggtcctttccttctcaaattagctcgtgacgctattgcttctggtgaaggtcctaacaaagcattagattacgcgatccgagcaactaagtcctttgagagatgttgcgccgccgttgctccgcctattcccggtggtagcgatggtggacctgttcttgatctcgctatgagccttcatgttctcgctgctatttactgtagtctcggtcgattcgatgaagcagtaccacctcttgaacgagctattcaagtccctgatccgactcgtggtcctgaccactctctcgctgcgttttctggtcatatgcaacttggtgatacgttgtctatgcttggtcagattgatagatctattgcttgttatgaagaaggtcttaagatccagatccagactttgggtgatactgatccacgagttggtgaaacttgcaggttctcttaactaagcatttaatggttaattaaactcttagattacgtttgctaaaagttactatataggttagatctaagtttctgaagtctctgataattttcaggtacttagcagaagcatatgttcaagcaatgcaattcaataaagcggaagagttatgcaagaagactctagagattcacagagcgcatagtgaacctgcttcactggaggaagcagctgataggaggttgatggcaattatctgtgaagctaaaggagattatgaaaacgctcttgagcatcttgttcttgctagtatggctatgattgcaagtggacaagagtctgaggtagcatccactgatgttagtattgggaacatttacatgtcacaatgata

SEQ ID NO: 145208 - DNA, 686 bp, Arabidopsis thaliana landsberg
gaaactgatacgggcttttaataggctagtgtgtcggtataggcccattagtaaacagaagaagcttttaatcaatcctcttgcggagaaactttgggaagagccgaagagaagtcgaggtctctctatctctctctttcgtacacttcgcgcttctcttcctgtaatctctaattccacactcactacatttatgtacttttttctgtatctatacgctttgtgtatgatgttttgtatattgttgcttctcttgctttacttgtttggtttgggatttcttctctgttttttcttggtgaattttgcgtttcgcttaaaaatgagtgaaattgatttggtgaaattaggtcagaggcgtttctcatggctcctcttactctctccgttgatgtgaagagctcttcagcgacctctcatggtaaattctctctgtctgtcttcattattgactgtgaatttttttcgcgtattggttatgaaaagagatgtatttgataaatgctattgttttcgcagatgtttcgaagagggtaatgcagagttcacagctcaaaataaacaaaggcttttttgcatctgttaatacacaagaagataaaccctttgatttcttccgcactctctttggtttgtgtatattttgtcttttggttcatttgcaactattattttatgaatctcat

SEQ ID NO: 145209 - DNA, 212 bp, Arabidopsis thaliana landsberg
gtctcaagactccaaagacaagaaagatgcattcagaaagaaacaccagtgcggaaaatttattcagagagaaaaaatccgatagaatcacacaataaagaacatatatagcaatgaagcgctaagtagctaacagacactagacaatcctattgatctatcccgttaaccagaaacaacaaaacaggcacaataagcagatgtccccgaga

SEQ ID NO: 145210 - DNA, 712 bp, Arabidopsis thaliana landsberg
cttaagatcagcggatctggagacaagctggccaaatctttaatccaacatcctccaaccaaggtaccttcaattttgagtttaaattctccgttattctctttatttgcatcatataacaaacctgacaccaaatatttattacaatctcgaatcggcctttatttttgagcatggaaatagttgcctcattttcaaattgactgttataatacattattcacaaagtacttctaccaaagtattcgtaggaccttaaattgtctaatcgaacggttccatggcagtttgttatattctccactttatctatctactgttgtttgatgtttgtactttttctgtaagaattctcattggaagaaattgtacccagttttatgattacgtaaagaaatatcagtagtgaatttttgacctattctagaaaatagcgctgtagtatttagtctctcgtatgggttttacgatttggatttatcacggctgcattcattagcaagagctatggctagagtagctagctcctggagaagtaatacgagtatcgaaggtctctgatttttgatatgatggcgtttggactcgattcgagcctgcagtttcgattgatatatactctgttgttgtatcatttcgtacagtagttttttttagacttttgcattctgatgggatctttcaaatttaataagtcagtttcagtttatgc

SEQ ID NO: 145211 - DNA, 376 bp, Arabidopsis thaliana landsberg
atggtctcttctttgtagctgcaattgcaaagaacactgagagagagagagagtgtgtgtgtgacctttgagagatggaggaaaaacgacgcgattctgctggaaccctagcttttgctggtagctctggagattctccggcatctgagccgatgccggcgccacggcgacgcggcggaggtttgaaaaggaaagcgaatgctcttgggggttctaatttcttctcttctgcgccgtcgaagaggatgttgacgcgtgagaaggcgatgcttgcttctttttctccggtacataatgggcctttaactagagctcgtcaggcgccgagtattatgccctcggcggcggatggggttaagtcggaggttttgaatgt

SEQ ID NO: 145212 - DNA, 219 bp, Arabidopsis thaliana landsberg
tttcgttttgttatcgttctggttttaatcaaacctaggaaaaaagctaatgtagagcatccaagagagcgtaagtctgttagatgtggttgtgatggtaagttgtatttgactaaagaagttgttgatggtgttagtcattggtatgtttcacagtttagtaatgttcataatcatgagcttttggaagatgatcaagttaggttgcttcctgcttat

SEQ ID NO: 145213 - DNA, 1222 bp, Arabidopsis thaliana landsberg
cgattttaaaggcttagctttgttcctctgtcgccttggagaatctccagaagcgtatcatgtggccttcgtctcgaaactcttcgcagcctcaagctatggtattgatttcgacttattttccgtcttttctgttgataatttgttcttagttttgttgcttcttttttgtcaaaatttatctcgggctgaggaattgagtctagtttgatcaaaacttccgaatggcatcagttggctagtgaattggaaaacttgaaactaaacaaattacaaattctgagctctttcttcttttggttattgatgtaagatcagttaagctcaaagagtcaaagtctgattctttcttaatagtgtactgtgctttaagtgtaagtgtttggctttatagtgcacaagtttcttatatgtatgtctatggttgatttggcaaataaaattgagagatttgtggtgtaaatttgaatgtttgcctctcagttctcaccacccaaacgagaatttatcatgtttttgtctctaaaatcttactgagactgcaacaaacgagcttatttactcggttgtttcggtcatgttctgaaattttcttgtagcttactaaaccagcattcttgttggacagttaaaaatgtatcattgttttttttttccggtgaatatgatcagagacaagaaaagaagtcgatatctgtgagttttagagcagagaatctcataccaggggttgtgataggattcatcataggtatgatattggatttatcacagcaagtgacctccccagtgaaaaggagcagacttttatccagcaaggtccagaagcagagttctgtaccaggcaatggcaaggaccaagagcttaaaatggtttgtctatcatctagtgtaacgatagtctcttgtctctgcccctagattttattggtttggagtaaaatattataacttaaatccttataacaaaacctagtgataatgcaagctgatttatgttccaaacccatcaaatgattgaaattttagcttcataaaagagacttgcataatctatacaaggatggtgatgagttttcaatgatgtcagatttttagattacaagttaaaatcagaacatttgtgtaactaatttgagcttgttctgatcacaggtaatggtagttaggcaagacttgaagatgagaacgggcaaaattgcgtcacagtgtgcacgtagat

SEQ ID NO: 145214 - DNA, 419 bp, Arabidopsis thaliana landsberg
tttactaatattctgtctcagcttatcatttaccaaactagctttttctcattcatttatgatcacatcacgtccacattaaaataaaacaaaaaagggatcaattatcacaaaaacaattcctctagaaaattattcttttgaggaatatattacaaaaaccagaagtgttggcatctctcaagaagtaaaaaaaaaactcgagagagacacacaactcaacaattacaagtctgttgtataaatggaagatgatatacacttagctgggtgaattcttcctgcaaaatttgggaataaatgtacactcacaagatggtgttgatgtgaagtgctttgaggagagatgttgccatttgcttcaccagaacttggcctcctgaacgttgtccatcacgtcgttcttctatcagattctg

SEQ ID NO: 145215 - DNA, 179 bp, Arabidopsis thaliana landsberg
atatacaataatccatagcaaaatagaaacaagaataaatgttgagaatactctgaagaaatacgagattctaaggatgaaacagagaatgttgatagggaagtttcgacacattaaaaagattttgactaataaaaatcataattcaaagacaagaaacaaaggtgcttgctcctcct

SEQ ID NO: 145216 - DNA, 683 bp, Arabidopsis thaliana landsberg
acattctaaatgtaactggaggtgaagatgaagtaagagcaaacaattggtagtcggaaacaatcagattgaaaacacactcatggcataagcaatgaaatcacaaaagcattccataaattacactggttccgggatacacaacaaacaaacagaagcagagcaaaaaaaagacggctttaccaaaagaaacaaagagcaatcattctctacgccggctgctgagactccaagggaaggccaaggagttcatctcctccggcttcggctttcctggcggcccttgcgatgacaggaagcgccacaaatgatttagtcttactgatgggtctgctcttttccagtctgaccacgtcgccaaccttgaactgattatcggggtcgtgagcttggtacttcttcttcatcctcacgcgcctcttgtacttggggtggggagccagcctaaccacctccaccgccacagtcttgtcactggttgcgcacaccacgcgcccctgcatcgttttcatggctctgatgaccggaactaaagcgggcattctgtggttcgggaaggaattgggcttagagagagatgagagaggagtggagccatgggcgaacggagacgaaagcttgagagcttgcagagatgaggttagggacgacgttatcatccttccgatttggaatcgaatcga

SEQ ID NO: 145217 - DNA, 253 bp, Arabidopsis thaliana landsberg
aagaaaggcttctatcccattgtttatcgatcgatcccttcgatcttgtcttccactctgcgagtacaattccttgagcttctctatgttgtgcagcggaagtgtcccagtagccacgaccattggcctccaagaaagtctgaagcattttcctgaaggagttgggattggtgttcatgagacggttcagcatctcctcgtcttggatgaaagttgagttggcctcctcgtagacccaattgtctacttgacc

SEQ ID NO: 145218 - DNA, 1078 bp, Arabidopsis thaliana landsberg
gagacataaaaagtaattagtgagagaattaagaaaaacaaagtctattccatacgaagaagagcctcaggtaaaaaacttcatcataacaagttcgttttagataatttagaggttagaattcgtttttttgttgttctgctcgttattgggtttgcttgatattcttgtgattctagagattctacataacacgtataaattaaaaaagacaaaggcttgtgattaaatttatgttataatttataatctatagtctatataggtagatgtatttatatgtataaaaacgaaggttcatcgatgatcctgccttgtttttagtctattaggttaagtagttaagatcgcttgttttcgttaagtttatgtaaaattaccgcgaaccatatatatagaaaacttctaataatgttttttacttttggtggcaggttaattttttaaaagatgggttattggaagtcgaaggttgttccaaggatgaagaaattgttcgagaagagtccagcaaaaaaggaagttgttgaggaggagaagccacgagaggtggaagtcgtggaggaggtcgtcgtgaaaaccgaagaaccggccaaggaaggagaaactaaaccggaggaaataattgcaaccggcgagaaagagatagaaatagttgaagagaagaaagaagaggctaaaccggtggaggttccggtcctcgcagctgcggaggagaagaagccagccgtagaagaggagaagaagacggcgccggtggaagagaagaagccagctgtggaagaggagaagaagcctgccgtggaagagaagaaacctgtggaggaggagaaaaaagaagttgttgccgctgttccggtggctgaaactccttcgactaaggctcccgaaactccggtggttgaaactccggccaaggctccggaaactccggcggctgcgccacaaaaggcttgaattttcttcatggtacatttttctaaaaaaatattgattgtctttgtgtggataatttattttctttgtttaaatgtcttattatccatgtgaatttcctctataaattaatttgcgtgct

SEQ ID NO: 145219 - DNA, 373 bp, Arabidopsis thaliana landsberg
gcttctttttatgagatcgcttctcgctctcgagatcttctatgcgagcatgtgcttcctccagttctgcttcaagggaagaaaccaatgacacagcattcacttgctgatcaatacgcttcatgttgctatatatttggtgtacttcctccattgtatccaagcagacaggatcccattttgtcgccccctccattgctgagtggggaaatggcattgaaggttcgagctgacaagaaagcaatagaagacttgaggtcaagaaaccataaaaaattgattacaaaacataagatcaacaacaagaaggaccttcaaggactaggacaagaatatctcagtcaagagttatattgagaattacagcttttat

SEQ ID NO: 145220 - DNA, 81 bp, Arabidopsis thaliana landsberg
tttcactaatgatcaagttgtactttttatatatttcattgataccttgttgatgtaattcaatattttaggtctgttttg

SEQ ID NO: 145221 - DNA, 644 bp, Arabidopsis thaliana landsberg
ctccgggactgagaccgctctctcttccttatcctccatcttccaatggtttaatccagcaactgtcgacgatgtcgataacgtactccgctatttcctgtaagtttcttcctcactgtgtgtcgaatccgtcctcaatgctcaattttatccatttattgtgagactgtgattgattttggtttccgttgttttatccagctagtacagtttctgggttttcaccaaaaagtgtaccttttgctattcatagcgtaaccaggaggcaatttcttaatcccaacacgttttatagatttgggttctctccttctcttcaggtcagattcctttactagtcagtatcatccaattctccagactctgcttcgttgttgttttggttcttagaattagaccacacttcgttgcttccctttgaagtagagagtcaatgtttactgatatgtgcggatatgttgtgcagggaagtagcattgagtttagccttcagttgaattcaagagttgtgcttagtaaagagcgtcgatctctgccattagttgtgagaaatgatccgccccagaatgaagacttacctaagcagtacacaaggcgagagaagaaacctttcccagtccctattgtggacctgagacgagctg

SEQ ID NO: 145222 - DNA, 301 bp, Arabidopsis thaliana landsberg
taaaatataatataagaaggccaagagttctaaacaaaagaggcagaaccaaaaaagcaaaagccataaatatatctaagcgtttgatccaaatgcttcagatatctttgatagcacttcaaaaagaaaaccatgcttctgcaaaaagaactcaaattccctagcttgcatcgctttccactgctcgtaaaatctcttcatatcctttgaggcaagcttactcaatccttgttgagcagtaagttcatccatgccaagacccactatcgatctaacaagagaaaactttgtaaaagagact

SEQ ID NO: 145223 - DNA, 110 bp, Arabidopsis thaliana landsberg
gacgctcttgttgacgtggcatataatgagagccagtcaatagaagaacctgaatcttttaccaaaaggtccaagacaaggaaaataaaaactttaatttagagttttag

SEQ ID NO: 145224 - DNA, 124 bp, Arabidopsis thaliana landsberg
ataatacagttatttttttcgtagttgtgggactttctaactatttcgtcttcttttttagtgggtttttgttttttccttttgtaattttagttgtcctctccattttaagcttgaaagtttt

SEQ ID NO: 145225 - DNA, 1277 bp, Arabidopsis thaliana landsberg; identical to SEQ ID NO: 38605

SEQ ID NO: 145226 - DNA, 220 bp, Arabidopsis thaliana landsberg
gagattgggaagcaagccagaagaaaatgcaacggaagaagaatcaaactgaaggaaataatactatgattttaagacacacatagactttttaatactagtgaagagagttttattgagagaagctctacttcatgttttgctgcttagacataagcaggctacttacatatacaagaggctaagaatacgagaccttttgctagtaatgtgaagagag

SEQ ID NO: 145227 - DNA, 193 bp, Arabidopsis thaliana landsberg
ggtcttgtcccgacagcgagggcgtgtaagctcacgtgcgtggaccgaggagtgcacctgctgtgtcacgacggtggcggctgcgctgcgagtcgtccgtaattaacatcaccaattagaccaaaaacattcaattcaacagaacacaatctcaatgtgacgtttataagattatgtaattgatcaacatggc

SEQ ID NO: 145228 - DNA, 404 bp, Arabidopsis thaliana landsberg
cctcttcctctgctccactcattctcctccaccgtcgccacaaaatccaccgcctctagaatcactgccacgccgtcgaaaatccgcttctctgtcataaacgccacgtcggagaatggaaacagcggtggtagtaaaaacgatcgtgatgaggatccatcttttaacccatttggtttcgttacagacaatccgtctagccggagtgcaattcagttaccagagtctccggcggaagacggtaatgtcggccaaatgctctacgtaagtttcacatatttactcagttcaattttgaactgtgattgaaattgaaaagatgcatggttcatatttgcttctactgatttcaaattccattttttatcatagtgttatatttttgttgattgttatgttgtggg

SEQ ID NO: 145229 - DNA, 769 bp, Arabidopsis thaliana landsberg
atctggtgttcttctcgtgcttgcggattcctccgaattgtttcttcacaggttggttttttttattcgatttcagtttggagtgaatcttctctctattctatagattgtttcttcgatttcaatcgtttggtttttgaatagaaaaccaaagagaagatgattttacttggttccattgttcttaggttttgagaaaaatcttacgtatttaacatagtgtttcaaatacacagaatctcgaaattgattccgatttatgaggtcatgaatctacaatttcctacctcctgttttagggtttgaacagattaggtttaatattgaagtgaatttgcatcaaattagggaaattttcattgaatccagttaagttcttgtttgcatcaacttgtagtgttatatagtttagctacaaatttgcatcaaattagggatttttcattgaacccagttaagatttttatttacatcatcgtaatgtgtgagctttgttgttatttggtgcttcttgtgcctcttttgctattattcttaaatctcaatgagagaagagtttattttgcagtttattggcgtttctgttggataactttattggcgtttctgttggtttattttgcagtttcttaacgcttggaagtatggttagtgagagaagagtgcatccggattgtataaacgcttcaaatccttatcacgagtgtgtcgagtattgctttaagaaaatcgctgaagcaaaggccagattcgagaagcagaacactgg

SEQ ID NO: 145230 - DNA, 821 bp, Arabidopsis thaliana landsberg
  unsure (1)..(821): unsure at all n locations
cttttttcgcggcgtttgatgcactgtgtgaagaagggatagcaacctcggtctgtagagctcttgatgaagtagctgatatatcagtcccaggtaaagtctttcttatttttgtattcacttttgctttttggaggattcatattagttattcatagaactgaacttgattaaattcattcgacgaattatttcttggacgaaaataagcagcctcaaaggaccatgttaaggtgcagggtgagatattagagggtcttgttgctcgtatcgtgagcagtcagagctcaagagatatggaaaatgtcttgagagatcatcctccaccaccctgtgatggaggtgcactatttatcatattttaattttacttaagttttcatgataatccactctatcaagtccgtgtagaataaaaaatgttatccctggattttaaaatttcagctaatcttgatctgggactcagtctaagagagatatgtgctgcccatagatctaacgagaaacaggttctaaaagaaatttaaatatgacaagctttataaagtggaatttttatgctgnnnnnnnnnnnnnnnnnnnnnnnnntctagagggtccttgacccttgcttgtggagctatagcaaatgagagcacttttaaggagtgttgggccaagcttttgccccagtgacgtggaatggttcggagatgaatctcatccgaaaagtgctgacaaatctgttataacaaaattcctgcaatctcagcctgcagattattcaactagtaaattacaggtaaattgagatactgtgtcttcgttgatttcgaatc

SEQ ID NO: 145231 - DNA, 171 bp, Arabidopsis thaliana landsberg
ctaataacgtgaatctgttgtgcacgatgctttatcatctccgtaagttttatttgtttatatatcaacttgttgatgacaatactgcgaagactaaccaggtgagacagtcaggagaagctaaagttaaaaaactagccgctaaatatgaagagatcgtgaagcaggttt

SEQ ID NO: 145232 - DNA, 255 bp, Arabidopsis thaliana landsberg
gcggcggttccaccgtcggattggcagcatcttcgccgttggaggtctcgttggggtccttgggagcagtgaggtcgagcttcacgcgcgtgtcacgcgccttcgatcggtcaaggaaaggttgagtcgagatggattgggctccacgacagatctcggcccatgagctcataaaatgccacgtggatgtcccgtctaagactgcgtgattgaaagctaggcccattgcaagcccatcttttagcttggtcacct

SEQ ID NO: 145233 - DNA, 845 bp, Arabidopsis thaliana landsberg
aaaaccaaaattttattttatcttccattttttttttccccgaaattctcgacggtgttttccggcgattcattctcgatgcctgaatcgccgattacctgaattcactgaaaccctaaaaccctaaagttactgtagttattaaagctgtgttcttgattccaaatctttgcctaaagattcgtgctttttgtttacttccgatttgatctactcaatctctggaggaagaagaagtttcagagatctatttttgaagctgtgtttgtaattttccccaatttatcagtaagatcgctaacttcgattctcagtttatttcatttattgaaattttaggtttttggtttttgtcattgttgtttattgaagaaattagtaaactttgagttgggatttaaagtttaatccttttgagttgggttttgtcttatgaagtttatagcttgaatctgactttttggtgaaatttgttcaaaatggagataaaattaagctactttttgactatctaaatctagttttgtataattctctatgtctttgtgatataaagttagcgattttgtcaaaaaaaattctgaacttggagattctagatctcgaatcttaggatggttgttgtaagttagtaagtatgggtttgtttgagtatgtgtggttggttaggtattggtttgcatttgtagtgactcaaaaagaattaatgttgttcttgtgaatgtttgtttgcagataatgatgatcttttggtgcttgaatatggaatgcttgcgggaacggtgttagtttccttttgtagagctgtcatatattgtgttggtttttttctacatggaagcttc

SEQ ID NO: 145234 - DNA, 164 bp, Arabidopsis thaliana landsberg
tcttaatcttctctatgttgattatactcaaagaggtcttctcttccccaaacccgacccggaaacccatttcatctctcgattaagaacctctctttcttctgctctagatatttacttacccttcgctggtggtcttaacaaagttgaaaatcatgaagacg

SEQ ID NO: 145235 - DNA, 77 bp, Arabidopsis thaliana landsberg
cagaactcaaactcacgaaaaataactgaaaggagaagctacacatcacatgaaacttctcatatgagacatgatga

SEQ ID NO: 145236 - DNA, 560 bp, Arabidopsis thaliana landsberg
ctcctatctttctctcactctaacctcgcaaagaaaaaaccatcttactttctttttttttctctgaaaaacctcttttgattaggtttaaagatggcatcaaaaaaagcaagaaaaccaaaccgagccgaaaagaaactcacaagaagctgtttcaagaaacaagttcctcaacacaacaacatcaacacaagtataactctcgatcaaacatctacatctactattgtctctacatgttcttcttcatcaacgaatttgtcttctcctctagacacaatctactctgttccctctccatccccagcagcggtgctgacgtcaccaggcggttgttgtaccccgaaagccaagaagtctaggataccggagatgctgacgtgtccaccggcgccgaagaagcaaagggtctcgaaaaactgtgtgttacgacggagacagatcgttttctttgctccgccggagatagagctcttcttcgtcaacgcacacgatcgatgaacgtacttttagttaattattagtatctttctttttttgatataggatcaatacagaaa

SEQ ID NO: 145237 - DNA, 621 bp, Arabidopsis thaliana landsberg
gttctttttccccagtcggtacagattgagagaagagattacaagatccatgtaagaaaacacatctcagaaattgatttctattcacaaaaaaagctactctttcaaaacctagaaagttaatttcacattctcagtcagaaaaatggtcctgattgatagtactttttatgtatatgggtcaaatttggtttctttagaaaatgcattggactaatgttgaccaaagttataatctttgcatgttgtttcttcaaagttcattttttgtttaatatatacattggaataaggatgaaaaattaacattttgttttgtctgttacaaatatttctccgctgatttgaagctgaggaattgaattaaggaatattttggcatattctttgaaaacctctctttctctggttctttctaagatactttgcttttgttgtataaaaaaagagtaactagaataccacatagcacggtacttatgattcaaaaacttatctgatgctaattagtcggctcaatccatatttatgaatctctctgatgttttttctgtgatactcatgaaacagattgaagatgaagaaacatcataaccgtagaatgctgaagacaagagcaat

SEQ ID NO: 145238 - DNA, 78 bp, Arabidopsis thaliana landsberg
aggataatcaccgtttgttcgctcagaatcccgtcgatgttacctctcttcgcccttccgatctggaagaattcgtca

SEQ ID NO: 145239 - DNA, 249 bp, Arabidopsis thaliana landsberg
aactaaatccaattgaccgaataaaatccagtaaaccgatccataaaccaaaattggaagaaaacaatgcctgtttaataggtgttgaaactttgctgaaaaaaaacgaagcgagcaccctctaaaatgccttcgatttctctggcgccattgatttagttttctctctctgactacaaagtatccattcgttcaaaccagtttcttcccattttcgatttctgtcaaattcaccaccaactccaaaac

SEQ ID NO: 145240 - DNA, 61 bp, Arabidopsis thaliana landsberg
gatttatattcctcttaaaaaataatttatttccttcctaagaagaaatattagatttatt

SEQ ID NO: 145241 - DNA, 152 bp, Arabidopsis thaliana landsberg
tggaaccaattgcctctataactgatagatttcgttaacaaccgttttgaagaaacaatacattccgaagtactttaaaaagcagaagaaaatgattcattcagaatacaaaaaaccttcgtcctgaatagcgggaaactggcaggtacatt

SEQ ID NO: 145242 - DNA, 239 bp, Arabidopsis thaliana landsberg
aatccaaatgagactttattagcttttgatcaatctcattaatccaaattaaatagttaaactagaagatgaacagcaaaagggcatcacaatatcaccaagtagaaatccctccaccacaacctttcttgaaatcactaaagaacacttttaatgagatccttttcgccgacgatccgttccgtagaatcaggaacgaatcgaaaacgtcgaaaaagatcgagttagggttgagacac

SEQ ID NO: 145243 - DNA, 170 bp, Arabidopsis thaliana landsberg
actgttcgctctttcctacgccatctgcgtccttgccgggtaagaacatctttcgattccttcagaaatgtgtggaaaatgtgaatgcttagaaaatctgtgttgtgaaatttaggaagagttactacgatgtgttgcaagtcccgaaaggtgcatctgatgaacagatc

SEQ ID NO: 145244 - DNA, 427 bp, Arabidopsis thaliana landsberg
attgtggtaataagaatatatatatgaatttcaagttccaagagaaaccattacacacgagattccaatatgagcagagagtaagaagaagaagaagagagttaccacaatgaaaacactcaggagagacatcatgatacaataggcagaacacaacaatcaatggtttgctgctaaacaacttgagaaatcaatttttttctgactatgacactgcagaggagacaccaacacatcttgaagcacagatactatcactcctcattagacatgcagaccgtttaaccggagttgatgctttgtctacttgtgacgccttctgtgatgataagccagttgctgtgtttggagtctgtggaggtgtaaacaccactgaagctgaagacgattgagcatgaactgaatcagaaccttcgtcttctgatga

SEQ ID NO: 145245 - DNA, 527 bp, Arabidopsis thaliana landsberg
accaatacaacaacaatggattcacttccctctctttcaccaaaccattccccactcctctcttgatcgaaaaacaatccattcaccggacccaactcgaagctttagactctgtcattacagacctcgaaacctccgctcaaaaaggcatctcattaaccgaaccagagatcttcgcttctcttctcgagacctgctacagcttaagaactattgaccatggcgttagagttcatcaccttatacctccctatctcttgcggaacaacctggggatttcatcgaagcttgttagactctacgcctcttgtggctacgcggaagttgcacacgaggtgttcgatcgaatgtctaagagagactcatcgccttttgcttggaactctcttatctcaggctacgctgaattgggtcagtacgaagacgccatggctctttactttcagatggctgaagacggcgtgaaaccagaccggttcacatttccacgtgttttaaaggcttgtggaggaattgggtctgttcaa

SEQ ID NO: 145246 - DNA, 662 bp, Arabidopsis thaliana landsberg
cacattttcacttgttaaaattttgttactttgctctatctgaaaccaaagctgccatctttctccttttgggttttgattagatctccgattttgggtttctatatattatgcgagctcacttttgttcgttctgattatctgacaatgatattctccaagcttggttcttccctcgctcgatcctcacgttctaaggttcgtttcgttgtgatgctttttttccgacgcttgttaattttgtgtttaattcctatttttttcaattttccggtgaaattagggatttgtgtacggcggtggtgtgagatcggcggtatttaaccaagggaggttacgagcgccgcagaatctcgaggcggccgtcaatcaggtggatggtggattagggtttttgaggcggcactttgcttcttttgctgctcgaaagggactagaagccggtgatttaagccgctctttcgctaaccctagattgcgtcggttcttttctagtcaaaccccaaagaagaagagtatgtagcaaaccctaaatttttatacggatcaaattaggtgttcacagtaatttgagagagaattggaagcctaaattgcttttcttttgcagattatgagaactactatccaaaagacagtaagaaagcacccaagaatgagca

SEQ ID NO: 145247 - DNA, 396 bp, Arabidopsis thaliana landsberg
attatcaagattccaatttctgagctaatcaacaccccgacacaacaaggaaggcttctttagagctttgatcgtagtgtgcatgtgtgtgtatgtatattgtcgtaacgtatgataaaagcatatagcatatgtgtctcaacgagaggatttcatattacaaacttttgcatcaatctttattttagactcctaaggccaacattgccagcaaggaaagaccgagatttgcagcgttggcaacggttcctgaagcaggaggaggatgtgactgagctcctccagttgcattggaggcagccaagtttgcaactggaggcagaggcggatcaatcacgtctttggcctcaagaggcgggtttggggcactagctggtggttgtgcttccttgtctg

SEQ ID NO: 145248 - DNA, 585 bp, Arabidopsis thaliana landsberg; identical to SEQ ID NO: 18078

SEQ ID NO: 145249 - DNA, 789 bp, Arabidopsis thaliana landsberg
caacctccttcggctccggccccggcatcgtcgtcgtcccaactcccgccacaacagttcccaccaccgacttccccggtaccaccatcacttccaactccaccttcattatcatcggacctccaccaccgttcccagctcctccccggagcatcgaccttactcctctcaaactaatcttcgtcgtcatcgccttcgtcgccgttcccgctttagtttacgctctcttcttcaacggcccatgttcttcctcccgccgcaactcctcttcttccgcgcaccagctcttcctccgacgatacacctcacgccaccgtcgacaccccgccgatcaccgagaccaccgtaacttcggaatccggagggaaattccacaaagatacacattctaaagagattggaaacgagtgctccgtgtgtctcatggtgttcacgacagcgatgaactccggaactaagcgagtgtaacacgcgtccacgtgttatgtattgagacgtggcttaaggatcatcctaattgtcccatttgtcgaactgacgtctccgttaaacaacaaaccgaagctcccaacgttcccgttaacgttaacggaaacgtgaatcgcagcggcggaaaccgtcgcgtttcggccactagtagagatgacgattggcgtcaaggtttacctgatgcttctagtttagtttgaattttttatttaataaaatttatttctctgtttttttccacagatttttaaagatattttgtaaacaaattacgtcaatttcgaaaaaattatgtccgtt

SEQ ID NO: 145250 - DNA, 171 bp, Arabidopsis thaliana landsberg
aagaggaagaaacagaggaaggatctgtgaatccgaaggtgaagaagactaagaaagtctctgatcttttgtatcctcgtagcaaatcttacgccgttactactagtacccctatcttgtaacttctcttcttcttttttcttcttcttaattttagtattttgtggattg

SEQ ID NO: 145251 - DNA, 290 bp, Arabidopsis thaliana landsberg
ggtaagtcctattgctagtcctagtataagccagaccgcttcttcatcttcttctccatggaagcaacgctccttgttgcccccttctcctcaaggtccaaaagaagagatcatggatgtgttgaagaagcttgaagccgagataacggaaacaaagacagaggtgaagatgttgaaggagagagaatcagagacagaggttgctttggctactttaaacgcagagctacataagaacatgtcaaagatagcgaaagccgaagctgctgctgcagggaagagcgcggcag

SEQ ID NO: 145252 - DNA, 176 bp, Arabidopsis thaliana landsberg
ggtttatgatcggtatcagaatcatataaaaagattatacaatgtttatatctaaaactctagctatctctatccaaggtaacatgatgtagtcatgtacagctaagacctaagggatactccaaaatatagtagagactctaaccacataaatagtcacatgaattacatgttct

SEQ ID NO: 145253 - DNA, 367 bp, Arabidopsis thaliana landsberg
cgaaaacatagttagttccaaaccaattctacaacaaaaacaaaagagagaaaatgtctttttcaggttatagcttcatcgtactaacattattgtccatcgtcttaactcaaatctatggtttgagaagctttagccgaatggacgatctccaaccggcagaaacactagcggttcacaaccagattcgagctgcggtcggggttgctccattggtgtaggaccaaaaacttgctgcccatgcacagaggtacgctaacgtacgttcccaagactgcgccatgaaacattccaccgacggaacgtacggagagaatatagccgccgggtgggtccaacctatggacaccatgagcggtccgatcgc

SEQ ID NO: 145254 - DNA, 122 bp, Arabidopsis thaliana landsberg
cataattctattttatatttcagatagatcggattcatcgcaatgcatagtacaaatcttacattcactcggccaaaattttcagatcttgtagcagtagattgtatgagcgtgtgttagta

SEQ ID NO: 145255 - DNA, 722 bp, Arabidopsis thaliana landsberg
aggaattcactactttcaccattttacattaataatcgagcacaaagcatcgaaaccatttttttacaacaaaggccgagaggacacatttcttacagaaaaaaagaaacctctccaagaccaatatcgttgttacatgattacaacaacaacagcacaaaagaaaagtaaatacaaattattttcagaacaaaagtagtcgagtcactccaatgtaagaaaacaaaggactttttactccgtggtgattttcaaaacagtggtaagtcttggcttcttgtatcttctaagaagcaaagattagcaaacaacactaaccgaagagagtgccatacatgctccggctgcccaaggcggtaattgcacccgcagaaccgggaaaaacactcctgctgctatcgggattgacactacattgtacgccattgcgaagacgtaatttaatcggattcgtgttaaggtttttcgagagagatcgatggctgttataacgtcttctaagttgtttctcatcagaacgtaatctgctgcttctattgctacatctgttcctgcaccaattgccattcccacatctgcagcggctagagcgggagagtcattgattccgtctcctaccatggctactgtgcttccgtccttttgcagcgaacgtataacgtcagctttaccagctggcattacttctgctctcacatcttcgataccaacctgcactcatg

SEQ ID NO: 145256 - DNA, 327 bp, Arabidopsis thaliana landsberg
tttgtaagattacggtttctttctttattctattaatcaagtcgtaatcaattatcatctcgtgctacaactgatgaacaacacacacgtatgtcaaaaaaagagagaggatacaccaaaaattcatgtccctaaaaagacaattcatttagaacccctctgtgttcttgtcatctccatgcatctaacattttcgattgttttattcttctgttggatcaaccactcaagcctattcctatcttctactggaagtttacatggttgatccagagaaggtacgactctggatctttcgagtagttcccgctctttttgttctgcaat

SEQ ID NO: 145257 - DNA, 364 bp, Arabidopsis thaliana landsberg
gttttgctatcgggatatctttgcttttgctccgatcctctctatctccttccagtttcagtaacagaaaccgtaatctctgtatctccaactgtaacctaccaatcttctctgatcctcttctcgcctgttctgatatcctcctccttctgctactctcattctcatcaagatccattgatgatttgcttccatctgatctttcaaatccattttgaactttcgtcaccagtttcctgttgatgcttaacagtttctctaatgcttcttcagcttcgttgatctgtcccttgatcgtctcgtactcgttttcttttcctttctcgtctttctcctctgtctccactttgattttcaaatcttc

SEQ ID NO: 145258 - DNA, 382 bp, Arabidopsis thaliana landsberg
gtctagctccaacgaaccaccgcgaaaaaccgaccaaccatcgtcgtcatcggcatcggcatcggcatcggcatcgccgtcattgtttttgtcactgccactggaaatcatttcgatgatcttagcccgcgtcccaaaacgatattacccaatcctctgctccgtctccaagaacatgcggagtcttgttcgctcgcctgaaattcacaaggctcgatctttactcggaaaagattatctctatatcggcttcatcgacgaaaattatcgccccgtatacgactactggtacactctccggagaatcgagaacagtacgaccgagaatctcttcgaatccattgagttcccttatccttccgagcctaatcgattttccatg

SEQ ID NO: 145259 - DNA, 396 bp, Arabidopsis thaliana landsberg
acccaagagtctctcttgcacaaaaaactgtctgtaaaagggagtgggcatcatcgttgacgcttcagttgtagtactttaacctgctaaagttacagtcttttcaaaagagcctgcgagtgaaatcgatgaatcacagcgaagctaggggttccggtggccataagggttatcggggacgttctcaagcatctgagcaatgggttccggtacttatacttgattgtcgtctcgtattcttgtgttaattcatttctgtttttgaaattggagtccctggattagccctttacttgttgcgcgctattggtatggttgataagctgattgtttcctttgtaatgtatacaggttgcagctgatgataagtctttggaagattcatcggtataggcg

SEQ ID NO: 145260 - DNA, 2526 bp, Arabidopsis thaliana landsberg
tctgtttctccttcttctctattctcttcctcttcgccttcaatgccttccagaccaaaccctaagcaaagaaactcggaaaccggagatctgatgcgtcgcagtttccgaggcaatccattttcggcagatccgtcccggagaaactcaatcggtagagaatgcagtaatcgtgttgagattggtgataaagagaatcagaacgacaaggatcaaatcgctaatgtcgtcaaaggtccaacaaaaggttccaagcatttcatgtcaccgacaatttcagccgtttccaagatcaatccatcgccgaggaagaagatcttgtctgataaaaacgaagtgtctcgatcctttgacaaatcccatcaccaggttcaggtaaagtcgtctgtctcgttttctgatgtgataagcatcattggggaagataaagatgtagaccagatttgcatcgatgaaactaagcagcttcgtgaagaggaatcacatgatattactgtcagtgatttcgatgagattcttgagaggaagagtaatgataattcaagcttcaagatcagtcctcttcctccttatgttccatacacatttcctgtgtttgagtctcatgaagtggatccagtggtggcaccttatgatccaaagaagaattacttgtcaccgaggcctcagtttctccattataagccaaatccaagaattgagcatcgttctgatgagtgcaagcagcttgaggagcttttcatctctgaaagctcttcttctgacactgatttgtctgcagaacgagaggaggaaggtcaacaagaggaggaagttgcttctcaggaaggtgtagttgcagtagaagaacaagaagatgatggtgaagagcgtttggaagccgcagaggaaattctggatgttgatggtgaagagcgtttggaagctgtagagagtgatgatgaagaagaagaagtagtaggtggcgaaagcattgaagaagaagaaactcatcagatttcaaaacagtctcgtttcaccaagacatccatgttgcttggctggattttggctcttggcgcggcgtatcatttgttggtttcttcaacgacgttttctccacaaaccatcacagattcacctttctatcagtttaacatctctccagagatcataatgtctgctagcgagaactttgagcatttgggtgcaaagctgaggatgtgggcagaatcatcatttgtgtatcttgataagctggtctcaagtctacgagaagaggagggaagtgttccttttcgatttcataacttgacagatcttttggaagacaaaaggttgtctgatgctgttttccagtcaactagtgttgaaatcattgttgatgggttcatagtggatagcttagaagtggatagcttagaagtggatatagaagaagtgaatgttggtcatcaggaacctgaagaagaatcggaaaacagtggtgaaatcagtcttcaagctgtctacgaagaagatgataatgaagtcgagcaggagaatgaagaaggaaaggtaaacttagaaattgttgatgaatgtgatgagcaggctgagatcaagatagctacagatacagaggtgaacggaggtgaaaggtattcagaatctctttctgaagaaggacatggtggccaagaaactgatgttgttgaagggcaggaagaatatgaagaaaatgaccagaataacatggaagaagctgaatccgacgcacaactgcttgatgatgtgcagtctgctgcaatcagtagtaaccagcaagaacaaaccggagtagccaatgttgaaactgtacaagaagaagaaggtgttggggaaattgctggaggtagcctcagtgtttcagaagaagctacagatgttgaacatgacggtaatgaagtagaagaagaagagagtgggtttggtgaagttgttaatgatgcaggttcggaggacattttgttgagtggccagaagaaagtgttagtcttgttttcgactatgatggttatacttgcagcagtagcagctggtttcctattagccaagaagaagacaaaacctgtgatgctgcaacatgaagatggcgaaccaacagcaatctctgcaactaaagttgtcgagcatgtgccagtagagaatctgatcagagaaaggctttcttcattgaatttcaaggaagaagaagaagaagttggtgatgacagaaaaagagaggtatcatcattcccttctgagatgagtttcagcttcagtaagaacaaaccattacacagctgcagcaacaagaaagatgatcttaaagaacatcaaagcggaggaggaggcaagaagagtaatgatagcggtgaatccatggcttcctctgcatcagagtactccataggttctgtttcatatggaagtttcacaacatatgagaagatacaaaagagaagtggtcacgaagagaaagagatgataacacctgtgagacgttcaagcaggatcaggaaccatcaacattctggacaatgagtt

SEQ ID NO: 145261 - DNA, 312 bp, Arabidopsis thaliana landsberg
acttgcttcatcttcattcgtcatgatttccctctttttttactttaccaatttcttgaattcttaaacccaaagacaaagcctttcgatttcctatagatactttcagatgtctaagaactcaaacgttgaagagaatggaggagcaaagccaatctgtgaagctttgaggagattcaaaaggtcgaggcttgtgttcgagccgtctttaggagtgttggggtttttcttggttggggtctgtttggtttgcagttttttcttctttgatcacagccgcgttgctaaaagctatggcctttcgaataaata

SEQ ID NO: 145262 - DNA, 225 bp, Arabidopsis thaliana landsberg
gactgttggtgctggagttattgggacgatcctcgaatgattataaggttttagagagtttcatatagtgagcatctctacttgctttctttttgtttcactcttgattctcaaactctttgagtttttacctttttttaatttatttttgtgccattttccataagaacttgaaatcaaaatgtcatatatttcttgattttctgatccttgttattcatcttt

SEQ ID NO: 145263 - DNA, 169 bp, Arabidopsis thaliana landsberg
agtcacagagtctgcgacaacacgcagatagagttgagtctctaagtcatgtttgtacatatacatacaataactagacaagtcttttctgtaagacttggtatgaaatgtcgatatatccattatgtacgtcttgttaaaactggtttccacgaaaatgttgtatctc

SEQ ID NO: 145264 - DNA, 1046 bp, Arabidopsis thaliana landsberg
ccaaatcttcttcttctcccaaaaaatttcaaaccctagcgtctcgatttctctcctctgctctccaattccatcttcccatggcgatttcggctccagccgcttgttcttcctcctctagaattctctgttcctactcctctccttctccttctctctgtcccgccatttccacctctggtaaactcaaaaccctaactctctcttcctccttcctcccttcttactcattaaccaccacctccgcttctcaatccactcgtcgctccttcaccgtccgcgccgctcgtggaaagttcgagaggaagaagcctcatgtcaacatcggaaccatcggtcatgttgaccatgggaagactactttaaccgcagctctcaccatggctctcgcttcaattggttccagcgtcgctaaaaagtacgacgagattgacgctgcgccggaggagagagctcgtggtatcacaatcaacactgctactgtggagtacgagactgagaatcgtcactacgctcacgttgattgtcctggtcacgctgattacgttaagaatatgattaccggagctgcacagatggacggagctatcctcgttgtttccggcgccgatggtcctatgcctcagactaaagagcatatccttttggctaagcaggttggtgttcctgatatggttgtgtttcttaacaaagaggatcaagtagatgatgcagagttgctagagctcgttgagcttgaggttcgtgagcttctctcgtcttatgaatttaacggtgatgatattccgattatctctggttctgctcttttagctgttgagactcttactgagaatcctaaggttaagagaggtgataacaaatgggtagataagatttatgaacttatggatgctgttgatgattatatccctatccctcagagacaaactgaattgccattcttgttagctgttgaggatgtgttctctatcactgaacgtggtactgtggctacagggcgtgttgagagaggtacggttaaggtaggagagactgtagagtta

SEQ ID NO: 145265 - DNA, 659 bp, Arabidopsis thaliana landsberg
ctcttcagtttcaatttgtttgttccatacactgtacctcaatacgtaatctctggtctcataatgtttgttgctgctgaagtactcgaaggtatatactaaacaaacctctgcgttctgttttaaaagaacaactgacttataatgaccctttttggtttctttaggtgtgaatctatcgttgttatcgcgggtaatgtcatcaaggctatcgaaaggaacgtacaacggaggattgctctcaacagaagctggaacgttggctcgtgttgtggcagatgcaaccataacattgggaggatacttaggaagaggccatctcctgaatgccactcttctaccatcacttgtcatctgcattggctccatcgttgctacttgttgtacttataactcactctattgattttggagttttgctaccaaattttacaaaatagaataaaacagtgtgtatgatcgatcctctctttgatttgattatttttgttgttctaattcatatgggtgtatatgtgttttataatacatatagtatgtatattcgtatatatacggtgaatatcaaatcctccatttgttggaaattccagttttgtgagattctttttctgaagtattgtaataaattctcatataaatttataagtttttatttg

SEQ ID NO: 145266 - DNA, 513 bp, Arabidopsis thaliana landsberg
cttcttcttcttcgccttctctctgagtcgaactcgctccgatcgactgagccaactcgcccgccttctgtaatgatcatttcctctacattgtactaaaaaagagtgttgtaatgactcgttccgggagacgatggtcggagcgacggtgagagttactgttttctttccggcgaccaatactctcggcggcggagatgtttaagtcagcgagatggcgtagcgagaagaacaggatcaaagtcgttttcagattgaagtttcatgcgactcaggtactataaacactcgagttttgttttggcttcttcattgatttctcttagatactaaaactttgtgtgtgattttattgattttgctcgcattgcttagatttgaattttccagaaaaataagttaagaaatctcaatttggtatttgatgtcccacattttccttcgaggtttttgttttaattagcgtaggcgacacagttcaatacagagggattgattctgtctgtagttccc

SEQ ID NO: 145267 - DNA, 604 bp, Arabidopsis thaliana landsberg
  unsure (1)..(604): unsure at all n locations
agatcccctgggattataagtggtatcagcgacttggatccaatcaggtggcctggttcaaaatggagatgccttttggtaagctatgaattatgttcttaagtcattagtttggtctgagaggtcttctataagattgttgccttttctatatccgtaagctcactgctctgaaactatgttttgacgtcatattcaggtaaggtgggacgacattgtggcaaatgggcatcaacagcgtgtctcgccatgggagatcgaaccatctggttccatctccaattcaggcagcttcgtaacaactggtcccaagagaagcaggattggcttttcctcaggaaagcctgatatccctgtctctggtacacatctacttagccaaagacattgtaccactcatataaccatttatcgcctgtaatataacgttttctgctcttattgcagaggggatttgcgccacagactttgaggaatcattgagattccagagggtcttgcaaggtcaagaaatttttccgggttntatcaacacttgttcggatggtggagccggtgccaggagaagccgcttcaaaggaacagaatttggtgactctatggg

SEQ ID NO: 145268 - DNA, 366 bp, Arabidopsis thaliana landsberg
ctcgacaaagattctcactttgagagagattttttctttctagatgcagattcagagcgtatcatctctcgagaaaggatcaatgtctcatgaaataagctagactctgtttctgttttcttcttcttcgatctcaatttcttcttcttcgagctaggggttgtttatgtttgggaaaggaatgggcactaggcagtattcactgggagaagtagggccaccaataaatccgagagctggattgcgaagggaacaagctggtagaggttcatacagaggtagttagtagattcgtagctcatctgtaggcaaaaagggtttccttttaggtggcaagactgtttattttcagacacagagactgat

SEQ ID NO: 145269 - DNA, 569 bp, Arabidopsis thaliana landsberg
gaaagaagaagaggaagaagaaaatggcgaatcttaactcagctattgattcagtgttttgggatcagaacgtttcttcacctcaaacccttgaaggcactgctcgctctgttcccggtgagccatttcccttagacggagcacgagcaagccgctctcaccggattcaacagctctctctgcttcgcgaaggctttcatcaggaatcattccttctttggctcctgcttctgacaagagactgggctctgtctctctcaattctctcttgctcagtccttcctctaacaactggtaaatgctcttaacctcttcaataatttacaaaattgtgagtgagtaatgctttaaaggttgagactttgaatcaaactggtgaaatagtgttgacattgttggatttgatgagacatgtgattagttttgtttggaattttcactcaggtggttaggtttagttgggcagttcaaaccaaagaagctctttgctgatatcaaagcagatattagcaatgcagaagagtgggatttgcaagttgtaaaggatacagcaaaacacattgttgaca

SEQ ID NO: 145270 - DNA, 489 bp, Arabidopsis thaliana landsberg
tacaataatacaatattattatataaaataccatgtactttacacatacatttatttattcattaattatacatccatcacataacaattcgtaacaatttcattttgtaatatatatattcaatttagtttaagcagtcatatcttctttttcttcttgaccgagtcggtaatcttgagaaccataaggactaaaagcttcaaggaggaagttggatttacgccaaggattgagtcccatgtcgttgcacatatcatcagcatgttggatgctgaacgtggaaatgcaatgacgtttgtagaatctgcttgagtttctcgtcacttccatttcttttaagaattgatccaacatcttctctttgcttggtaatctgaatttctcatccactagccggcttagccacattgaacgtagctctgatgtgtgtaagttcgagctgctttggacgtatcctacgaaacccatgtttggtatcaatggatgga

SEQ ID NO: 145271 - DNA, 410 bp, Arabidopsis thaliana landsberg
ctgcctcctaatttcttcgtccttctaccgaagaatctctccactcttgccctctttcgaaaccctaaaccagaagcaccagattttttcaactttttcccagagaacaatagaaaacccaacttgtgctctctagggttttctttattccttctcatctttggattttcttgggtcatcattttggaagcttacccaccagcgaaaaaattataacttccatcgattcctggcttctctctctcgctctctctgcatgtgctaaatcgccggactgatcctcactgtcacctctgttcccggcttattcgccggtgaaatctatggttggtgctcagatttatttccaattgtttgtgcatctggtggaggataaatgctccttgttttggatctagggatttctagtc

SEQ ID NO: 145272 - DNA, 360 bp, Arabidopsis thaliana landsberg
tatgtgttgtgacaatgtatcattaaatcaaaaataaaataaaactacgctacagattttgtcgatacattttccacccagaaaatggtacagaatataacttacaaaaaagacccaatcattacatcatcagaagcttccttataaatttcaatttccggaagtttttctttcttccttccttcaattttgttttcctctaatctctttacttttgtatttactccgcattaagctaaatagcttcttttgacaattgatttgtatagtaccccaaaaaagaataaggcagttataaataaccagaaactgaccttgtgtttagtccagagccgttttgtttcttcgaccagttaaagg

SEQ ID NO: 145273 - DNA, 457 bp, Arabidopsis thaliana landsberg
aataaattcgttttacgtactacacaaatcattttatcatggtgatggcaaagaaccttaccaagttctacgtagtgtttctcgttgttctgatgatggtggtatcgctattgctagccattgaaggacgaccggtcaaggatagttcgagatcgttgacccaaatgagagattcatctatgttcaatggaagcgttataatgtcctcatttaaaccagttgagtcttctgtaaaagatttatcgtggttagccacagtgaaacagtccgggccaagcccaggggttggacatcatcgagccaaggggtacaaaatgtttggacgagccaatgattctggtcctagtcctggtgttggacactagatataacaaattaatctcatgaactgaaattatagataatgcagatacaactttaccacatgttcaatagcctctaagatgtaatcttcttt

SEQ ID NO: 145274 - DNA, 170 bp, Arabidopsis thaliana landsberg
ccttggggttaatccagcactgatgataacagcgatgatcaaaccataaatacctaacacaccagccatgacaacaggaacaatcgatttcataacaagttcaggtctcatcactcccatcgacgcaactccaactccactcttcgccgtcccgtacgctgctcccatac

SEQ ID NO: 145275 - DNA, 289 bp, Arabidopsis thaliana landsberg
attccacggagatgtccacgagagattgctcctctttcaggtaattatttggtttcaagttttattctttgcttgtcctgtaaccatggctttgaggcttgacagctaaatcatgtgctctttgtgattctgcagcaactgcatctgtggactttgcagcagcagcaacatcatccaaccagctctttgctaatggcttgccaccattagctcctggtttgagaagacaccggagaccgatagagcctgcaagagtggctaaagatgacttctttaaaatcaaactgcc

SEQ ID NO: 145276 - DNA, 473 bp, Arabidopsis thaliana landsberg
tgaaatgaaacagaattatgaatatccgcattctcattattacatgtaaaatttgctaaaaccgaaagacacagagatactttttagggttgttgagagatttctagatgaggtatgttcatgaggagatgactagatgtgagattgttgtggcaaaagaacagaaggcttaagcatcattattttaatgtgatttgtgatgatcagtgctctcaaatcacttttgcatttctccatttacatgagctagctcctacttgtggctttatgtaaatcctggtctacacaagctagagattccattgacgagtaccatggtgatgccttttttcaaagcaggtgttcctgaatgctccttcgttagttccatgcctcatacacgaatggtattcagtgcaggatccaattggacttgattccttgacagactttagcttttctttaaaccaaaaaaagaagaatatctctgctag

SEQ ID NO: 145277 - DNA, 410 bp, Arabidopsis thaliana landsberg
ttatttttgaacatttttgtttatgtatttcttcaactctaagcaaatcaatatatgtgtagagttgatagtgtaactctaatagtagtgtatactcttatgatttaagtctttttggacacaacacaagagcatacaacgttaggaatttataagaaagataacgatcattagatactctctatctgtgtcctgagtttagactctaccaacgggagatagcggcggagccataggagaagaagattttccggtggtctttgccttggaagcacatgttagtaccgtcacacacacaaaaaacgcttgtaacggtgaaacaaacgaaccaaactccaccctatagatccctgtcttcagctctgtcatcgccaaagctggactcgagtcttgttcactcacttcctgca

SEQ ID NO: 145278 - DNA, 653 bp, Arabidopsis thaliana landsberg
caaatctgatctaatctccgtaaattaatggcgagtagttgcgagctttgctgcgagatcttcatcgcaattcttcttcctcctgtcggagtttgtctcaggcatggctgttgcactgtaagtttcatctctctctctcgatctctcttaaatttcatcaaactgagaattgagatctctgaaattttctcagcttcttatttcagaaatcgaaaccgtagtttaaattgatttgattacggtttgaaattggttgcgttccggtttaccgaaaccaatcaataagatgtatgtggagatcagttaccaaaaatataattgtggtgtttttgttaaaaagaaacactaattaagggactaaaaaataaaattttaaaattttgtttttcctaactcatgtttttttggtttaacttgtaggttgagttcttcatttgtttgatactgacttgcttaggctacttaccaggaataatatacgcaatttacgcaatttgtttcttgcaccgcgatgagtattttgatgaatacagacgcccaatctactatgttgcttgacctcttgattgattctttctcttgagcacacatattgtactttaaagtgtaatttacttgtatcctggagataataataccattttttttaagac

SEQ ID NO: 145279 - DNA, 299 bp, Arabidopsis thaliana landsberg
atattgaggttgcagagggataaagctgaactccaaatggaattgagacagtttaagcggtttgctgaggagaaaatggagcatgatcaacaagagcttttgtatctggaagatttgatatataagagggagcagactattcaggctttgacatttgaagctcaggcttataagcatagaatgatgagttttgggttcactgaggctgaggttgaaacggagaagaacatgcttagccgaaatccgagcatgatcgaaaatgattaccaatatgatctccccacatctgattaccctcc

SEQ ID NO: 145280 - DNA, 1082 bp, Arabidopsis thaliana landsberg
atctacggaccaggtcttcactccgctctcacggaagaccacatcatcggtcaacttgatggcttaaccgtacaacaagtatgaatatacatcatctcattaacttacacaaagacaaaaaaattttgagtaatattattaatttgtttatcttttgattgaattttcaggcgttagagatgaaccgtttgtttatggtggactaccatgacatatacttaccgtttctagatagaatcaacgcgcttgatggacgcaaggcttacgcgactcgaaccatattgttcttgacccgactcggtacactcaagcctatcgccatcgagctaagcctcccttctcaatcaagctcaaaccaaaagtccaagcgcgtggtcacacctccagtagacgcaacctccaactggatgtggcagctagccaaggcccacgttgggtccaatgacgctggtgtccaccagcttgtgaatcattggttacgtactcatgcgtgtttggaaccgtttatattagctgctcatagacaattaagcgcaatgcatccgatattcaaattattagaccctcacatgaggtacactttggagatcaatgccgtggcacgacagactttgattagtgcggacggtgtgatcgagtcgtgcttcactgctggtcaatacggtctagagattagttccgctgcgtataagaacaaatggcggtttgatatggaaggtctccctgctgatctcatccgaaggtaatgtctctgtacattattaaatttagaaacttaagtattaaactaaatctgatgcataaaacttaaaaagtgttagaaacatttctgatttattagaattacatgaaatctagctccaacagtttctaatggtttcaatcatactcatgtgataaataatgtagtgggcatagtaatagattgttgtagtgactagtgagatagatattttgttgtctggttaaatttggatttttttttcttcttcttttcatatacaatttgaatctaacaatttttttgttaaattttttatttcatttttagggggatggctgttccagacccaacacaacca

SEQ ID NO: 145281 - DNA, 80 bp, Arabidopsis thaliana landsberg
attgaatccccagatctgaaactcgatcgagattgcaagaatacctcgaaatctgaactttttttatgcgagaaattaat

SEQ ID NO: 145282 - DNA, 1063 bp, Arabidopsis thaliana landsberg
tctgatttatttttccctttcactgtagatccttttttccgactcacacactttcgatattttcttttgttttcttcaaaaaagacatattttttttgctgggactatcatcaattggggtccgtcgccacgccacgcgccgagctcgcaatatatcgaaagcaacgatctaggaaggatcttaaaaatcctacttggccacaaatttttgctatttttattattttccgtgtttaatttctgattcagacaggaagattaatattaagcactagttgtgcaaattcacaatttttttgtgtggatggaaacaaatttctgggtgagcttccctttccttttttttgctttctttctctcctttcttctctccggatttttctaggttttcaatttttgttttaccttcaaaggttgttcctttgtgatataaaaatatagttttcaccttctttcaatctctgcggtttctaaatagaacattggagagatttgtttttgcatctgtaaattttgatttctttgaccatctctctgtttttgtggcaagtgagtaaagtttcaatcttgacctttctttctttctttcattagttatgatttttgcttcttttattgccttaaatttccccattttgggaatgaatgtttctcacgttattctcattgattccaatttttctgcagcacacgtattccaatccaaatcgacaatatacgcgtctctgatggatatgttttggattcagtgagaaacagagattgattttggttttctttaatcatggtggagccttatgagacacgtaacaacggtgaagcatcccagatgatcagatatcagagttataaccatcacaattccagactatcatcttcattatcatcgccattgcttgatttgagagtgttctatgtcagaatcagtaatttcaaggtggatcattccacacctgaggttctcaccattactcatattcctttggatccagattcacttctggagaataatggtgttagaatgagcatgtactctgaaagagtttcttctcagctacgcgtg

SEQ ID NO: 145283 - DNA, 907 bp, Arabidopsis thaliana landsberg
attttaagattctcactttctctctaccaccaaacctcccacaccaccgtcaccggagctatgacctcaaaagactgtggctctcacgacagccactcatcatgcaaccgtaaaatagtgatctggacgatatcaataatcctcctcttaatccttgtcgtaattctcctagtttgggcaatccttcaaccatcgaaaccacgcttcgtcctccaagacgccaccgtcttcaacttcaacgtctccggcaatccaccgaacctcctcacctcaaatttccaattcactctctcctctcgtaaccctaacgacaagatcggtatctactacgaccgtcttgacgtctacgcttcttaccggagccaacagatcactttgccgagtcccatgcttaccacttatcaaggacacaaagaagtcaacgtttggtctcctttcgtcggtggatactccgttcctgtggctccgtacaacgctttctatctcgatcaggaccattcaagtggcgcgatcatgttgatgcttcatctcgacggtcgagttcgttggaaagtcggatccttcatcaccggaaaatatcatctccacgttagatgtcatgcgcttatcaacttcgggagtagtgctgccggagttatcgtcggaaagtacatgctcaccgaaacttgtagtgttagtgtttgacaaattaagaggtacttaacggtgacggtggtatcaggtcacggattttttcattattaataacgtaatatattttatatataatctcgtagtagttaagttttataactttttttttcctacgtcatagagaaataatatcaagaattgcaatcggttgcgttattgttatgacgagctgtaaaagattcaaaggaaacactaaaatatagtaaaagacaaa

SEQ ID NO: 145284 - DNA, 263 bp, Arabidopsis thaliana landsberg
tccctgattggatccatctctctggtttgaatgattcacagtcttttccccatatggattccatccttcccatggcgtaagtcgcaaagtaaacccgtgagcctttacgtatgaatgtcccatcgggaaacacatcgtcttcgatggcttgtttcatttccattggtattggagggtaaagtctcattgtttctgaaagtgctgcttgtagatataccatgtcgtttagttctttgaccgtgaagagactctcgtttttgctg

SEQ ID NO: 145285 - DNA, 143 bp, Arabidopsis thaliana landsberg
  unsure (1)..(143): unsure at all n locations
aaaaaatatcacaaatcccatgaaaaatcacagagcttagaactctccacactctcaaactccgacgacttgactttaagatcatccctgaggagatncgtacttagcaatgggaggaaaatcagagccagcgaaatcggaat

SEQ ID NO: 145286 - DNA, 268 bp, Arabidopsis thaliana landsberg
agagaggtcttgaatgaggttttggtttggcttctgtttcggttggttctgtgattacttgtgcagcgactgcagtttcaatcgctggcactggcactggctctggcactggctctggctcaggtactggtttatctacagtggttgttgtagctgcaactgcttctggctcaggtactggtttatcgactgtggtggttgtagctgtagctgattctgcttctgctgttactgttgctggtgctgggagagctttgttgcttgttga

SEQ ID NO: 145287 - DNA, 193 bp, Arabidopsis thaliana landsberg
cttctcttttgctctgaaataaaaagagtaagagaagaaggaagaagaagataaaggattcaaaaaaccctaaacactccaatgtcttcttctactcttcaagcttatctttttcttcgtcctcctctccatacttcttcgtttaagctttacccttgtctattctcttcttcttcattgagtttttgtccac

SEQ ID NO: 145288 - DNA, 381 bp, Arabidopsis thaliana landsberg
atacatcatgggcctctgttttttttgggtcaaaatatcattgggcctcatggcttaaaaatgcgtatgaaaacttcaactgaaacccaaatcaactcaaattattgaatgtcgtgatctcattgttatcttgagattgaagcaggggcggagggagtgaagggggaagggggtccattgaccccataacttttatgatttttaaggtaagtctcataatatttgatctcacatagctttactgagaacctccaaaaaaattgcacttattacttataatctgcaaggcattgtatagtttaggaattgaaatcttatgcatgacgtgaaacgatgaaagtataaacatcaattttcactattaacatcaatttttgtaga

SEQ ID NO: 145289 - DNA, 54 bp, Arabidopsis thaliana landsberg
ggaattgaactgaatcacacattcaccataagcagacctgaaaaacctgtttat

SEQ ID NO: 145290 - DNA, 681 bp, Arabidopsis thaliana landsberg
aaggaaaaaacactagtcgctcgctgctcttcaattttcttctcgaatctaatcgattgatttctccttcgattcttcaggtaacttttgattatcctcctctaatcaattgtgtatatcccaagctttctctataaattagggtttctgaatcaacgatttttcttttatccgtaggagaatcactgaagcttttgcctcccaagtagaaagagatatggtaagcgtttctttaactctattttcttcattgtttcagttattggcgattgtattctctgtttattgtaatcgtattgtgttaattttgatttgactcatcttctctaaagttcaatttcaaaattagggattccgagatcatagatattgctttgtttccgagatttgagttattcttaagcttgttttactaactttcaatatgttggatttgttataggcaactcttgaagattctttccttgctgatttggacgagttatctgacaatgaagcagaattggtgagtgttaaaacacttttgattactatttttctgtttacttggaggagctatgattgtaattgtagtttgtttgattatacatatgcaggacgagaatgatggtgatgttggacaggaagaagaagatgctgatatggatatggctgatttaaagacacttacctatgatgatc

SEQ ID NO: 145291 - DNA, 450 bp, Arabidopsis thaliana landsberg
tacattaggcaaagatgaatgatgttaaacaaaggcattgcaaagccaattccgtttatagaaccaatgcatttggatagaaacacaagcaacatttattcttccactatataacttaatacattttggagccatactaacataagaagcaaacttatgttgtaaacaaagcatataaagatcagtcattgctcggaacaagagttagtcattcatttaccatgttcaagcaagccggtgcccttaaatttctcttccattaacccatctatacgagcagccatctccggagtcagatagttcgaccaatctcccacctttcctttcctgaaatacgcgctattcgcgtaaacaccaggacgatcctctctgcctttctcccctttgttagcttcaagattcttcaacgtctcgaagctgcaaagattcaccactttctcaacaacacct

SEQ ID NO: 145292 - DNA, 460 bp, Arabidopsis thaliana landsberg
gcttgtggacctaaatcaaaaggaatgactcctcttcaccttgctgccaaaggaggtcacatcgaagttatggacttgcttcttgaacgtggagccaacatggaagctagaacctctggtgcttgtggctggactcctctccatgctgcagctaaagaacggaaaagagaagctgtcaagtttcttgtggggaacggtgctttcttacctgatgatataaccgacagtaggttcaacccgccggttcagtactgtcacggcttggaatgggcttatgaagagaggaagaaactcagtgaagatacttctttatcttgtggagacacttcttgcagttctgcgaattgattcttgtcttttgttatctttcttgcaatgaatcataagacgaagagacacaaaaccaaaggtttgtaatcatgttgtattgaaatatgaaatgatacatttcgtttagagc

SEQ ID NO: 145293 - DNA, 418 bp, Arabidopsis thaliana landsberg
aacaatttgcatcatgtgtatatactttggccatagagaaacgcttagagactagagttagtgtaagatcaaacgttaatagtgtccgtaatggtacgatggactcttagccgatgagctaataggatatctttcaaacactactaacgcctctttcatggtcggtctcttttgtggaatttgagatgcacaactatatcccaatttgaaaaggccaagtaaaaagtcctctttgccttccaattcggagcggatcgctacatcagccattattagcgcccggttcccgtcctctacggtcagcccatttcctacccccacctcgtctatcgacactatttttcccgtgagcagctcgaggaggatcactccaaacccaaacacatcccatttcgggtttggtttgagattgcggagc

SEQ ID NO: 145294 - DNA, 1128 bp, Arabidopsis thaliana landsberg
acttctgctccagaaaaaccctaatcagcttctcgtctccataaattcagaaccaagaaacatctctgaggtaccatcttggtttgccaatttcttaatcagctttgttactttttttttttctcttgtcgtcagctctaacttgaattatctccacagagactaaacgaagatgtatcttcagtgctatatcaacgagaagggtgagaaggtttacacaactaaggtaccttcacactgttcatatcttcttcttcttcttcagtattcttaattcgtattttataacttcgttcatgtgtttctgtgattcggaaataaatctctgtttttgttcttgaggagagttaccgactttgttataggtagtttcatatacattcaattcaatagttcttgaaggttaaatttcgtagatacactgaagctttgttatgtttgcttaatcttaaaatttgctgtttgatatatcttaagctaaggaagatagaagttctttcggacacattgagtttggttttgcttgtttaatcttcattttagcagatataagttccgtttcatatacattgcgcttggttttgacaccttactattaaatttctatgtttcatctcttgtagaagttaaaaagaataagactatatgcttgcttgttgatactttttctgtgaatttggttttgcttgtggactctcaaaagtcactatttccgttaaaaaaagtgtgttgttattttatattcttactcatgaattaaactctattgtgtagaaggaatcaccgctagggctagccactgaatctgcccatccaggttagtctacccttttgagttgttttagttatgattcgtgaaagtaacaaaacctttaaaccaaatgttttgtgttgtttgcagcccggttctcccctgacgataaatactcaaagcagagagtattgttgaagaagcgatttggtctcttaccgacccaaaacgcacctctccagtactgatgaagaagcaaaccacttgcctgtgttggtttttgatgttcctttttaatttgctatgttgtctcttaatgaaatgttgacttgaaccgtctttgtaatgtcttcaaatagtgtgagttaagagcaatt

SEQ ID NO: 145295 - DNA, 380 bp, Arabidopsis thaliana landsberg
tgtaactgttttgcatttaagaagaagttgttctgaacaatttaaaagagagaatcaaacgacaaattatttatccaaagattcaagaaggaacaacaacagtttgcatcatgttcttgaattcgaaaaagtcaacgcgaccatcatgattactatcaacagagacaatcatcttctccacttgttcaatctctcctgcttcaggtaatccaagcttcttcaaaaccttttgcaattccacagcggaaataaaaccatctccgtcttcatcgaacacattaaaagcttcttcaagatctgattccggagacccatcacagcaacttccttctcctccaaagaaagattcgtctaaggttttgtggagtgcagcaaagtca

SEQ ID NO: 145296 - DNA, 389 bp, Arabidopsis thaliana landsberg
aaatactgcatcggtgacgttgaccagtcaacggttccggtgacgcatctgtatattttgccgtgggagaaggaatctacggcggcggaaacaactaaagaagaatctggaaagaagctgcttatctacttaattcctctcttgatactcggcgttgctttcgctctcagattctacaacaacaagtagaccaaattatgatgaacagattgataagagtttcttactgttcttgattttcgtttgttggtaataacgggcttcttatgtgaagatttgggccatttggcccatcgctcagaattggactataatgtcttatttattttatgttaatgggccgtatcagtaggccctttgttgatatatgccaatcccaatttcttcta

SEQ ID NO: 145297 - DNA, 227 bp, Arabidopsis thaliana landsberg
gtatgatccctcgtgcattttcactgctttaggtatgttggtagcttcatttagatatatagattcttctgggtctcattagatgtacagagtttatatgtttcatgattatgcaggaggctacttctcttggagttcttccttctgtgtcattcaataaaattccactattttttgacacgacagaattgccgaaaaacgttgctgaggtaaataaccttttattg

SEQ ID NO: 145298 - DNA, 99 bp, Arabidopsis thaliana landsberg
atcccctattctccattgtaagaaaaataaggaatgtaataatcacttgttttttgaactatatgtaataatcactttatcaaaggtttttaccgaacc

SEQ ID NO: 145299 - DNA, 687 bp, Arabidopsis thaliana landsberg
ctcctgttcaggatcagtgctgcccgtcatgtacgatgccagcggaagcacacattcattgttatactcataggcaaggtagtctgacaatatctgttaagaaactgcctgaattgctacctgggcaacgtgaagggaagatttggatgtggcatcggtgcctgaaatgtcctggatcaatggtttcctccagccacacgcagaattgtaatgtcagatactgcgtggggcctgttcttttggcaatttttggagctgagcttttctaaccatgcagcggctagtcgtgtggccaactgtggtcattcccttcacagagactgtctccggttctacgggtataaatagatgcttcctaatataaatattttctgcggattgtttcacttgttattacacattactgattttccctcgtccaatatgtctgattctcaagtagcatcttgcgtaatgcaatcaggcttagcacttagtatatattacatcagatgtactgtctagataggctctgcataagtagtactgtagtgttggtcattcacttctctaattgtcatctattcggcaagtgtcagtctatgtttgacggttgtggccttgtattaaccaaccacgaccacgccagtaatgagtatcaaataaaaaattcttaatgcagttttgggagaatggttgcttgcttcc

SEQ ID NO: 145300 - DNA, 420 bp, Arabidopsis thaliana landsberg
gcaagcaatcgaaacttgttaacaacaatttacacatccagtgttaatacttatctggtgtggaaaattaccaaactcaaaccaaaaaaaagaagagaaagagaatcacaatctaaacaagaaacgaagaatgcatcctcgatttcgcactttggttccgattcaatcgatcagaatcgcctcctcctccgccgtagtaaccagcgcttccaacatccaaactctcttcttctaccgctgtgtagtagtaatactgtccctgaacagatctcttgtagccactggtctcattagagacctcaactctctgtttcggcgcactttgtgaccgaactttagctttataagactcagtgttagccatgtaattcgggtgataacccgagtagtaatagttattacatccccaagaatactcgc

SEQ ID NO: 145301 - DNA, 860 bp, Arabidopsis thaliana landsberg; identical to SEQ ID NO: 47562
  unsure (1)..(860): unsure at all n locations

SEQ ID NO: 145302 - DNA, 525 bp, Arabidopsis thaliana landsberg
gaccacaacaaatgcaaagccctctaaagagactgttgtggtgtaaaagctcgagcagtcaaagctgagacaacgatggtgaagtaggtggaagttcagacgcagatagttggtcgactgtgcaagaaagagctttggttcaagctttaaagacattcccgaaagagacaagccaaagatgggagagagtagctgcagctgtccctggtaaaacgatgaaccaatgcaagaagaagtttgcagagcttaaggaaatcattagaaacaagaaaaccggagtatgaggtaaaatcatttcggagtcccatgagaattttgggttttaatcctcttggggcaccgttactttgcgagaagcaagacctaaaacttttttattatttgtaatgattcatttccctttgatgtctctatatattgagagtgctggagccactattatggagtatgttttttttttacataatcttatgtaacgtttgattagcgtctagtttcaagttgtgaaataaagcgcatcgctca

SEQ ID NO: 145303 - DNA, 378 bp, Arabidopsis thaliana landsberg
atctgtcaaagcagagaagaaggaagctatggatgtagagcaaaagaaaccgttaatcgaatcatcagatcgtaatctacctgatttaaaaaatcagtgaagcttaaatatgtgaagcttggttaccattaccttatcactcatggaatgtaccttttcctctccccattagtacttgtaatcgctgcacagatttcaactttctctgtcaccgatcttcgtagcctctgggagcatcttcagtacaatcttatctcagtggttgtttgttctatgctgcttgttttcttaatgactatttacttcatgactcgaccacgtcctgtctacttggtgaacttctcgtgctttaaacccgatgagtcacgaaaatgcact

SEQ ID NO: 145304 - DNA, 808 bp, Arabidopsis thaliana landsberg
tagccacgcacttgttctctttatcacagtgccctctcgctctctgcaacaacactcttaatatatatatatatattcatcaatccctatctctcatcgaattctcttccgatcgtctttttttcttcccgcgatttcttgcgtttccggtcagtttgcggcaccgtgttttgttatttggttgaatgatcaaacgatttggttttttatcctgattcgattgcattctgattgagctgctatgtttgagaaatcgtgtgtggaattgtgttgatttgttctgggaatttaattagtttctggaattttgccgattgttttggtgttttcatgaaaagtttgctactggaatttgggattatctcaaagcttattcaatacttgaattattgaatcatttttgttatctctgtgtttataatttggaaacaatcataatctcagggaattattgcttaatggttgagaagcaagaagaaatgaatgagtttggtgctgtcaatggtgggaaagtggggacgtcttcttcagtgtcaccaccgcaagataaaggaaggaagaacaagagaaagttagctgatccttctccacaaaatgctgcttctttgactgagttccctcgatatgagttacattcgttcaaatctcaaagccctttgtgtgaaaatgactccaacgggcagctgaaagccgaagagtctgattctgtgggatgggatgatccgtttgcttgtcaccttgaaggactattatcgtctaattggctcacgctccttcgtagtgcaatgaatcagattatggattgtgg

SEQ ID NO: 145305 - DNA, 648 bp, Arabidopsis thaliana landsberg
agtagaccgccgacttagattttttcgccgacgagagaatatatataaatggctcgtctttttccaaacgatttcttcttcttcgtcgtcgccggtttagggtttccgttgctgtagcaattttctctcgcttctctctccccttttacagtttctcttatattgctcttgccttgcgtccaatctcaagagttcataaggttagtttaaatttgtctttattgatataatctatgatatctgtgaattggtgtgttacattcagccaaaattgttgtgaattgtgttgttcttgagatgctttggcgtcaattgccggcttacttgcataattttattaggggttcccctgaacagctgcaaaagatcgctattacataacttgttaagagtgaaactgcctcgcctaaccttctgttgatatgattcatgtattcacctaaacagaagagagcttgtctcgacagctttgatagcctgttgttatttgttggtctgtttctgtctttgaaggttaaattttttggcttgtcttacagagttgacatttgtgaacatcgaagaaatacggtgacgtttcttctctgattactttttgccaacatgaatactaatgtatttatcaacaagtgctacagcctggtaagt

SEQ ID NO: 145306 - DNA, 1705 bp, Arabidopsis thaliana landsberg
  unsure (1)..(1705): unsure at all n locations
tgtcacatgaccccaaatgaaatcccattactctcatctaatatattttccatttatacacatataacagcacaaatccacgaggagacacacctcgtacgtattaagaaagtcacttcaaaaaatggcgcaaccgcattttctactggtaacgtttccggcgcaaggtcacgtgaacccatctctccgttttgctcgtcggctcatcaaaacaactggcgcacgtgtaactttcgccacgtgtctctctgtcattcaccgctctatgatcccaaannnnnnnnnnnnnnnnnnnnnnnnnnnnnnnnnnnnnnnnnnnngattcgacgtacggagcatctccaacaccgacgacgtccaaaaccggttggtacacttcgaacgtaatggcgataaagctctatcggatttcatcgaagctaatcagaatggtgactctcccgtaagttgcttgatctacacgattcttcccaactgggttccaaaagtggcgcgtagatttcatcttccctctgttcatctctggatccaaccagccttcgctttcgacatttattacaattactctacaggaaacaactccgttttcgagttcccgaatctaccttctctcgaaatccgcgatctgccttctttcctctcaccttccaacacgaacaaagccgcacaagcagtatatcaagaactgatggattttctcaaagaagaatctaacccgaaaattctcgtcaacactttcgattcgctggagccagaggccttaacagctttcccgaatatcgatatggtggcggttggtcctttacttcccacggagattttctcaggaagcaccaacaaatcagttaaagatcaaagtagtagttatacactttggctagactcgaaaacagagtcctctgttatttacgtttcctttggaacaatggttgagttgtccaagaaacagatagaggaactagcgagagcactcatagaagggaaacgaccgtttttgtgggttataactgataaatccaacagagaaacgaaaacagaaggagaagaagagacagagattgagaagatagctggattcagacacgagcttgaagaggttgggatgattgtgtcgtggtgttcgcagatagaggttttaagtcaccgagccgtaggttgttttgtgactcattgtgggtggagctcgacgctggagagtttggttcttggcgttccggttgtggcgtttccgatgtggtcggatcaaccgacgaacgcgaagctactggaagaaagttggaagactggtgtgagggtaagagagaacaaggatggtttggtggagagaggagagatcaggaggtgtttggaagccgtgatggaggagaagtcggtggagttgagggaaaacgcaaagaaatggaagcgtttacgantggaagcgggtagagaaggaggatcttcggataagaacatggaggcttttgtggaggatatttgtggagaatctcttattcaaaacttgtgtgaagcagaggaggtaaaagtaaagtaaataaaggacaaaagagttggtgtctagaagtggcggagtgttatttgctaatactgtcactttgtaatatcaaattcaattaaaccataaaatttactccatctagataaatatgttttttgaataatggtcaattacaaaacatgtttgattgaatcacctttttgagac

SEQ ID NO: 145307 - DNA, 231 bp, Arabidopsis thaliana landsberg
ttttccctgacataaacatccataaatcttataaacattctaaagatgtcatttttacaaagaagaaaaagaaaagctaacatttttattcaaaatttgaagaaaaccaaattggtaaatgtatagatcattgcttgaacgagacatgaattaaatttcctaaaaacatcttacggcaacaatgctccaacttattcagagaaatatgaggtttacaaaaagtgtatattc

SEQ ID NO: 145308 - DNA, 275 bp, Arabidopsis thaliana landsberg
tctgagaatctcttacaagaagatgaatcctttttgtgtaccttttgcgacaacaaacatgggttctgctatgcttgccatggatctgggttgattaaatttgaaatgctcttaatatagggtgggtgaccaccagcaatttagtactgaccctttttattttgtggtcatgtatcagggatggatggggccaaactattctatttcaactgcttgtgccacaagcaacttttgcattctgaattcagcagaccacattattaaaggtgaagctg

SEQ ID NO: 145309 - DNA, 434 bp, Arabidopsis thaliana landsberg
gcaaataacacgacacgtttaagaaatccacccacatcaccatcatacaaaaatcttcaaaactaagacctttctttttgttgggtcacaagcaagatttcaaatcacaaccaaaaaagcaaaaagaacagagcatgaatcttctacccataaatatatacaagccacacgaatccgcgattcaaatgttttaaaagttcagttgtggccttgtccattattatcttcaggaacatatggttccaaaagcttggcacatgggttaggatcttgatgcataatccttgcagctctttcgaactcttccctcaacactctgatactaaacttgtcgaccacccgacccagatcatggctcgtctcaaacggatcctctatgcatatcaagtgcctatcgttccccacccttctcgtccagtccttctctcgcttcc

SEQ ID NO: 145310 - DNA, 80 bp, Arabidopsis thaliana landsberg
cgtacgtgtacaccatcgtctgatagcggctcccactccgcagatgaatccaacttttcgggtagagtttgaagtacctt

SEQ ID NO: 145311 - DNA, 250 bp, Arabidopsis thaliana landsberg
taaaatcatccaaaatagtcaaaattccagcgatagaagaagcagcaccatctgagaaaacaagaacatcatctgcaaaacttaagtgagtgatgatgggagccaaacaattaggatgaaggttaaagagaccattcaaagctcccaagtccaacgatttagatagcacatccatcacaagaacaaataggtgagaagacattggatctccttgccgaatgcccttttttccttggaaaaaaccaatcaa

SEQ ID NO: 145312 - DNA, 305 bp, Arabidopsis thaliana landsberg
agtccaaatcaatgaagacatcaacatacgtgaaagccttaatcacactctttctttacaaacatcaagaccaaatataattaggggcaaaccaaattgttggtggatgcaataacatatgtagatttttcttctttttacatgaaaaaataattgccagtcccagtatcagaatttgggacgaatacaagcaatttctttgtatatcaaccaaaataatattaggatagtcctgaaacatcccgtacccaagatattccacctggaaacgctctatgaacactgcttcttcccgctgcagtgac

SEQ ID NO: 145313 - DNA, 738 bp, Arabidopsis thaliana landsberg
atcatttgtgacacaagcagcagtatcatcgtcggcatcactcactagcaaagctcgagcttcttccttcttcttcaatggtcgctctctttcttctctgaacccgatctctccgtttctgttcctccccacaagtagatccttcgctctcgtcgtcaagagcactctcgggttggttcctgatccatttacaaatttcatattaatttgattcttagtttgactctgtgtcaacgatttatgtaacttaattgtctaattttagtccactacagaggaaatgagtggaaaaaaatccaagcttttccaatttaattgcttattctcttctctggttttgctattttgttcaggtttaggtgtgaatgtttatagttcaaccttgctttgattgtttgattgataacttgtgttatagcattttaacattaggtggagactaattgcttctttatgggtcttacttgtttggaaaattgtcatactagtacaaccaccttgcatgcagaaggaatggagacaaatctttacttaggatgactttaagtggggatagctcggaaactgtagagatgacttcaactgatatgattttcgagccgattttggagcatggagttttccggtttgattgttctgttgaccataggaaggctgctttccctagtgtttcatttaagaacagcaaagaccgggaagctcctattcggagtcacatttgttccaccatatattcct

SEQ ID NO: 145314 - DNA, 373 bp, Arabidopsis thaliana landsberg
aggacagtggtttgttgcaccgaccaaccgacagaagtcaacttcttacacaaagacagtcctaattgatcctcaacagtgccagacgtgagctatggaacagataaatgggtcggaagaacttcatcacacttagtatataagtaaccaagcagggcccttttcaacatgtggttggcctaagtctactgtcattgcttgatatatatctagcatgccataatgttctttcaacataaatactttcaagtacagagcctgatagtaagaattaatgacttacagaatctcatcgccgacagcaattactgaggccaaaagcacctcgtgtttctgtgattcggtatgtacgtcttttttcagtgaagcaatt

SEQ ID NO: 145315 - DNA, 498 bp, Arabidopsis thaliana landsberg
ccaaattcggatcaaacatggcttctcactcgtcgactctcctctcttctcctactttcgctcctttctcctctcatcggcttcattattctcccaatccctctactctcagattctcccgtccaatcagaaataaacctaatctcgccttgcgatgttcagtctcaattgagaaagaagttcccgaaactgaacgaccctttactttccttagggattctgatgacgtcactccatcttcttcttcttcttccgtcagggctcgtttcgagactatgattagggctgctcaagacagtgtttgtgatgcaattgaagctatagaaggcggtcctaagtttaaagaagatgtttggtctcgacctggtggtggcggtggaatcagtcgtgtgttgcaggacgggaatgtctttgagaaagctggtgttaatgtctctgtggtttatggtgttatgcctcctgaagcttatagagctgcaaagggctcagcttctgatc

SEQ ID NO: 145316 - DNA, 225 bp, Arabidopsis thaliana landsberg
ttggaacatcgtataagacggtgttataggaaggtaccacggttgttgttaagcggcttaaagatgtaatggcgtctaagaaagagttcgaaacacaaatggaagttgttggtaaaatcaaacatccaaatgttattccattaagagcttattactactctaaagatgagaaacttctcgttttcgatttcatgcctaccggaagcttatctgctcttctccacg

SEQ ID NO: 145317 - DNA, 626 bp, Arabidopsis thaliana landsberg
ccaaaatcaaccggaagcgaaaccatccgctcagctcggtctctgatatccgctcgacacgcaggagaaagactcctgagaagctggggtgggggaacgggctgggcagtggaagacgctaaagacaagatctggaaacttctagaagaatacgaagtaggaggagtaatatcagaggcttgtcgatgcatacgcgatctaggaatgccgttttttaaccacgaggtggttaagaaggctttggtaatggcaatggagaagaagaacgatcggatgcttaatctcttgcaggagtgttttgctgaagggatcattactactaaccaaatgacaaaagggtttggtcgagtcaaagatagtcttgatgacttatctttggatattccaaatgcagaagagaaatttaactcgtatgttgcgcacgctgaagagaacggttggctacaccgcgattttgggtgttctacagattcttgactgattctgagtctctacatatatagaaatatggagttggttggttttgggtgttcttcaaactgttctttgtacttgtttccgacgaaagatcattctatgtactttttacataggtttttataaacgtcacatgcatatgttctctg

SEQ ID NO: 145318 - DNA, 556 bp, Arabidopsis thaliana landsberg; identical to SEQ ID NO: 78385

SEQ ID NO: 145319 - DNA, 358 bp, Arabidopsis thaliana landsberg
cggaaaagtcgtctctttatttttgttttttgggttcgccgaagtaaaaaaaaaagaataaggattttctcattaaatttccaaagattagtcttttgtatgtatcttcactttcttttgaatgtgtaaaccttactcattcccgtgatcctactttgggatttcgctagaagaagtttaggtgacgaccttaatttaagtttgtaaatgcaggtcctttctttctagggtttatcgaaattggtgtaaatcttttggaattggtttgagattttttcttttggggaattgcaattcattagtcgtcgtgatccagtgtgtttttaagtgaagtaaggcattttcgatattcggagac

SEQ ID NO: 145320 - DNA, 593 bp, Arabidopsis thaliana landsberg
ccagagaaatgccgggagttagctatgcactttgagaaccaaggaactccaataatgattggtaagtcaagccaaatcactctgatattatagcataagtgaaagcgtagaccctatatataaaggatcagtggaccagtctttaatgcggtttaaagaaacctataagaaggatccgtttaatcttttaaactttgtattgtgaattggttttacttgcaggaggtggggttcttgcatacacgctattgggagtggattacgatgaaggaagcggggattgcgcattcctgatcctggatccgcattatacaggaagtgaagatcacaagaagatcgtcaatggtggttggtgtgggtggaaaaaagctgttgatagcaaaggaaaaagctttttcttgcacaacaagttttacaatcttcttcttcctcaacgtcccaacatggtttaattatcattttcctacatgtaacaacaattactttttttcttatcacagttttagcctgctgtggtctcctgatagtgcaaaaaatggagttttcaagaaatttgaatttcagtggaataaataaaccatattgaaattaat

SEQ ID NO: 145321 - DNA, 158 bp, Arabidopsis thaliana landsberg
agagatgggtaatgcattaaaaggttcacctatcgatactttgatccggtcctgtctcctggaggaacgatctggtgctgtttcgtttaactacgatgctcctggtgctgcctacactctcaagtggacgtttcacaatgatcttggacttgtctttg

SEQ ID NO: 145322 - DNA, 473 bp, Arabidopsis thaliana landsberg
tctctatacccattaaagtaatttagctcctcatagattctcgagaagaacacttccatggcgactaaagtatatatcgtgtatgtcaaagtttccatttttttattatattttttttgggtgattaaagttacgatttttttccaagctaatcgatgggtttcgctgtaaaaatcgtaactttttttctctctgattcacttcaatgacttgacttgatcagtgttgatcgaagaatttttctatggtttattgattttttatctgattttatgtaaatttacttactttgtgattgtttgattggtcttttgattaaagtttggatctttggtacttctgtttgtcaatatgagattgaatggattgtgatttagctacttggtggtgggtttgattccaattttgactttttaagttctttgacatttgtaggtactactctatgtatggtcatgttgagaaaatggctg

SEQ ID NO: 145323 - DNA, 2159 bp, Arabidopsis thaliana landsberg
ttatttttttttttttttttttttttttttttttttttttttatcttttacaatgaactctccctccatgttcaccatcatcctctccaaataaatatattgtcttgtaattactatggtctaaaaggacaatttggtatttatcttgcctctaccccacataaaaagagttagtttgcaaagaaaactaactccaacattagttttttaattatgatgtcaaatttggttatccactaatattactcttaatattttgtgggaaggcccatggtgtctcttcttttgttagcggcttagagcatccccattggggaatcctaattaaggactccttacaattttttaatagtaaattttgagtaaatgagagtttagagtttttggttgaatctttataatttttagtgtccaatggtggaatccttaagtgagaaatttttattagtttgtgaaaaagagtgttaattgggtaaaaggaagagtgtgtattaggttaaagaagagtgtttatttggtgaaagaagaatgtttattgggtttgttgtagagaacaagaaaagtggatacttaaaacaataacagtggataaaagaagagtgttttggtatgcatatacagaggcttcaaaatttagaacaatgaaaacaaaattattgtttagcatacaagtgatgtcatagaatacacaataagaactagtgttttcggaatattattttgtggtgtacaagcattcaaaccaaagtacaaacttgtggtgacttaaaacatgtggtctcttttatacaagtaatgtcggcactggagtgatttagagaaggtggaagcattatttaagtctgtaacaaaacaagaaaccaacattaagaagagacatacaagaacattaacattaagacaaccatatggaacttaaactgaacacaagcttgtttgctacttaaactaaacacaagctttattcgaactaaaactgaagacaagtcatatggaacttaaactgaacacaagtcacattggaactaaaactgaagacaagtcatatggaacttcttacgaacacaagtcatattgaaacacaacacactaacactgaagactaaacattcacaaataagaaaacatagaatacttaaactaaagattaagacaacatatcacattaagacaagttttattaaaactgaacacattaagctgaacactcgtttagtccgttaacacaagaataagcaacaatatcattaaagccgaagtgatacaagtcatattgaacttaaagtaaagaaaacagacatacaagttatctaagctaaaaccacttagagaacatggaccataacatgacatacaagtgaataagcagcaaaagagtcacatttttatcttaaaaaccaaaagatcaaacacaaatttgaacataaagcaaagcccagaatctgtatacgaatccatatactgaattcgaaatcaattgttacagatcaacttgtaagaagcaattaccagatcaaaagcaccagactttaacttgcaatcaaattcaacctaaacccagataaacaattaagcatcaaaaggagcaaaaaaatcaaaacttcaatcacatataagaaccttaccagcagacgaacccacaagcaggatcctatgagcatcaacattctaaccaatccaccgaaaaacagcgccacatcgttgacctcagcaaagccggtaagagtagctcttctggtggattttctgacacctcttcgatcacgaatcttgtggatcgtatgagaagagagacatgataagaaaagagacgatgaagaatttgatccgtcgaagtcgaaattcggagaaaacaggagaggagagaggagagaaagaaaaaaatagtttgggaatgaaaaagaaaaaaaacacgggaaaagttgtcatccaataatatacaatatacagccacgtcagcgcacctaatacacccaaaaataccttaaacaaggttcgcaccttggtttattacaccattctgatttaattttttgctattattcataaggattttcttaaaaaacttccaaggcccctgcaatggacatgctcttatgattcttgaaatatccttgtccgtaaaaaggtagttcagttggaagagacagcaaggtttt

SEQ ID NO: 145324 - DNA, 240 bp, Arabidopsis thaliana landsberg
caatttctcgcctctactcgcaaaaaccctaatttcatcatcttcctatctgattccaattatttcttctacaagtttccttcttcttataatccatcgtttcttccttctatcgcgtttcacaaagcttgtcgtttttctctccttgtgggttggttaggccaatttgtttcgattgagcgattgaatctacgagacgcaacaatctctttctgggttagggtttcttcacataacctt

SEQ ID NO: 145325 - DNA, 592 bp, Arabidopsis thaliana landsberg
cagctgcaaacttgaggatattcttcttgaaactgatcggattttacgaccggaagggattgtgattttccgggatgaggttgatgttttgaatgatgtgaggaagatcgttgatggaatgagatgggatactaagttaatggatcatgaagacggtcctctcgtgccggagaagattcttgtcgccacgaagcagtattgggtagccggcgacgatggaaacaattctccgtcgtcttctaatagtgaagaagaataaaacaaaaacaaaaaactcctcaggtattgtagttacagtccctgtactttacattgtttaccagatttggctacgaacttttgttaagatcaattaaacccaaattccttctttttcctttgttactgttatcttatgattgagtgtgttttttctttctttctttcaggttaccaagcttgaagtgtagatctattttacaacatctggaaaattcttatcaaaaaaggaaggaatcagaatttccattaaagaaaggtgtcaaaaaaaagttgtaaaactatatagtagtgatcaaggcgaatatgtgcaagtatgtgcttacatttgttc

SEQ ID NO: 145326 - DNA, 480 bp, Arabidopsis thaliana landsberg
tttgaaccagcaccgaggagaggagaaccagacgtcacccgaaggactccagactatttcctgtgatcactggacacagactcatctcaatcagcagctgcaggcacccacaagtgaaaagtcacagttggctaactcaagattctggtcctatgcattgtgttcaggttgctctgtttaaaattcaacttagtgcccaccaccggaatatagtgtgtattataggcgaagaaggcttcttatcttcctctataaccaagaaaagaaaaaagatacccattatgaacattgttttgttgatgttattagcttcttcttcttctcccttctgcatcagaatgtggtttcatgtgagaaatcttctaattttatttcacgtaattcgttcttgaacttctctgatttttgaatagaaccttgaaattgttatgtttatttgttcttcaaagcttgatataataacaatagtcgctgaacgca

SEQ ID NO: 145327 - DNA, 804 bp, Arabidopsis thaliana landsberg
tcttccttagttcctcatcaaactcaaaaatctctatctatacggttttcatcatcccccactcttattctttctcacttttgaattaatatatacatacataacatcttagtttatttcatgcaggggagtatcatactatcttcatcattcaccaccagcattgatcatcatctgttggaaaatatgaagagaacacatttggcaagttttagtaacagagacaaaacccaagaagaagaaggagaagccggtaatggtgacaacagagtcatcatgaatcactacaagaattacgaagctggggtgatcccatggcctcccaagaattacacttgcagcttctgcaggagagagttcagatctgctcaagcacttggaggccacatgaatgttcatagaagagacagagcaaaactcaggcagatcccttcttggctcttcgaacctcaccaccacacacctattgcaaaccctaaccctaattttagctcttcttcttcctcttcaacaacaacagctcatcttgagccttccctaaccaaccagagatccaaaaccactccttttccttcttcccggtttgatcttttggacagtactactagctatggaggtttgatgatggacagagagaagaacaagagcaatgtatgtagcagagagatcaagaaaagtgccatcgatgcatgtcattcagtaagatgtgagataagccgtggggatctgatgaataagaaagatgatcaagtcatggggttggagcttgggatgagtttgaggaatcccaaccaagttcttgat

SEQ ID NO: 145328 - DNA, 409 bp, Arabidopsis thaliana landsberg
aagtttcagacataacatctcttcccatctctctccctctaagcaattaagcagacaagacactgatgatatgagacgaagagaaagaagtcttatcactcatcgtttcctcttatgaatctctccgccgaccaagctcccgtcaccgccgtcgacgaactagctccgccttctcaaccgcatcgcttatctacatcatgtgatctccacccagaagagcgtttctccggtttctgtccttcttgtctctgcgaccgcctctccgtcttagatcacaacgccactccgccaccgtcttcttcttcccgaaacctccctctatctccgctgtttcgttaaaagctctcttcaagccctcctctagtggtaccaacaactccaacggaaacggtcgggtcagacccggttt

SEQ ID NO: 145329 - DNA, 592 bp, Arabidopsis thaliana landsberg
ggcagctgctgtttagaccatcgatccgacaatttcatagcgaaaaacctactgtgagctacaagaatctgcctatgaacacacatggtgatactaatcccatctttagagctcagagtcagcttcacatcactcgaattcgggtcattgaactgattcccggggctccgaatcaccagaagatccgaaatccgttgcatcgcaagcgcttgcttatcctgagctgaaataacaagatgattcacattcgtcgtcctcgcagccgtagccgccgcagaagaagacgatgaagacgacgacggagatggaagcacaccgttatggatctgaactggaactttccctatggtatcagcttcactagccatcatttcgaacagcgtcggacttgatcgtgtcttgtcgtgcatcgccggaggcggaggaggagacattggatttagaagacctgccgttaaagcggagttgaacttagtgaagctcgaagggaaagaaaagtcacgcggcgaactgtaaccgttccccgccgtcgtcgtagccgtagagtaatccatgaccggtggagatcctttcggatccgaaaacgaagttg

SEQ ID NO: 145330 - DNA, 495 bp, Arabidopsis thaliana landsberg
atgtttgggattgagaatcacgtcgagatgcaaccattaatgggatcagaagatttctctttctaccaacaagcaatcccgggacattttagctgcgttggaatgcaaaacaaagctcgttcaccaatggcgagccctcactcgccgtactttgaagttaacgaagaattactaccttatggtgcttcccttcatgcttccatggccacaagatatcttcttgaactaaaagcttcaactctaaataagagtaacaaaaaagatgaactttgatgccaacaaacattggcttctcctattcttctactctgaaaaatgtcaaaacatggtaacagttttttcttttttacagagcctgccatgtaaagattaataaattgttatgcagtgtcaagcttctattaaatccaagaaatgttattactgcaaacaaaaacagatttgggccattgcaatgagagagctgaaacggtcaatttaaacaaatcagattga

SEQ ID NO: 145331 - DNA, 155 bp, Arabidopsis thaliana landsberg
ctttgtttgtgtcacggaacaagaatctcattcataacccaacagagaaaacataaataacaactcaaatctgtgcctattgctagtactagaatctattgtttttgatacagagatttctcttggagaatacttgtcttgagatttgtctgttg

SEQ ID NO: 145332 - DNA, 253 bp, Arabidopsis thaliana landsberg
ccatttctagcaaaacaattctctcttttgtcttgaagataagtttcacaaaaaggtctgcttcgcctcttctacgacgttgcagaaactaagaagagatgggtcttctctccaacaggtttcgtcttcccctctttgattttctgagaactctttagttattctacttaacgatcatctcaagaaacttttgtatctttttgaacagaatcgatagatcgagtttgaaacctggagatcatatctactcctg

SEQ ID NO: 145333 - DNA, 148 bp, Arabidopsis thaliana landsberg
cccgaccgttgaaagcactctttcaagtcgccgccggtaactctaaacccgccgtaccaatatttcagtaccctccattaaccctcatcggaaagatcttcactttgccttcatctttctcaattcctcaatccttactctctttcag

SEQ ID NO: 145334 - DNA, 317 bp, Arabidopsis thaliana landsberg
tgagacaaaagaaagaaataaggcatggagaaaaggaatgtagtacactaataatcaaatggaatgagaaatgaagccacaaaagtatctgcaatcaaaatatcctgctatctccatctcaagctctcaatagtatcctctccgaaagataataaatcccaaaagaattcagtcccaagcaatacagtggaacaaacaaagacgacataaaaataaatgcaagtaacacagtcacaaaagattccacttagatcataaaccagacgagaacagatccaaatactaagctcgaaaccatcttgctagctccattctgc

SEQ ID NO: 145335 - DNA, 500 bp, Arabidopsis thaliana landsberg
tcctcactcaactctctcattctcactaacagagagaaaaagcaaaagcaaaaatggctcgatctttcgctattgctgtgatctgtatcgtcctcatcgccggcgttactggtcaagctccgacttcaccaccaaccgctacaccagctccaccaactccaacaactcctccaccagcagcaactcctcctcctgtctcagcaccaccaccagtcacaacatctcctcctccagtcaccactgctcctcctccagcaaatccaccaccaccagtctcttctcctcctcctgcttctcctccaccagctactcctcctccagtcgcttctcctcctcctcccgttgcttctcctccaccagcaactcctcctcccgtcgctactcctcccccagctcctctagcttcccctcctgctcaagttccagctccagcaccgaccacgaagccagattctccatctccatctccgtcatctagcccacctcttccatcaagcctt

SEQ ID NO: 145336 - DNA, 367 bp, Arabidopsis thaliana landsberg
gtcttattccacgtacattagcaacaccagcttcctctctctcgcttcaaagttcactactcgtggatctcgtcttcaggtacacatcatcacgattgattttccttgatttccaaattccatttctctttgtgcatacttgcattagattcttacaggttttctgggtttgtgtttgatttgggtatggtctccatgatgcatcaaattctgagaattcccaaaagaaactgattttgagctaaaagttattaacgtttgatccgtttaggtccatactatgatgttctgtttttgttcatgaaattgaaagttggtccctatgcttttgatttgtcatcagtgtacagtatcaatggctcgatct

SEQ ID NO: 145337 - DNA, 280 bp, Arabidopsis thaliana landsberg
gaaatggtggattttttggtggatgtgtgggagcaagaaggcttgtatgattgatttgcaactctttaaacttaatttagtttcatcttatcttttatgtgtgtaatcaaaagaagaacttggatttttagacttggcttcctgaaagtaaaaaaacgatttagacctttttttttggtctttgtgtaataatcattttgttacacacggaattgtattattatgacaaagtggttcagctattttctaagtgatttctcaagaaaaaattccaaatcaa

SEQ ID NO: 145338 - DNA, 372 bp, Arabidopsis thaliana landsberg
aagtaaagaaacccacaatgagttcatcaaaatgtttgtgatgttagtttcttagtttaagctatgatagtcaaagaaaagtttacttcacggagtatgcggagagcggcgggacgagtgaacttcctggcgaagaggaagcacggtgatggtttccctttactgctacaccattctcgccggtattcagtctcgtagttgatattgtcgattccctgagaatcaatgtgtttagttagagattctatttatgttttaagtttgtaagagggctaaagccatggcatgaaaaaaagaacaagagatacatacattgtaatggatagtttcatttctaccaaataaaatgttggtcttacggatgcttacctt

SEQ ID NO: 145339 - DNA, 439 bp, Arabidopsis thaliana landsberg
tttatgtttagagcaataatcataattgaaatccatttaaattttacagtcgccattacaaatttctgccaagattgtgttcatagttatttcgtatgcaacaggaatctaggaaatatagatagaagcaaacaatacatattgaaacactagtgcttgatctgggacaacatggtcctgacatctttactgttcggcctctgttttggatcatccaaagtacagtaacaggcgatcttcagaaccagaagcatctgttcatcgaatccttgatccatcaacttcggatcaatcgcaaggctaggattttccgatgttattatgttcctcatccactttatcagactcatctcgtcagtatgctgaaaaaactcatctgaaggaagcttcccaatcaccagaatcccaagaatcactccagaactatagatatcacatt

SEQ ID NO: 145340 - DNA, 769 bp, Arabidopsis thaliana landsberg
attccgatatgaatgagttcgtcgccgctgcaaagaagctcgtgaaagacgtagggatgctcggcggggtaggttttggcacgtcagtcctccaatgggccgcttcaatcttcgctatgtgagccaaaagacaaaaccatataacctctctggtttttgtttgaatcatatattgatatgatggttcttattgttttgctttgacagttatctgttgatattggatcgtaccaactggaaaaccaaaatgttgaccacccttttagtaccatacatctttttcacacttccttcggttatcttccagttctttaggtaatcaagaaaaactcttctttaacatgatgtgatggagttcttttgataatgtaatccatattcgatataatttcacagcggagactttgggaaatggattgctctcatcgcgatcatagtcaggcttttcttccctaaagaatttccaggtcagaaccagcagttttcatgactaaacattagtttgaaactttgatcttgaaaatcttctttcttttttgcatataaatgtagagtggctagagattccggtagcattgattcttattgtggtggtgtcgccgagccttatagcttggacactaagagaaagctgggttggagcagtcatatgtctagtaatagcatgttaccttttccatgaacacattaaagcttctggtggattcaaaaactcttttactcaaaagaatggaatctccaataccattgggatcgttgccctcctcgt

SEQ ID NO: 145341 - DNA, 878 bp, Arabidopsis thaliana landsberg; identical to SEQ ID NO: 53305

SEQ ID NO: 145342 - DNA, 436 bp, Arabidopsis thaliana landsberg
tttctttttttttttttttaaatttaatgttaaattagattcaaaaagtaaacaaacatttgtacatcaagtgcaacttatacttagagagtagaaagaaaagttataaagagatttgaaagcttaagatcttgattgaaaccataactggagagccttctcatatcgatagtctccacttgcggtgatggttgatatttgatttcttatttgcttgtcaagccatcggattaattgagctgctgtatttggacgttccccatgtcttctaccatttctctcatgccatatggtgtgaatggctgcttggaagatataacgtgctagaaaactctttgtactgtcccgccaagaagtactgagagaggttactaaagaggaccaacttgttgagaacttcgcctgatagatattgtttgctagattgctccaaatt

SEQ ID NO: 145343 - DNA, 232 bp, Arabidopsis thaliana landsberg
  unsure (1)..(232): unsure at all n locations
ctccatgttaaatatgtggggaggatataaaatataaggaaatttgaaagatccattttgagcaaacaagcaagaaacacttgataaaaccagtaaccacaaactcatatcatccatcacctctctctctctcctttcatttatctttattctagaagaagagcattttatcaccttttaagcgaangaggcacatactgtctagacaaactaaacagatctttaccctcaa

SEQ ID NO: 145344 - DNA, 400 bp, Arabidopsis thaliana landsberg
cgaacaagaaccctagaattcgcctcctctttccaaaattcccaatttttgtaatgacgggatagaaaaattcccaatgtccgctttatctttcattctcgattagaattcttcaaccaaaggtcactctctctccgttccattgcttctggatttcgtttttaaggtttgcgttcttctttttcttcttcgtcttaagagagtaaaatctggtgttgaagaatctattttgagtcggaaatttgataaatttgtaatcttccgtactgggttttgattgttgtcttgtctctctaattgtttcattcttcttatgctacgaatttagggttttacatttttcctgccttcttttacccatcagaggaagtttcaagccattttgttgtaagtcatcttt

SEQ ID NO: 145345 - DNA, 157 bp, Arabidopsis thaliana landsberg
ggtattgattcttgacattattgagtcaaagtacataatacaggaaagaaggaaattacattttatgcatacgtgtcatataatcaaaagaacaaggagtagcaatgaaatccatggttgtctttattcttgattttccagagatttctttagctct

SEQ ID NO: 145346 - DNA, 370 bp, Arabidopsis thaliana landsberg
aaaaggcatagatggacaatatttttattatttttctctttttccaatttttcctaaagattataaattataaaaaacattcctttgaaacaagaccaatcatgataatattgacaccaaaatttcaggaaatttttcttaacaattaattttggacttcgttatatgcctatttcgtatttatctccttcctaattgtattaacagaaacagtgcatttgaataataaaaattaacttatttctcctcatatatgagctacgagatttaccattcttttatttcatttaatataaccctgtaccaaaatgcaaacaattgtgttattgtattatgataaaaaaatccttttattttatatttctttggt

SEQ ID NO: 145347 - DNA, 523 bp, Arabidopsis thaliana landsberg
gtcggttggatccgaatcagatcggatctcagctagaatccggttagtctcctcaatgatgttctggttaactgcatcggcgcttgagcttcctaggttaccaacaccgatagtgccacgtaagacgagaattgtgacgaaaccacagagaattgtgatcttgatgttgttaaacgtcttctgcatctgtctacctcgaggtaacaaaccaccacgaccacctcttcctccaccgttggttaacgtcgtcgtcggaagtcctccgccgcttccggaaggtcttttatgcgccggcgaaccatcttgacccattttctcctccaacgtctctctctctctatagatttcacttacaggtttgcgaccatcaactttgttttcctcagatcagtctgagtatgtttctctctctctgtacttacttattcacggatctgagaaaaagttcagatctttagcatgattccgatcggggaaagagaaagagaaagatttgtcgatctgaagaaccctaatttaaaaa

SEQ ID NO: 145348 - DNA, 468 bp, Arabidopsis thaliana landsberg; identical to SEQ ID NO: 54825

SEQ ID NO: 145349 - DNA, 712 bp, Arabidopsis thaliana landsberg
gcgtttcagagtcaccatgttttacgacgcgtgtctctttttcagccggttttcttctcgctggttacatcagagcttcggcgatattatataactcaacgacgtagctgttgcattttttgtttttgcaatgatcttcatcttcatgaccggataaactcttgtaagtgtatttcgttttctgtaattctgttaatgatttcttgggtttcatcaagttcgttactttttgtatgttctcggtccaatctttgggggttggattgtaaatctcatatctgattatgtagtgtatgtgtgtgtgattttcttgttgcagagagaaagattcaaagtgattatctttgtggatccctccattgctatgtggaatttagcttcaaaatcgatcagagaaggttttatatcgaagggagaagaagctgctacaaaaccaagaagagctactttagatagatcaggagatggaagaaagacaacaaaggaagaaaaattggagtgtcccatttgctgggaatcattcaacgttgttgagaatgtaccttatgtcttatggtgtggtcatacaatctgcaagtactgtctcttagggcttcaacgtgccattgtcatcaaatcctctgctttaccattccagcttcccttcttcgttgcttgcccttggtgcaatattctctctttaaggctggtttgcaatggaaccatcagattt

SEQ ID NO: 145350 - DNA, 199 bp, Arabidopsis thaliana landsberg
ctccatatgcttattgccttggctagacaccaatgtttattgcccatattgtagaactgatatttgtaattaaatgttatatttttgatgtcatatttcgagatgtttttttatggcttatcttaggttttaggaatttaaacataaaatgactagcgcaatcaataaaattttaactaaatttagcctctttttataa

SEQ ID NO: 145351 - DNA, 575 bp, Arabidopsis thaliana landsberg
tactctaatggacggcacattttgtctgctggccaggatcgtgccttccgcctgttctctgtcatccaggtaagatacgatacagatttagtaaccaattctatatcgagatttaatacaactaactagcatattgatagtctgtaacttttgagctatattgtagacattgactattcatttgtcactttacaatcacaaatgttaggaaattagtcttccttgggcattgaacagataatcataaaagattgttgagttcatttttgtcatattaattaattaattagcaatcattttcctcatcatgtactgtttagacgcaaagtttaatttttcttattccgtctttcattcgccatatcttactgttattttgatgggtatttcttcaccgacctgtttgtttgattttttcatgaatctgattgttctcttaaatgttgagttattgtttcttaatttgtggtctgtattcttactaaagatctgatgcccaccgacgataacagtttttaatttacattaattaaatcatcaggagcaacaaagtagagagctttctcaaagagaca

SEQ ID NO: 145352 - DNA, 473 bp, Arabidopsis thaliana landsberg
tcctgttgcgagggccttgcacgaaaccaaaccgccccccgccccaatcaagtaccagttgcttcgcagcgcgggtagcctacttaggttaggagggcattgcccctcagttcttactaacctccggtgtgtaatcaacatgttgctagcttcaactcggttgaataagaatcattgattctctctcctgtccatttcttattcattcagggcgctcggccggtgctcctttctcaaaccaaaacgactctgaacgttagggaagataagaccacctgagcgaaccgatcaaagggacttgacttatccgaaccgaacgatagcagcttaaacttaaagctaagcctctcacgagcagcgtcgctgcgcggggaggagcatctcaaagtatggggcaaaggatcaagcgcttttactttgtctcccgggatccaccacaggttgggtttgagagccgtgtgatgggtgactat

SEQ ID NO: 145353 - DNA, 95 bp, Arabidopsis thaliana landsberg
ctcccctcctgtaatcatagccatatccataacttcctcttcctctcattcccactcccacattcctatttccgtatcccacgtttccatttcct

SEQ ID NO: 145354 - DNA, 338 bp, Arabidopsis thaliana landsberg
caagcaaaaattcttcatcgactcaaattcaaaaactcatctctctctatctctatttctctggttccatagctcaccgtcgcatcgcagatctactccttccgcaataaattttaccggcggaggtatcagatctcgccgatctgttgtagcagctactgtattttgggcttctcatttgatattggggaaacgaggagtagaggacgatggaaaatctgatctctctggttaacaagatacagagagcttgcacggctttaggagaccatggagactccagcgctttacctactctttgggattccttgcctgcgatcgccgtcgttggtggtcag

SEQ ID NO: 145355 - DNA, 274 bp, Arabidopsis thaliana landsberg
aggaactgagagctacgacagtgataaggaagggggcttcgaagattacttttgatcatgaagtgcagacttgatctcttcacaagatttttggagttctgacaatctctttactccattgttgtgccacagggcaaatgttatagtgtttacacttagttccaactgcaatttgtattttcctcaggaatagatgctgcaataactatgtagggtcattaagatatgtcaagttccatgttgttaattgcatacacaagccatgtttgttact

SEQ ID NO: 145356 - DNA, 201 bp, Arabidopsis thaliana landsberg
cgaagatattatttttcatggattgagcaaagaagaggacgataatttcgaaaatatcgcgatacaatggacaagttctcgtacaattcgtatccagattcagctgaatcgtcgccaagatctcgcgatgtcgaaattgaaaatccgtcgccatgggaggaccagcagcagcaggactacaaggtgaagctcatgtgcagc

SEQ ID NO: 145357 - DNA, 250 bp, Arabidopsis thaliana landsberg
aacgaactcgagaaaagtttgttcgatccgtacaaactgaaactaaagtacggaaacagcgagatttggtttgtgcgatagaagataatggaaccaaattatgaggaagatgtttttctcgccaagtatcaatcatccgaacttaagattgcttctgaatttcttacgaattggttgcctttcttatctagagatctctgcaacgactgtgctcatgttctctccgatcgaatccgttctctagacccag

SEQ ID NO: 145358 - DNA, 186 bp, Arabidopsis thaliana landsberg
taaacccttattttgggcccttaacaataaatcattaacaatggtaaagaccaaagagacattgtatgtttgtttcagacaaacttaaaaccaagccaagctagaactagttcctctccttatgtcatcgtgtattcagctgcattccttctcataatccagtcgagaaaaaccgaatagtttcag

SEQ ID NO: 145359 - DNA, 73 bp, Arabidopsis thaliana landsberg
aatgaatgttccacaacttcaacttcctagttccattacgaaaacacgctactcaaagaacccccctgcaagt

SEQ ID NO: 145360 - DNA, 306 bp, Arabidopsis thaliana landsberg
accaagagtgcgaagtagctctctgtctttcgaagcagaagtgagactttgacgacaacagtgggaggaactatgagttcttgtgttgtgacgacaagctgtttctatacaatttcagattctagtatacgtttgaaatcccccaagctcctcaatctggttcgtttctttgtgtgacatggaaattgctgtggttctgtttcacatgaatctatctcttttaagcactaaagctttcaaatttcgtttccttatagagtaaccagcagagaagacgctctcttaggtctcgaggtggtttaaagg

SEQ ID NO: 145361 - DNA, 360 bp, Arabidopsis thaliana landsberg
atgttgcgtctgtttgggagaattcgagttaaaggaagagttggtggaaatgcctttatgtaaacacatatttcatctcgattgtattcacctttggctttattctcacaacacttgtcctctatgtcgatcctctgtagccatctcctccaccaaaacctctgttgatgacgacaacgaccatccagattctcctcaaacgtcaccggtttgattcaaacccccgaaggaaataagcaaatacacaagttttgttagtgaatagatcgatacaagatgtaaatcttaattttgctgatacaagatatcaaaatgtaatccatcacattatatatattggttacacagattcattcatat

SEQ ID NO: 145362 - DNA, 313 bp, Arabidopsis thaliana landsberg
gaccgagttttaacagtgtagcccatataaaacccatcaaaatcaaatgacagatatttgtcattttctaacgagacattgtcagtgaaactcatgaaacggccaaaagatgcaagctttgtaaactgtaatgaaactaaagcgtccaattagattacctcagtagaagaagagagtttctcgaccgattttctcaactgggtcaaggcaagttcttggctttcctccatgatctttggctctctcagatcctaaaaaaatctcacagagaaataaagagagagccttttgtggtccgtacagacgcacgata

SEQ ID NO: 145363 - DNA, 391 bp, Arabidopsis thaliana landsberg
caatggaagttatgaaaaagtgggcgtcgctgaagaagaagaagctgcaacaagaggaggaacaagtgacggctaaagaaacacagacatggcagcgattaaggaatctgttttcaacgtcgtcttcgtcttcgtcttcgtcggcgaagtggaagcgagttgagataataatgctgacagagatagtagacggagtagtttacaaggtcatgtatgtagttgaagctttcgttctcgtttccacgctctgcttcttctacctctgttgtggatgccacatttgatccaatttttgtttctctcattatattattctttccaattcatacttcctctcttatggggtttagtgttagtcttagttttatacaaataagcttatatgtaatct

SEQ ID NO: 145364 - DNA, 371 bp, Arabidopsis thaliana landsberg
gccgttagtcatattgagtgttagttgttccatttagccgagctctcttggtagcaagggttcgataccattctcttccaatgtggttaaatgtgtaattgtataaagttaattcatttttgttacttatatttaaaaaatagatatagaattgttattcataactcaccgtagacaaactaaaaatttagaaagccaaattggaatattcaaattttagcattttaatattcatttggttgaggaggaagagccaccaaccaaaccattgagtctgatcatcttgatattattgtaatttatgtttgtttaatatgatctttttaatttcatttaaattaatattattggttattataattaatgaaaat

SEQ ID NO: 145365 - DNA, 1036 bp, Arabidopsis thaliana landsberg
ttaaccatcacttcaaagttcaaactctttccaaatttgttttttttgtttgatccaaattttaacaaaattatggatcgcaatttcctcctaacagttacattgatctgcattgtcgtcgccggtgtcggtggccaatctcctatctcttctccgaccaaatctcccaccactccttctgctccaactacttcccctactaaatcccccgccgttacttctcccactacagctccggcaaaaagtccaactgcttcggcttcttcaccggttgagtcaccgaaatctccggctcctgttagcgagtcgtctccaccaccgacacctgttccagagagctctcctccggttcctgcaccaaaggtttcttctccagtgagctctccaccggttccagcaccagtagctgattctcctccagctccggtagccgctccggttgctgatgtaccggctcctgctccaagcaagcataagaagactacaaagaaatcgaaaaagcatcaagctgcacctgctccggctccggaacttctcggtccacctgcaccaccgactgaatctcccggacctaactccgacgctttttctcccggtccttccgccgacgatcaggtacattagctttatatcaacaatgttgatatttatctaccgtcacaagttcgagtatcaatgttaaaaataaccaatgagacatttaataacagtgaacatatattttcaatttttcttatattgattttgtaattacatatttgattaactaacatgaaaatatggaatttaatgcagagcggagcagagagcacaagggtgttgaggaatgtagcggtgggagcggttgcaaccgcatgggccgttctcgttatggcattctaaattatttatcatttcacctctgatattttttagtttttatatttttgaccctaccattgtctctttctttacgaatttggtaatgagtattatttaattgattatacagtttgttttcttttattttatttatatggaaataataagaattcat

SEQ ID NO: 145366 - DNA, 372 bp, Arabidopsis thaliana landsberg
aaaaacaaaaatcagtattttcccttttattctgttcttgtaaatgttatctaccggtatatttcacttcagtctttttcttttacaaaaattataactatgaccccatcttcctataattgaagtatggaaccctattgtcaataacaacccaaatcatcatcatttgactctgttcttaactctcattctgatgctgcttaagcaaataagcctcatcgtgttcttcagctccaaaacacttcacttcgatctcatcttcctcttcattgagtagttgcatctctgactcgatcaaggcttgcatttttgctctgtctcggtccctcgggtatgtgcaatataggaacgagtagattgtgcaacagatca

SEQ ID NO: 145367 - DNA, 161 bp, Arabidopsis thaliana landsberg
aacctctttgatgtcacggaaccaagatttgcgttttgaggaatcaatgccaagtgaagtacgagaaggattgtgcttgaaggtgttccatagaaagacatggtatcccacagctatcaacaaactcaatggcactacaatgctggctgtgtcgatcttca

SEQ ID NO: 145368 - DNA, 2584 bp, Arabidopsis thaliana landsberg
ttgattctcttcaagctgttacttcttctgatcctttattctgcagatctcacagcttcaagctcatgtcgaagtgaatgtggaggatgcaaatgtggaggaattgcgatcccatacccttttggaatcggtaagggctgctatctcgagaagtcatacgaaatcgaatgtcttaatacttcaggaaagcttgtcccctttctttctgtaattagcaaagaagttgttagtatccatcttccgagtgcagatagtcattttgcttatgaagtatctgatcaagaacgtcatgaatcatttggcttagttcgtgtcaaaatcccaataacatccattggatgttcgagagatggaaaagagtctggatcggttctaaattttacggacagtcctttttactttgggattggaaacagcctggttgctgttggttgcaacagcaaggcgtcgttgactaacatcaatccgagcaaggtgggatgcgagttgaattgcactgcaagcaaagactcatatagcaatagcatcccttttgtcgaagcggtgtgctcaagcaacgttttaccctattttcaggaccaaggttgtccagaagagatagcagaagaaacaggatgcaatggtatcggatgttgccaggcaagtctacctaacgagcctcaacaagttattggtatcagaacagagaataatgatggaaactctacaacatatgtagagtgtacaggctcggtcttgttaacagatgagatctacgctttgccgaaggcgaccaaaacagaacacttacttgctaagagatatgctacggttagtctaggatgggtaatccagacgagtaatagatctttcctggactccttggccttggcctgcaaagacagagaagattaccgcaattctactaacttggaaagaaagtgtacatgcggcagaatcactatatctgagacaagttatgcaaactgtggatgcacctatggttacacaggtaacccatatgttttgaacggatgcaaaggtcagtatatgttccttccttattctctcttctctctttttgtgtgcacgcatcttttgagattttacaaatcatccctagatgttataattataagtttttctttcatcatttgattataatatgtcatctttcaaatatagatattgatgaatgtaaagtcaaattcgaatactgtggaaagacagaaacttgtgtgaattttgaaggaggctatcgctgcgtgcgcgataaaactaaagcgataatgataggtaggtcactgatttatcttccaagttgagtcacaaacatgtagaacttttaaaaagaaagtgatgatcaacctgtaatattcttgtgcggttttgcaggcgcgggtacgggttctggggtcttagtcctagttggtggattatggtggttgagaaagtttctaataaagagaaggatcacaaagagaaagaaaaagttcttcaaacgtaacggaggactactattgctacaagaattaaataccagagaaggctatgtcgaaaagactagagtcttcaactcgagagagctagagaaagccaccgagaacttcagcgaaaacagagttcttggacatggtggtcaaggtactgtgtacaaaggtatgcttgtagatggtagaaccgttgcagtaaagaaatccaaagttatagatgaagacaaactccaagagttcatcagccaggtcgtgattctctcccaaataaaccatagacacgtcgtcaaactcttgggatgttgtcttgagacagaagttcctatgttggtttacgagtttatcatcaatggtaacctctttaagcatatccatgaagaagaatctgatgattacactatgttatggggaatgcgtctacgcattgctgtggatatcgcgggagctctttcttatcttcattcttctgcatcttctccaatctatcatagagatatcaagtcaacaaatatattactagacgaaaagtaccgagccaaggtggctgattttggaacgtcaagatcagtaaccatagatcaaactcattggacaacggttatttcaggtacagttgggtatgtggatccggagtactaccagtcaagccaatatactgaaaagagtgatgtttatagctttggagtgattttagctgaacttatcactggagataagcctgtcataatggtacaaaacactcaagagatagttgcccttgcagagcatttcagagttgccatgaaagagaagagacttacagatatcatagatgctagaataagaaatgactgcaaaccggaacaagtaatggcagtagcaaaggtggcaatgaagtgtttgagctcgaaaggaaaaaaacgtccgaatatgagagaagtttttacagaaatggaaaggatttgtacgtctccggagattcacaggtgcagaaccggattgacgaagaagaagaagaagatggagtagaagaagaagaagaagttgtgacaatagtacacagaggagattcttggagcattggtgttactgctccagcctcaagtattgtggcttcacctccatcttcagat

SEQ ID NO: 145369 - DNA, 559 bp, Arabidopsis thaliana landsberg
taataagaagatagaagtgacgtttgagaagcttcggattgagctcttcttcttcaatagattgattgcagcgcaagtggtccagccattcttgcagaaaaagcatgagacgaggttggaaccaatccgtttgatctctagtttggtaggcttgcctgtaaaccacgcggtggaactcaggagacagctggaaaacaacaagatagaatatgagattagaggtaccttcaaagtcaaagctcattttggaatgattcattactcttatcagctgcacgggaggtgccaacttcagatgaccggtccaccaaccggaatcctgatttctcgtaattgcacgacgaagaaatgaaaaagaatacggtacagttctctgagtcagtagtcatcttcaaagtctttagctttggcatgtttattcaactatatttctatttgcttacccacaacttgtataaaagaaaaagacctagtgaactctatccaagaaccgagatcggagtttgtactatttccaagataaagaaactggaaagatattatctttctatgaagcaga

SEQ ID NO: 145370 - DNA, 269 bp, Arabidopsis thaliana landsberg
atggtgaagaagttgaagcagagtctgagatctggatcgttagagaaaaggaaggaaaaggaaaaagacattcaggaagaaaagtggttcttagacaacggaagcatcttcttgaaagaacttattgctgattgtaacggtaaatccattcctatacgtaacttttcttctgaccagatcttgaaagctacaagtaacttcggttccagttgttttgtaaccgcagaggggttttatgtatggtacaaaggtatcatagaagatagatc

SEQ ID NO: 145371 - DNA, 569 bp, Arabidopsis thaliana landsberg
gtcttaaaccctctgagttatatggaaaaaatacatggaagattaagaaattttcacaaatcagcaaaagggagttcgctagcagtgtttttgaaattggaggctacagttggtacatggcatgcatatctttctcatctttaatttttgtctcaaaaaaactctggaaatggttttgaaggctttgtgttgttacttttatcttcaatgtgtcaggcatattttaatgtatccagaaggatgtgatgttagcaatcatctctcattatttctctgtgttgcaaaccatgatgaacttcttccaggtttgtatttttttccactggtctgcttggtccttgttttctttctctggatacttagtgatatatattcttttgctatcttggacaccaggctggagtcagttggctcagtttactatatctgtgatgcataaagatccaaagaagtctaagttttcaggtgatttttcgaatctttaattgcttgcttccatttcgatatccagacaactgaattcatgatcttgtagatacgctgcaccggttttggaagaaagaacatga

SEQ ID NO: 145372 - DNA, 189 bp, Arabidopsis thaliana landsberg
agcccatccgaaaatacgatacttggcaagaacaaagccgcgccaatccaaaagcccaaactgagatggcactgcttcaatccaatcttcgtcttcatcatcatcatctccattaaagctgcttaagaatgcgcagcctcactctaggtctgactctcagatcctcctcctcctcttctcttccattct

SEQ ID NO: 145373 - DNA, 109 bp, Arabidopsis thaliana landsberg
caataaaagtttctatttctttgtagtttattggtgtgagacaatctcataccaaaatattgtacctctacttgcttgtcttaaacaaatctatcatcagtttatccca

SEQ ID NO: 145374 - DNA, 172 bp, Arabidopsis thaliana landsberg
gctgccacgaattggcgtattttagattgatacgtcaaagctcctcctcgcgcacgttagctaaaggaatgtcttgtactctttttgttgttgttgttgattttttgaacaaagaaagaaactaatcaaaaagacgcagaggaagaagaagctccccgtttctatctctctt

SEQ ID NO: 145375 - DNA, 442 bp, Arabidopsis thaliana landsberg
agctgatagtggtgctgctacgtcgtctataccaccaaatgtctatggtagctcagtcacggctatgcctggacagcctccatatatgagttatccgtcttactacaatgctgttccccctccaacacctccagcagcggcctcgtctactgatcattcccaaaacatgggtaacatgccatgggccaacaatccttctgtctcaacacctgatcactcacaaggtcttgttaatgcaccttgggcacctaatcctcctatgccacccactgttggctattcacagagcatggggaacgtaccctgggctcccaaacctccagtacagcctcctgcagagaatccatccactgttggagagtctgagtatgagaagttcatggctgagatgaagtagcatgcgtgttctgatgagaaactccttagaaaagaggtaagatgt

SEQ ID NO: 145376 - DNA, 383 bp, Arabidopsis thaliana landsberg
aggaaagatcatctaatatcgtatgttattatagtttatatataatcaacttgcaataaagagaaaattttgaaaagcgtgactagatatgcacttggagactgacttacatagtagatacgataatcgaatatctagatatctggatggtactcatattatttgtttattacgtatgatcaaagatttattaatatgtatcatcttctacttggcttaattattaactagtttagtattcgtctctaatcttcaaaacaatcaacataaatatctaaactatattggtcatataaaatctaatactttactatccacttgtaatgtttgttttgttcagagttggagacccacataaattgatttccctatccgtattgtaa

SEQ ID NO: 145377 - DNA, 356 bp, Arabidopsis thaliana landsberg
ggaaagcctcgtgagaaggtctttgatccgttcagatcaacatcactctcgcttcggtggaatttctcccttagacccgaaaaattccatcagtctccctcaagtactgagcacccaacagatgttggaactgtctacagttcgcaagacaagcctgacagcattcctcttgcatccccaactatgaatcttggagctcatgatttggcatggatacttaagttttggggtctgaattactatcctcctcataagttgcgttctttctccagatggcctaggtttggcgtccccagagctgcaagatcaggaaacttatccctagataaagtgatgacagaatttatgctccgtgt

SEQ ID NO: 145378 - DNA, 618 bp, Arabidopsis thaliana landsberg
gaaagtttggaattcaagatgactcaatctatctgttcgtcgtcacaagatcaatcttcttctcctcgctctttgatcacaccacgcaaatcggcgacgaagtttcaccgccgcaggttcttattgatacctttttgtgctttgttgcttctgaattatgggaaaaggaatggtattgtttccgttttaagagatttgagttcgatcaagacatcataaaagcttgtttagggatatcactgagaattttggttagcttcagccatttttggaaactggatctttgagttttctaaacctgaaattggaaatttgttgtttagggggaggagtgtatttaacatgctggttcagagggaaatgtcaccaaaggctaagtttgtgccaaggaaacgatggggtaagagtagatggtatactgattcttcatgcggaaccaacaacgagtctatgaaagagacgggacaaagtcttacctcatggtacactttatgtttcttgtctctttatttgcataggaccttgtttaagctcattgtaattggtgattctttatgaagggttgaggcagagtcattgcagcatttatctgcaaaatattgtcctcttggagctcct

SEQ ID NO: 145379 - DNA, 372 bp, Arabidopsis thaliana landsberg
gcagcaaggatacggtcaaggatatccagcacaaggctatcctccaccgcaataccctcaaggtcatccaccacaatatccttatcaaggtcctccaccaccgcattatggtcaggctccaccgaaaaataagaaagataagaaggattcaggaggcttcatggaaggatggtgcgttgaccaattatctctctctttttatattaacatatagttttgaatacttgaagctgatgatatacctttttttggttcattattcataaattttggtatggagtaatatggatattcaaagtctatatgtttggtacttataaaatgtgtatttgttttgtattacagtttggctatgctctgctgttgcgttct

SEQ ID NO: 145380 - DNA, 464 bp, Arabidopsis thaliana landsberg
ttctttaaaactttatatatataagaaatcataagtaaaataatgttacacttctaaaacctaacgagttatttcatcattatctcagtgattaccacaaatcaccatcattaaccgtcttcttcgttttattagtcgacagagttaggaccagagcaagctttcaaattagggttccaaatccattgaactaaaaactttcttcctcctttaccattcatattaaaagtcttcccttctctatctctcataacttgaccaatataccctcctcctccgccgcttccgtacaatccctcacacaaatcaccgatctccgtcggagccgtcggatcttctccggcgtaccaagcattaatcaacggattcgatacaacttcagctaactcatgaccaatcacactaaccatcccatctactccagtctctccgttcggtggccggagctctccgggaccaccgtg

SEQ ID NO: 145381 - DNA, 693 bp, Arabidopsis thaliana landsberg
  unsure (1)..(693): unsure at all n locations
tttgtacttccggagctaaagagttatagctactgtagtagctggaagtgaagaagattttttaatagattgtattgaatatttagggttttcaaagtttggtttcttgaagttgaattagacatgaagctgtcaacatctggattgggtcaacagggtcatgaaggtgacttgtttactctctgattttcttagttctgtttctggacaagtgttttcttagttcttgtgtctgtgtttgttctaacaggagagaagtgtctgaattctgagctatggcatgcttgtgctggaccattagtctctcttccatcatctggtagtcgagttgtttactttccacagggtcacagtgaacaggtttgggttgttgtttaaaagtatggagctttatttttagacttgtgttatatttgggcatttccatttaaatagaagtgtacttgtaggtagctgctacaactaataaggaagttgatggtcacatacccaattacccaagcctaccaccacaattgatatgccagctccataatgttacaatgcatgtgcgtagttagttccctgtccctttccatattcaatttttacttttgtaaactagttttgggatgatgtgctttgtacgtatgggtttcgtttttacttttcangcagatgttgagacggatgaattctatgctcatatgacac

SEQ ID NO: 145382 - DNA, 944 bp, Arabidopsis thaliana landsberg
ttgtcccaaaaacaaagacttgagagtgtcttagagagatcttctctcttttatcttaggactctcacttcttatctcaaatctacttcaactctatctccagtctccacattttcccacaaatttcaactcttattctcttcctccatagaaacaaaaaaaaacaaaagtaagtaagttctgttcatattcctctgttttttttttttttgtgtgtttgtcagatccattctctatagcttgtgagctgtgaccattgtttatatgagacttgttttcgttaatgggcacttcaaaatctctcaaagatctgatctttcgatatattttcttcacaaactcttttttccctaaattttctcaaactcgattttttttgctgcaaagtttcgacctttggaaaaactgatgttgttgaaatcaacaactgttgatgttgagacttatatttttagcgttaaaacaaatgagagtagttgcgtctcatgtcttccaaattcaactttttgacctagtgggatgcttttaggggatgctttagttttggggacccataaatcaaatcacctatgaaaaaaatgtgataatgcaacagaacttgcactgtgttgtgttaaagtgtttattttcagatctcatcgatccatttgttctaaatcttaattcttgtgtattgtattgatcaaagatccaaacttaacttgctgatccagccgtttaagtcttcagttaggcttccatattcattacaaagtcatgtttttgttgtttcatagtgaaataagaaccttctatagttgattcactgagtatttgatctgaatatatacttggttacactgcacgcacaggtgaggtttggttggtgttatagaattatgaagagcgggaagcaatcttcacaacctgaaaagggtacttccaggatcttgtcactgactgtc

SEQ ID NO: 145383 - DNA, 362 bp, Arabidopsis thaliana landsberg
gtccgttgcagtttttgaagagaagtacgagttcgagttctgaaattgagaattctatccaaggagctatcttgcattgcaagcaatcacagcagcagaagcagaaacagaaacagtatagtactgttaccgaggtcggattctgttcgttgtcagcgtcaagaatcgcagctagggatgatcaagaacgggctcagatgtttaggggctaactaaagatatcggtcatgaagaaagttaagaaggaaataagagttgagcgagagtgagagaactagagaataaattctttgttttcttttgtattttgcctcttctttgttttgaggttacataaattcacaatgctttttttggattca

SEQ ID NO: 145384 - DNA, 162 bp, Arabidopsis thaliana landsberg
aatcttcataatatcatctttatcaccgtctgatttgatatgggccatggtttgaccaatggcgttatccggcggtctttgtgacgactgtcctgcctctagtggttgaccggttacaatctctggcttgggaggataacgatgatgacctgcgttttggtt

SEQ ID NO: 145385 - DNA, 329 bp, Arabidopsis thaliana landsberg
agattgaacttgcattttgattttgtggaattctgttatgatgtctttgtatggttttgttgaattccaaactatatcttatgcaaaaaattgctaaaaataacattaccgtaactttatcggggtttaagacaagattcttcaggcgggttttgtgatagggatggaccatcttccaagatgagcggtgtagtttgtgcaacggattactcctttgctactaggaccatccgggaaatctatgacactgatgctacctgcgtctaggtgaaacaacccgagcgcttatttagtgaggttaaggcattgtgctatgagtgaaatgtgag

SEQ ID NO: 145386 - DNA, 591 bp, Arabidopsis thaliana landsberg
gagaacctttttcaaagtaacgtctaggactcttgggtctcgagaattcatgcgctactacaaacagaagccagcaccgtcttctcagaagcatattgtcaactctctaacctccaggtttgtctttaaccgatcagagatcatttatcactgtctctgtgtagaatttgaatctgacgtgaatgggtcttaaaacacaggtacaagatgatgggtctagcaacagtgcagtcaaaggaggccatagtgaggatgaaggtgatgagagagatgaacaaaagaggagcgaaaagcagtgtcaggctcggaatgaagagcaacgtcatcaggaatctgcccaacaatgtcacctattagtcttgctcctcgattttcaggtctctcctctttgtttgattttgtgaccagagttttggtgagtaaatctatctaagtttttcactagtactcaagtatcttaggcccatttgggtctctgttttgtctgatttagtcttttgaaaatgttacgttttggctgagtttgtatctcttgcccagtgctttgtacactctacattaatctatatttcatttggtagaagatcaaga

SEQ ID NO: 145387 - DNA, 679 bp, Arabidopsis thaliana landsberg
cagagagttttaccaagggattgattacgaactcgaagaaggagctgctaggtactttgtgaatgtccttctcaactaccttgtcttgatgggtcaaataaaccgagctcgatgtgtctggaaagtagcgtacgagaacaaactctttccaaaagccatcgtctttgatcaacacattgcttggtctctcgatgtgagaaacttatctgtcggagctgcgctcatagccgtggttcacactctccacaggttcagaaaacgaatgctttactacggagtagtcccgagacgtataaagctagtcacaggaccgacattgaagattgtaattgctcaaatgctgagctctgttgagtcgccttttgaagtcagcaaagtcgtcttgagggcaccaggagagttggtgatggagtggttcaagaaaccgatcgtgcaacagtttcttctgaacgagatcccatcacggtctgatatattgatgcataagatgaacgtgatgttcccaagctcggctcctgagcttagatctatgtcacctcccaaaccactcatgtcatcgaaagcgttctaacaggggagacaaaagtcatgggtttttgtaggcgggttctctgtttcagatctctcattgttaatacttgtctgaaaatataatggaaatgatatttacgtctttaaa

SEQ ID NO: 145388 - DNA, 312 bp, Arabidopsis thaliana landsberg; identical to SEQ ID NO: 70499

SEQ ID NO: 145389 - DNA, 67 bp, Arabidopsis thaliana landsberg
agaaggttcgatgaaggttcaagccgttgtggcttgggctgtttcagagcttgtttctggtaatcac

SEQ ID NO: 145390 - DNA, 73 bp, Arabidopsis thaliana landsberg
tactcggacttgttctgtcgtgaacaaaaccatttgtcaattagtttttttaaaagaactaaaccttatcttt

SEQ ID NO: 145391 - DNA, 243 bp, Arabidopsis thaliana landsberg
ctccaggatcggtaacaaggtcttgaagaaaaaaattagtaagcagtgctgatatgattctacggcttttggatcttgtaaattggtatgttaattgttagatttggaaaaacgacgtttgcttataatgtcttgtttgatttcttgtattggaatgtatcattttgggtgctcgtcttaaatagttcctccattctgtaaaattagtaaattactctcttcagcaataatataaatcacgat

SEQ ID NO: 145392 - DNA, 893 bp, Arabidopsis thaliana landsberg
acttcaaaccctagaattttgtttgttccctcgatttttgattcactgggtaagtattttctgccctgaatacgtttatggttatttaccgagtttcgattgtaaactccgatttttgaattcgggtttcgtctggtttagctttgtaagttttgatattggatgtttccccgagacgagattaggttaaaagtagctgttataagttgagttaagttgggattgtgatcgagaattttaatccaagttgtagattttaggttactgtctggtaatgaatatggcacgccgacgaaattgaatggtcttgtgttttcgtaagctctagttcgttctcagttcagttgcagattttgttgattgctaagaatcttaaggatcatactgccataggttataattgcttcaactattctcacagttttgtgaatgagagatttggaagtttaagaaatgcaaatcttactgctttttgttccacccaccgatgctagactttcaatagtctgctgtttgctgtatcttaatcatacacacaggttttaactggtctgcttcatttctatggtgcagagtttgtgttggcattcattagtctctttccgttaggctgtgaggcttatgatcggtgccactaacgttactggctaagacattgaatctgattaaaatatggccctttatggtacattgcagttgtctcatagtctgggtttgtgcagaaaccaacggttttgtaatccagaaaatgtatgtttcttccattttagccctgaaatccttttcttttaatcatttcttcccttcatctttctaaaaatgtacaatttttcagagtgccatgagaaggaggctgcatatatcaaatggtcctctctcattaggtgttccgg

SEQ ID NO: 145393 - DNA, 234 bp, Arabidopsis thaliana landsberg
gtgaacaacaacaacaaaactttccatagtttgtgtccggtctgtgattatacatggaaatgtttttttttcataattattgggggttcttagaatccttttttttcctccaacggatcaaatcctaaattatattaggatttttttttataatttgtgatagttcttaagtaattttatagaatcataatatataaaatcaaacgaatattttatattcagtacttgtttttt

SEQ ID NO: 145394 - DNA, 172 bp, Arabidopsis thaliana landsberg
tcttatcattcaacttttatgtaattagggatttgtttgggcaaataagctatgattaatcttttgctataatgcaggtgtttgcaaaatcttttttccatgtttgcttttgatttcaaattaacatgctatgtagaacatttgttttagtggatggtctatgtaatcattt

SEQ ID NO: 145395 - DNA, 62 bp, Arabidopsis thaliana landsberg
tgttaaagtgatgatgtgtcaatcatatggagagagttgaccaactttcatatatatgattc

SEQ ID NO: 145396 - DNA, 303 bp, Arabidopsis thaliana landsberg
tttggctagatcagctgcatgagcggcgatcttgtatgctataaccccggccttcacatcgtccctgtttggtagcccaaggtgttcttttggtgttacatagcaaagaagagctgtacccaaggctccaatattggcagctccaatggcagaggtaatgtgatcatatccaggggcaatatcagtagtcaaaggaccaagggtgtagaatggtgcctcgttacaccactccaactgcttctgcatattctctggaatcttgtgcattgggacatgccctggcccttcattcatcacctggaa

SEQ ID NO: 145397 - DNA, 396 bp, Arabidopsis thaliana landsberg
cgagacatcggtcagaagaatctactcataaaacacaccattggtctctaaacaagcagcttcacttaatacataagttacctaaaccacaagaaccaatctttttttcctggattaacatttacctaacaatccttcattcatggatcaacctcaagcaccgtagtactgacttctgccttgtcagactcttcttccagttccttaatcactctctgatcatcttcttcagcttcgtttcctactttaccagtctcagggatgcttgaatatgtttctttatcaatctcttctccctttgtcttagacatatcctccttctcaatcaattttgtgtctgcagtttgctcttttgctgactctttctcttctaccttggtcttgggttctgcattt

SEQ ID NO: 145398 - DNA, 214 bp, Arabidopsis thaliana landsberg
catcgctgtatcatcagtactgggttaaccccaaggccaagtcttattacctattcgatggctatgctcatctctcttctgggctagcttgtggtcttgctggtctctctgctggtatggctattggaatcgtcggtgatgctggtgttaggtaattgctatctctgctacatgatcttaactgtttgattgcagcaattttgatcgattttca

SEQ ID NO: 145399 - DNA, 739 bp, Arabidopsis thaliana landsberg
tgttcgtgtaaaaccctagaatgacgatgatagctttgaacagggaggtcgaaactcagtcactgaaaaaactcagtctaaaatctgttagacgagctcgtgaaattttctcccccgtccatggccaatttcctcagcctgatcctgaaaggttaatcaacagtttcgcttgcaatgtccacttttttttctcgaaatttctcagaatttttatgtgtattgacgatttcttcttcttgtctgtttttgttcttgtctcgcagcaaaagaattcggctctgccataaggtaagggggttttcgaatattttttaaattttatctttgatcgtgttgaaaattttgttcgcttcttctttgttttgagtttgataatggatagctttatagcaagcttcagagacgttgaacctgagaaaattttataaggtgtaaatcgaacagtcaatggcttatcacttttatagtttaccttttatctggagttagattcttctcatcagctactattgtttgagtttgctttctagcatattaccctcatctttatagtaagatgtttagtttgcatcaagcgttttagtgaacatcaagtagaatataaaagttaatgacttggacgttacttgtatagattcaagttgcatttggaggcgtagaacctgcaagtaagcctacacgtattgctgaccataacagtgaaaagacggctccattaaagcccttggcttccaggtag

SEQ ID NO: 145400 - DNA, 168 bp, Arabidopsis thaliana landsberg
  unsure (1)..(168): unsure at all n locations
ccaaaagaaacaaaaccacctcgaaaacaattgagacagcctccttctgttcctttcatttgggaagagcggcctggcttccccaagaagaattggcaaccttcactagccacttttgtgccttcttctcctccgcttncgccacctatcccagtcccggttaagctg

SEQ ID NO: 145401 - DNA, 651 bp, Arabidopsis thaliana landsberg
ctgaaagagaatgtcagaaattgtaaatttgtcatcatctttgagatctttaaacccaaagatctcacctttggttcctccatatcgccaaacctcgagctctttctctcgaccgagaaacttcaaatatcattcttttaccgataaaatctgtttggcagcggagagaatccgagcagtcgatatccagaagcaggacggtggtttgcaagagctcgatgactcgccggtgtctgttgagctcggacctatctgtggtgagagccacttcgatcaagtgatggaggatgctcagaagctcggtgaatcagttgttattgtctggtgagtttctaggttagaatttgttaattccatgagattttagatcaaatcgatatagtattggttcattgattctagtagcaacacgaatccgattggaaaaaagagtacttgcactctgattcttcccaagtttttggatttctcatggtgttcctgaatttgccaattgcttgataaatctcaagtctttgctctcttatgtgtttgattgtgtatttttatggttggtgaagatattagttgcatggattttgtaggatggctgcttggtgcaggaaatgtatttacttgaaaccaaaactcgaaaagctcgctgctgaattc

SEQ ID NO: 145402 - DNA, 3244 bp, Arabidopsis thaliana landsberg
  unsure (1)..(3244): unsure at all n locations
cacatttcttcacatctctttatacgaaataacattttaagattattaagccggcatcaatattctttcttgtcatgaattacatagttttaagaaataaaatcaaagaattttgaatatatgtcacacagaacacttccacagtttcttgtataaaatacaaatcatgctaacaaatcttataaaaccaaacagttttatttgtattgctcttccaagtgccacattctctgcttcaagtagttataaattaaaaaagtttggaagtcttgtgttttagtttatagctatttcaatggatagtgaatttaaaacgtattacaaaacctttgatcacaattttaccctatttgtataaacagagtttataaggattaaaaatgatgttgataaaagtattagttaactgaaaagtaaaaatgatgttgataaaagtagggtaaattgcgggccacacccgttgaccatattttattttcatggattgtcaaagtcaaatgtggttttcaccatttgtcttttcgctactggatgccgggagaaatgtcagtgctgatagatactaaacgccctcctgtatacattgacagtcagatgggtctcgaaacgttttttttggttcgtggtgggtatctttctctcaacttcttcgtctctttcaataataccgtgaaggcgttcgggaatactgtctctaggtctcatggtgaagtttctgaaagtgaccgtgtgtttgatagtgctacaaatgttgatgaaaataatgaggatgcagaggagcaagccgatgttgaagacgatacaacagaagaggatgaagtggaggaggacaacgaagatgatgatgggtgtgatgattatcttggtgtggatggatctattgggggaagtaccctgtatcctaccacagacggtagtgaaggtattggcgaagaatacgattacaacaagtggaacgatgtaatagtagaagaatatgtacaaggaaatcttgaggaagacgtcagtctcactcaacagactgctcaacatccaggggaattcagtcgtttattggaaacgtgtacgtacacgggtgttagtgtacctggcggagatacaggggaattcagtcgtctcttggaaacgtgtacgtacactggtcttagtgtacctggcgaagaaacaatttctccattgggttacggtacacgctgcgaagggcaaagggattccaatcttatttgtatagacgaagtcaccggggatgaagtgatcgacggtattggagcttcctcaactgggacacaaaatgataatggggtagttaccgcagctgaggcttaccaagtgtataatgaatttcctaagttacatggtggcgagttggcgaatctcggtaacgatgctgctcctgtgttcgatgacttactcaattttcgagctgatgagacacaggttgaaatcagcaccacaggcgaaactttgtttgttggaagtgtttttaagaatagaaaagtcctgcaacaaacaatgtctcttcaagcgataaagcaatgcttttgcttcaagcaacctaagtcatgtcctaaaacattgaagatggtgtgcgttgatgagacttgtccatggcaattgactgctcgcgtcgtgaaggattcagaaagtttcaaaatcacttcgtatgctacgacacatacgtgtaacatcgactctcggaagaactacaataaacatgctaattataagctcctcggagaagttgtgaggagcagatactgttctacgcagggtgggccgctagctgtcgatttaccacagctgctcctaaatgatctgaatgtgcggatttcatattctaccgcttggagagcaaaagaggttgcagtggaaaatgtaaggggggatgagatagcaaattataggtttttgccgacctatctgtatattctccaattagctaatccgggtacaataacacacctacactatacaccagaagatgatggtaagcagcgcttcaagtatgtctttgtctctcttggcgcttctatcaaaggtctgatatatatgaggaaggtagttgtggtagatggaacgcagctagtcggaccttacaaaggatgtctccttattgcatgtgcccaagatgagaacttccaaatattcccaatagcttttggtgttgttgatggtgagaccgatgcttcttgggcatggttttttgaaaagttagctgagattgttccagacagtgacgatttaatgattgtctcagacagacattcatctatatacaaaggcctaagtgttgtttacccgagagcgcatcatggagcatgtgctgttcaccttgagcgaaacctctccacctattatggtaagtttggtgtgtctgctttatttttcagcgctgccaaagcttatagggtcagggatttcgagaaatattttgaactgttaagggaaaagagtgctaaatgcgcaaaatacctagaggacataggatttgagcattggacaagagctcactgtagaggagaacgctacaatatcatgtctagcaacaactctgagtccatgaatcatgtgttaacaaaagcaaaaacttatccgattgtttacatgatcgagttcattcgggatgtcctaatgcgatggttcgcatcgaagaggaagaaagttgctaggtgcaaatcttctgtgacacctgaggttgatgagagatttctacaagagttgcctgcgtcaggtaaatacgctgtgaagatgtctggaccgtggagctatcaagtgacaagtaaatccnnnnnnnnnnnnnnnnnnnnnnnnnnccagtgtacgtgtacgtgtcttaggtacaccaagttaagaatcccatgtgaacacgctctagcagctgcaatcgagcatggaattgatccgaagtcttgtgtcggatggtggtatggccttcaaatgttttctgattctttccaagaaccaattctacctatcgcggatccgaaagatgttgtcatcccacaacatatagtggatttgatactcattcctccatacagtagacggccaccaggaagaccactgtccaaaaggatcccatctagaggtgaaaaccgggtatgtactaacatcgttcattcatctacttgtattttgagtattaccatgcggagatttgtaacttcctgtctttgtcacttcagaaaaagagacagaaaagacttttaccaaatcagtgctcacgctgtcgacaagcaggtca

SEQ ID NO: 145403 - DNA, 335 bp, Arabidopsis thaliana landsberg
gctgttttcggatacgtacagaaggtatatggagaagcagctacgcactgatgcaggctttgctgggactccaatgcggcttctttggcgtagccgtaaaagatctgacaagaatggaggaggtacgagttttatgcatgaagttgtaattctttttgaaaatagtgacagtatctgtataacttttggaaaattctgcaggtggaggaacaatgagaatggcaggccttacgcgtcagagaagtcttgcaaccaaaagaacataataaccgacgatgtaattttgttgtattgaaaaataattactatcaatatatatatacaattcaatccta

SEQ ID NO: 145404 - DNA, 158 bp, Arabidopsis thaliana landsberg
tgtgtgtgtgtgtgttgttgaatggctcttgttcagcggattccaatttcctcctccagtattcggaattggcaacaagcgaggaccaatttgactcctatttgttgtttacattacaatactgcatcttcttcttcttcaccctttacagagaagca

SEQ ID NO: 145405 - DNA, 588 bp, Arabidopsis thaliana landsberg
tgagaggggggcattgccacagtatcgagtgtcactttctcaatcaaaaggttttctctctcttctcttttttcctctcctgcgcgaaaacaaaacgaagagagagagagagactcagacacacacagacacagagtttaggtttgctttgtaaatctgtctctgcacttatcatagtttcgtttctcttttgagaaagaaaaacccaaacttgccatgttttagatctggtcctttttaagctccaaaagattgttgctttttctcttgcttaagtttttgatttattcttcttcttcgaaaagtctgtacctcgcaagagtttgattgtccttgtgttgcgatttccatgtttagtatctgcatttgatagccttcgatgctgcatgcaattcccaagactctttctgattgctacaacgccgtgatttctctctgccatttccttcgatttgatttctgggttctcttcttctcgtctctcttctgcatgtttcgccactctaccttagaaaaaaggttactttcgcctccgatttaggctcgatttgatgaattcgtcgtcgtgtggctatttatcaaattgag

SEQ ID NO: 145406 - DNA, 830 bp, Arabidopsis thaliana landsberg
agaaaaaaagaggaagcaaagctttattgcaagaaatgtttcacaagaaaacagagtgtatagtggttatctagactggaagttgagagtcttgatgcaaaatgcgaagatgaaggcaaaaaagacagtgaagccaactagtactccggccacaggtcccatgtagtctgattcaaaaccatattgatctttaatgtactgtttaacagtgaggccaggtgcaccaccaaggagagcgatgggagtctcaacgtcaccgtattgagaagtgatcaaaccgtatatggtccaagcaacagggcagatccagtaataccaaacccaccactttggaattttgggtctagggatgaaaaatccagagaagaggttaaagataccataaaaggctgatgcaaagatagaagctacttgttggttaggtgtgagggaaactgtcatcatgccgtagtaggtccagtagaggaaggagaagtaattgatgaagataaaccacaagaacttggaagctttccactcgaatccaaccatagagtagatgataagagaatagtacgtggtctgaatcaagacataaggtagttcacaagtcacctgggagatagcataaggtatagctgagtacatcccagcagctttttctctgtagaacactgttctttccactgccaccattggttgtactgttgagcagttgtttataccaacgaatacaactgctgcgtagattgctccgatcaccatcgttagatcttgtacgtttgatctcttacctccgataaaccaaaagacagagccgatcatgagagatgttgccaatgtgaagatga

SEQ ID NO: 145407 - DNA, 396 bp, Arabidopsis thaliana landsberg
ttttgtgtttcataaagttttacattctgtccttgtccaatgaagacacttacataaatgtataagttttaaaacaaaagcaaatcattgagacataaatggagatagtatatatgaagaacaaaaagaaaagagaaggaaaaactgttagtgtaggccttcttcgcatttgacaataatttgatcgacattaggtgaaatgacgttcttgcccaccaagtcatgagccttcaaggactctttgttccaatctgtgttataaacaacggtcaaaatggagattgcacaagctagctgtgccccaagcaagccatagcataggcccatgaagcctaaaccccacacaaacgctaaaacaaccgccactggtgctccaactacatagaaggcgtagaa

SEQ ID NO: 145408 - DNA, 248 bp, Arabidopsis thaliana landsberg
taaataaacttagaaaggtaagtatttctcaaaaaaaaaaaaaaatacaaatgaaagcaaaatcaaccaatgttttaagtaagatgaacaaaaacgcaaacttgtgttactttgaactttatgtctttatccaatagaaaaataaacaatcacttgcaatttaaaaccactcagcggaaggaaaaacgcaagttatcaattctctgcagcagcacttgcagcactcaagtccacagacaaatcaagag

SEQ ID NO: 145409 - DNA, 684 bp, Arabidopsis thaliana landsberg
gtacggacgaggagaggaagatgaatcttgagagagacacgtgtcctggttttatatcggacggtttagggagagtcatttggacgaacggttcttacagagagttggtggttgggaaagatcatgagcagtgtagtaagatgagtgtgtggcttgtgatgaaggagaagcctttggtaacgtaccggacttttacgtgtagaatgagattgcagtacacgtgtcgtgataaggaggtgagttcgattacttcgttctgtgatgtttggaggatgagtgacggtggctttgcgtggcggcttgatgttgatgctgcactttgccttggacggtgaggattgggccgttggattagagatgatgttagattgatgagatgaggatatttaataacgacatgcaagttagatagatatttggacttccaactttatgagtgtacatacatatttcgcaattttgtagcttttaagttttaacattttgatttcaatgttctgttttaatttgtagtgtttggtgttttattcttttttttttttgggggtttgtataaaaactcttggttagtccacttgggtatctttcttttctatagtattgtgctttgtaggcttatggaattagtacttaggtgaggatcttatgcttaatcacacaatggaatgcattaaaatttttgct

SEQ ID NO: 145410 - DNA, 241 bp, Arabidopsis thaliana landsberg
caaatagggaagaaatactttgattttctggcttgtctttgtcttgatctcacccatgagaaacatccaggtcctctcttcttcttcttggtcttctcttcttcttcttgttcgtcttcttcttctttatcatcttcttcactcatatcatgcttctcttcttcttcttcttcttcatcttcttcgttgctcatatcttgcttctcttcttctttttctttctcttccaacttcacatcct

SEQ ID NO: 145411 - DNA, 422 bp, Arabidopsis thaliana landsberg
aaaacatttagatcgcttacctggttcgtgcacctgattagctgctgttatttctttttcttcccagagttcaggtaatttcgcgaatcttttttttgattctggatctctctttgagataattgcttaaattcatcttcttggaatccgacctttggtttgctacaattttcattgattcgagatttctggaaaaaaaaaacgacctaattatcatgttcacatgaaaggttttcaatttattgcggttatgattgagttccttgagtaaatctcttggaagatttgattgaaaacgacccttcactttcttttttacccagaaaattgaaaaaaaatcgaaactttcaacaatggatcgatctaattccaaactctactctttaattttcaggtcgttaaaaatctaatctttttggtgg

SEQ ID NO: 145412 - DNA, 376 bp, Arabidopsis thaliana landsberg
gtactataataccaccgagtaaagactcctaagatcgtttccattggaaaataaaatcagcaggtatttatgggtgcaaatggtttaatacgttgttgttggcttatttgaaagaatataagcgttgcatacttgcatgctaattacaagtcccccttaagaaatttctgtttcatttatttcggtacacatattcgatgagtttaagatatatttttcttaaaatataatatacctaatcaaaacctaacactaaactctacaaaagcattcactagaagtagtttcagtttgaaaccaaaaaaaaaaaaagtagtttgaaagatcaaacttgccctcgaaaatccaatacttttttcattgtaatgtaatggcg

SEQ ID NO: 145413 - DNA, 850 bp, Arabidopsis thaliana landsberg
cagccccaccatcgtcttcttcactgcctctcttctctcttctcttctgtctctctcttgttagttcactccacataataaacaccaaagatttcattctcttctccataatttcgaagtttcttgaattgggtttgtttcttgatttgtttcttgaattgggttttggtcttcttttcttactatatttggatatgatgatgggtcaagatgaggttgggagtgatcagacgcaaatcataaaagggaaacgtacgaagcgacaaagatcgtcttcgacgtttgtggtgacggcggcgacaacagtgacttcaacaagttcatcggccggtggaagtggaggagaaagagctgtttcagatgaatacaactcggcggtttcgtctccggtgactactgattgtacgcaagaagaagaagacatggcgatttgtctcatcatgttagctcgtgggacagttcttccatcgccggatctcaagaactcgagaaaaattcatcagaagatttcgtcggagaattctagtttctatgtgtacgagtgtaaaacgtgtaaccggacgttttcgtcgttccaagcacttggtggacacagagcgagccacaagaagccgaggacgtcgactgaggaaaagactagactacccctgacgcaacccaagtctagtgcatcagaagaagggcaaaacagtcatttcaaagtttccggctcagccctagcttcacaggcaagtaacatcatcaacaaggcaaacaaagtacacgagtgttccatctgcgggtctgagttcacttccgggcaagctctcggtggtcacatgaggcggcacaggacagccgtaaccacgat

SEQ ID NO: 145414 - DNA, 593 bp, Arabidopsis thaliana landsberg
tattcatcggagtagttttcagtcggatttcggattagagaggaaagttctcgcggaggcagagaaagataatccagattggagtaaatttgggagtgagaatccaccggctaagtttcatgaaccatcaccttcttcagtggtatggctcttcttaaaatctatggaagcattttaaagttaggctgaggtggttaatagcatcatcgtatagtatcgatgtgttctctagaagaacaagtgtgaatcatcatcgatgaacgtagttaaccggaacagaatggaagctttgtagatggcaccaatgtatagtgtcaatgtgaggtctaggaagaacaagtgtggatcatcacacgggaacagaatggaagctttgttgagttagacgattaatggcactaaactatagtatcaattgtgatgtctaggatgaattgttgtggatcatctatgtattaacttaaaaatgcgaattgggtgaagatcttgtagatttgtgcattacagtgtatgctcgttatatatgcattattctcgttaataagaaattccaaatgcagggtcaaatgcagggtgtagatcatgtagtgata

SEQ ID NO: 145415 - DNA, 171 bp, Arabidopsis thaliana landsberg
ctttggcagatagatgattggcgtgacatagctctcccaaaggacctgacaagaggaactagagttagaactttaggtacaaatgcttcagttacgggatttggcaatgagtatgatgctctagcctctattcaaccccctgggtgagctaatatcgatactgctttgata

SEQ ID NO: 145416 - DNA, 402 bp, Arabidopsis thaliana landsberg
aatatcactttcttcagagaatccaatagatcataagaaactgagattgagattaagaaaaaattaaaaaaacaacaatgttttcgttctatgaccgagttttatggtcaaggaatccaaccaaaactaagaagaagaacaaaatgatctttaaaaaatcagtgtttcatgagaaaacagactttctacacatgatactcatggcctcattcagcatctaatgataatttgacatctcggagaacgttttgtgagtttattaagttcctcgtagatatctgattccgaataatgttgaggacaacccatgaaactcagaatcagtttcttgaggactgctgagttttcgagaaagtaactcgctattttcatatcctgttccccccagtcaaacaatccttt

SEQ ID NO: 145417 - DNA, 150 bp, Arabidopsis thaliana landsberg
ttaccaacctaaagcccttgtttattgattttcgtggtttggcccgcaagtattttttttcttttctggttagccgaataatattcagaaaacgaggaaaagcattgagatttttttgttttaactaactaaaatttggatgagaaagtg

SEQ ID NO: 145418 - DNA, 105 bp, Arabidopsis thaliana landsberg
ccgctttctcgtttcttatccgttcaagctttcgtgaattcgtctcataaacctctccactctctctggatctccacgcatagatcttcctctgttttcctccat

SEQ ID NO: 145419 - DNA, 555 bp, Arabidopsis thaliana landsberg
gcctcatacccagaaaaacaaaaggataggaaagacgaagaaataaaaagagagagaatgttagagagacaaactctgagagacaaaacaagagaaaatcgctcgtcgtcggtattcaagcgtctgtgactccgataaagcctagactagcgaggacggcgagagagagagagagagagctttggagttgtcgtatctctaaatcggaggcaatttgaggtgaaattggtggttttatcgtttgattctagggtttatcttctctgatagttttatcgagtaatgtcaaggagctaaactagtggtgattgtgtttgttagtgagataaagacaaaggaaggaatcaagtggactaccgaagcgagttttgagctttttcagagacggatttggagatttcttgttgatatcgtctgcttagaggcttatttggtaccagatgtaacagatctgagcttcggaaggtatggcgagttcggaggttcaaatgaaaggtaatcgtggaggagatacttctcccctctggttttagtgacctaaggagactagaaatg

SEQ ID NO: 145420 - DNA, 353 bp, Arabidopsis thaliana landsberg
cagagtaaacaagtaattcaagaagtcaagaattgccaaaacttaaattaaaatacgtaacaaaacttcctgttcgcctcattcgacatggaggtcttacccgggtttccttccccgaggtttcccagcaggcctttttcctttctggcctgctttaccagtgcccttctgcccgttcctaccgggctttccctccccccgtttcctatcatcactcttcatcctcctatccactctcttctgtcccttaccaactttaaccccaactcctttcttagacacaaccagttctttccttggctttcttggctctgctgctttcttgtatagcttgtctatcatcttgtcctttg

SEQ ID NO: 145421 - DNA, 345 bp, Arabidopsis thaliana landsberg
aaggaggatagacaagggaagaaagatgtaaagattaaagtagcggaaaagaaagttcctaaacatgttcgagagaagcaagagactcttgcgcggtggaaagaagctgaagagaggaagaagaaggaagaagaagagagattgaggaaagaggaagaggagcgccgtatagaggaagagcgagaaagggaagctgaagagattaggcagaagagaaagatcaggaaaatggagaagaagcaagaaggcctgattctaacagcaaagcaaaagcgtgatgctgctaagaatgaggctttcagaaaaagggtgttgactgatgctccaagtcttcttgttgcagat

SEQ ID NO: 145422 - DNA, 339 bp, Arabidopsis thaliana landsberg
atcttcttcactttcttcatttgttgagtctgctacaagatcaatgttctgttgattttgggtatttgatcaaaatctgaaagggatcttgtggaagtaaggttgctgtagttgtcaaggtctttggtgaagtttgtttctcacaaagtttgatccttgaagttggtctctattgatcttagatctagtgtgaataaaggaagtccttggaaagcagcagacttgaaaacgctatcacaagaggaattgcttcctgaagagactgtctggattgctgatagatttatatgattcagagaagaactcaccgatgagtatggatttttcacctttgttaac

SEQ ID NO: 145423 - DNA, 424 bp, Arabidopsis thaliana landsberg
gaattctaaaattcttccatttccacaacaataatcatcttcctccacttgcttcttcttttttcaagagccattctaaatatcacaagccagagtagaaaaatgtatatgtatagagagattcataatttcaatgtcaaaattttcgtgtttctaatcatctactggtgctattagcagtcttgttcttgctcatatcagcaagctcttcaataagttttttctcctctttgctcaatctcttaggtatctccacttgtactctcaccaactgatctcctctcatattactcttgttcaataccggaactccttttttcgccatcacaagcgtcgtgctaggttgtgtcccagctggaactttcaaatctactgtcccatccactgttggtactttcagtgtcgtccctaaaatcgcatcgat

SEQ ID NO: 145424 - DNA, 320 bp, Arabidopsis thaliana landsberg
ccattgttaagttgagtctgccacaaaaaacctagtacagttgggctacaaggcccaatataaatgtaagccctttaacaaagagggaaccgcctgctttgactgttgagaacaacttgctggattcttttttcttcccggaaaattgagaaaccaagaaaatcaaacaagtactgcaataagaaagtgttgaatctgattttggaaatattatttgactccattattcccttcataaatatatacagtcaagcatatttatttgaacaagaaaataaagtcatactaataagcatagagataaagtaagatcataaaat

SEQ ID NO: 145425 - DNA, 309 bp, Arabidopsis thaliana landsberg
  unsure (1)..(309): unsure at all n locations
accaaaaccccaaaaccaactaaaactgaaaaaacaaacgttgactttttgactaaccaccatcctccgccgtaaatcatgatcgccgccgttaacactctcttcttcttcttcctcttaatctcctctgtttattccaaagccacgatttcaatctctccccaaaccttaaaccgatccggcgacatagtcgtgatcaaatggtccggcgtcgaatcaccgtccgatcacgactgcttaggaatctactcgccaccggactctcctacgatcnatttcatcggctataaattcctctccgattcaccc

SEQ ID NO: 145426 - DNA, 484 bp, Arabidopsis thaliana landsberg
ataaaagtctctcttatatcatggcaacgtagttcatatcagagcctggactgaataatacttacataaaaactagagaatcacctggtggaggaagatgtggtggttaaagatctgtctgaagtgttgtctatgatgctgcgctgtaactaattgtgcctatgttccggtgtgctgctactgcaaccgctgcagctcctgctggaccaaactgtgattgtgcctgtaacagcttagcatcaatggccatatgtgtgttgttgtttaattgatctgtcttcgggagctgtggttgaaagtaagggtttgggtggttcatagtctcaacgtctgcttggttagttgtagcagctggtggctcagtgggactgaattggtggacaggattttgtggctctggtggaaaagacgaagcttctatgttgcggttctccgggtttgtcatggtgtttggtcggaagtagcaatgaggagatgaaaccgc

SEQ ID NO: 145427 - DNA, 291 bp, Arabidopsis thaliana landsberg
taaaactttggtcatgtacgtttataactgcgtttttgcattttctctcggtatatataatcatttctaagtaatccactcttgataaaactagtaattacagattaaacacgtaagctttcaggaaaatcttccaaaaattcaggttcattccggtgaaaaatcatggttcatacattttgagtttgttatgacgttcactacaaaagaatattcattgtaggacaaatccatgaaagattatgaatttatgaatccacataatatggaaatagagatgggtttgtacac

SEQ ID NO: 145428 - DNA, 262 bp, Arabidopsis thaliana landsberg
cacagtttttgtctgctcaccaaatcaaaccaatttctcctgatagccaaagtttttgtccccaacaagaaactcatgcaacattcttcacccactagctaactaacgacttccattcttattaatctctctcaattcttcatttctgagattcatcgctctctcttctctttgtcacaatgaatttcaattcttcttacaatctcactttcaatgacgttttcttctcttcttcttcctccagggaccctctggtttcacg

SEQ ID NO: 145429 - DNA, 194 bp, Arabidopsis thaliana landsberg
cagacatctttataattaattattgagaaaagagaaaaacagaggaaaaaaagatggagagaagcttgaagaagacgaagaacaattataacaactccataaagagcaatcttatgaaagatgatgaattgtttcatgtgattcacaaagttccctgtggagacactccttatgtcagagccaaacatgctcag

SEQ ID NO: 145430 - DNA, 301 bp, Arabidopsis thaliana landsberg
tgtcaagatatcctccgacgagccaaggttacggttacggttacggcggcggtaatcaacctccaccacctcaaccaccttactcttccggcggaaacaatcctccctacggatcatcaacaacctcttctccttacgctgtaccctacggcgcatctaaaccacaatcatcatcctcttctgcgccgccgtacggatcttcatcatacggagcaccgcctccttcagctccgtacgcgccttctccaggagactacaataagccgccaaaggagaaaccttacggaggaggctacggagc

SEQ ID NO: 145431 - DNA, 1118 bp, Arabidopsis thaliana landsberg
gttttgtgaaatcgcgagagctgatttgagcagagatggatttcgatttcaaagtttccggagatttcatagtcagtggcgcagagcagctagatgacactgatttgacgcgttctgatgagttttggcttatccaagctcctttaggccaagtatgtttagagaatgattctttattgcaaatttgatcctcatgtaatgttctacagctaaatgacttttcttatcgcagtttccagaaatcgaagagaacactcttaagattgagccagacaaagatgggttatttggagaattcaaggattcaaatggtatggttatgttttgtgttctttcatagaaatattttagttttgatctccaaaagctggctcattacacctttgtttaggtgcaaagtatgatcttgctagctttcattctcaagatgctggtgcagagttgattataccttctgaagaatcaatgattggtatattcccattactttacagttgtgtcttgtttaggttttggtcgttcagtttacacagttttgttttaccacctgtttcgttaataatgattcttctgttgttgttcgttttatggtagttgggaagattactcggcgagttgcattagttcgttaccctgaaccaaacgagttgcttcagaaaatgaaggctagaacacaacagaagcttgtcggatcagtgacgaattcctctaagaaatcatctaaccttactcaaagcagccggcataaaagcggcacacgtagcagcagagagaagagcatgttctctggcttcgccgagactccaaagtcgccaaaaagaaaaaattcagagtcttcctcaggtaaacaaaaaagctcaacaagtgcggtttcaggctcttcagaacgatcagcaaagtccaagaagaaggtgaagaaggaagagtaaagatctttgctcctgtttttttcaaagagaatgtttgtgactgttaagatgttgaatttcgattatgcagatgataaacagccagtaatgtattcaaattcataagttatttcgccgtagatgcttataaaagttcaagcttattagctaccatggaacaaagtcaaagtaaaatacagcttttcagct

SEQ ID NO: 145432 - DNA, 423 bp, Arabidopsis thaliana landsberg
aagactctgaattttttctttttggcgactttggagtctcggcgaagccagagaacatgctcttctctctgctgctacgtgtgccgcttttatgccggctgctttgagtaaggttagatgatttcttagaggaattcgtcactgatccgacaagcttctgttgtgttctagccttcattttctgaagcaactcgtttggttcagggtaacgaactaatgcaactcgccgagtaatcttcccaactaccataaaacgaacaacaacagaagaatcattattaacgaaacaggtggtaaaacaaaactgtgtaaactgaacgaccaaaacctaaacaagacacaactgtaaagtaatgggaatataccaatcattgattcttcagaaggtataatcaactctgcaccagcatcttgagaatgaaa

SEQ ID NO: 145433 - DNA, 369 bp, Arabidopsis thaliana landsberg
tctatatagaacatatgtaatagattcttgcaagaacaaagattttcaatttttaccaaactacaaggtcaacttctacataacatatcggataaacggataaaagtatatatccaaaccctactacaaaggaaggggtgagacttgagagtttgtggaaaagaattgaaaggggggtagttggaactgagacattaacgtgagcgccttgattgagagatattatcgtcattttcgatcaaccaaagccccttaacgaccagtcttccctcctccaacgtgtcacgttctataacaaatactttttgactttggccatttgtggatcttttttaatattgaggcaacgtctattcatgttcactaaat

SEQ ID NO: 145434 - DNA, 402 bp, Arabidopsis thaliana landsberg
ccaaatcgaaaagttgagttgcagagcacgagaatttatgattatttgggtctttcgccgagttttccctcaggagttctccatgagagcaacatgggaagtgatcttgtcattggttttcttgactcaggagtatggccagagtctccggcttataatgacgaagggcttggaccaataccgaaacattggaaagggaagtgtgtagccggagaggattttgacccagcaaagcattgcaacaagaagttagtaggagcaaagtacttcactgatggctttgatgagaacaattctggaatcagcgaggaggactttatgtcccctagaggttatagaggacatgggacgatggtctcttcaattgcagcctcttcatttgtgcctaacgtgtcatatggt

SEQ ID NO: 145435 - DNA, 260 bp, Arabidopsis thaliana landsberg
ctctgtactgctcgtgtgcgtttaaccaagactctcccatcatttccccgagataagtctctctcaagccgcagaaatgggagtgattgttcatcataaagatgcaagaaagagcggtttctttgttggaacttgaccatgcgtccaagttcaaagcaatctctctcagtatgttgtagatgtgacctgtgagaagctcttcttgatactttgcgttcttccatcccaaatcaatttcgaggaccttcgacaagattggc

SEQ ID NO: 145436 - DNA, 509 bp, Arabidopsis thaliana landsberg
  unsure (1)..(509): unsure at all n locations
tcgaagagaaaaagccgtcgcttcacccggtaatgaataacgacgagggcttatacgagcacggtaanaaagtagcggaagcgatgattggaaagaataacttccatgatttcccggtgacaatgggaggagaggatttcagcttcttcactcaaaagactaaggctgcgattttcgtgctggggataaagaatgagacgctaggcgctggtaagccgcttcactcgccttacttctttgttgatgaagaagctcttcctgttggggctgctcttcacgcagctatggccgtttcttatttggacgaacatggtcatagccatgaagaagaggttaagagtgaattatagaaggtgttgggagaaaatcagcttgtattagtcatcatctacttgtatttgatcttgaaagttaggtgaggttaggtttcgggttgggaagaatgtttgttaatagtcacgagaaaccaaccactttcattaaaataatttgatgtaagatttttaaaa

SEQ ID NO: 145437 - DNA, 383 bp, Arabidopsis thaliana landsberg
gcgatcgctagagaagcaaacaagcagagggaggaagtggccgccaccaacaccaccaccaacaccaggccgagactccgccggaacatttaacggtgatgatggagtcaacattcctgatacaattccgggatcacccctcactgatgctcgagctaagctgcgacgttctaactccagaactcagccagcggcatagtaacgcaaacgtacatatacgtgactcgacaaagaaacccttttcgtttgtttaaagatatatagggaaagaaaagtgaatgaaagttttgaattgaaacaaaacagattttttttttttttcatgttttctgtaaattgaagcagtaagtattaatacagcgagaatatttgtgtttgttttc

SEQ ID NO: 145438 - DNA, 645 bp, Arabidopsis thaliana landsberg
taaagccgaggtaggcttgcaagagtaatgaacaggttttgatgcggtttatgtacatgacacatggcaaaacatgattggctacatgaacgattttatctaacaagcaagatagagatgagattaggagacaaggagcaatgtcgatttcttcgttggggtctgcaatctcaaagccaacttcttcatcatcttcatatacgtacttaggaagctcttctcgcatctttgggctagttacgtcttctttgttatggacaaagagtaaatctcaccacacaaacacaaagctcaagaagcaaaagctatgtgttagaaattcagctcaagagattccaaagacacttgaggaagattccaagtttgtacctttagatcctcaagatcctcgattcggccctccagtcagtttatttgtccctttcaactttgtatactgttgagtgttgatagatagtctgtgatgatgacaaacactttgattcaatctttttttgcaggttttgctgttgcttggccttcaacttcatgaagcacaaaaggtgatatatacattagatggatatcaaacttccaaagcttttttgagtctttggattaacacatcatcttgtaatgcagatacaagaacatctcaaggaactc

SEQ ID NO: 145439 - DNA, 176 bp, Arabidopsis thaliana landsberg
gttcggggttttcagatggaagatagtttttcattctcttttcttttctttattctctttggttttttttttttttcttttggttacttcggcgctggctagaaggtggaaaggctttagttccagtaagagtattgttctgcttcttcttcagaggtgcaacaaaatgaaaaatg

SEQ ID NO: 145440 - DNA, 173 bp, Arabidopsis thaliana landsberg
agagttttgattcaacagaatctctctctgtcgcgaaacgttgcttcctgggagaactataaagttaacaaatttcttcacgaaaccatagagtcacatcctcatgagtgttttgtgagctgcgatgatcgtgtgattttcaaatccctaacttttcgaaattcccaaaaccc

SEQ ID NO: 145441 - DNA, 212 bp, Arabidopsis thaliana landsberg
cactatttagaacaataaaactaatggaatctacagaagaagaaggatttcaaatatatcttccttatgaatctgtcaccatgcatgtgctctcagtttgcttaccggagaagtagttatgccacgggaggggggaatatctgcttgtgtaagtctcggtgaactctctccttctcaagctcctccacagtccaaaaggtctctcccaaaag

SEQ ID NO: 145442 - DNA, 458 bp, Arabidopsis thaliana landsberg
  unsure (1)..(458): unsure at all n locations
gaactcggatccaactcgcagttcaatgacccgacccgacaatccgacccgacatacttncactcgggttcttgatcggcaaatatcatcaccatcgtgtggaacgcctctaaagcccaagcaatacacgtcaacacgaagtgtttcaactgccacctcccaaactcgccgcaatatctttgtaacatctcatctatgcataatctctcctctccctccgcttctttcttcaccggaattttctctagcagcggttgtcggacatcgttaccgtttctatcctccggagattccataatttatgttttgatttttacagtgtttttgtttttgtgtttgtgtttttgtttaaaaggcgttcttgatttggtttgacgcgaagaaggaggtggcttctttgtcgtatttatatctcttgtttatcggaaaacaatttttccttctttttttctctagcg

SEQ ID NO: 145443 - DNA, 99 bp, Arabidopsis thaliana landsberg
ttctcgtagcttgaaataagattcatcagaagagtgaataaacatcaaaatccaacataccaaactagaaaaatgtcagtagttttactctcttctact

SEQ ID NO: 145444 - DNA, 338 bp, Arabidopsis thaliana landsberg
atcaaactcgggttagattagaattgttgttacaaacagtcaaacactgtacaagctaagtctaaagctagaacaaaaagaatcgagcattagaacgggacagtataaggtaaagaataaatcccaacttcagacaaaaattgagctctaggccaagatgaatctcccggtctcatcatcgtgtcatcatcaaccttgactgctgctttgggcttaagcacctcttgcgtcttgttcccaaatagccaataatcaccattgtcatttgaagatgcatcagcaatacacatggaaggaggagtccaaccatcaaacaatgcattgtattgatcttcttt

SEQ ID NO: 145445 - DNA, 421 bp, Arabidopsis thaliana landsberg
cttccttttggttgtaataatcctaagcttctcactactagcttcttcttctggtaatcaaatcaatcctccttgttactctctttcatgtttttcattgtatacattaatgattacatattgaaaacacacacagaaatgaaagtggggttggaggattacaattttccagtggatccaactccgacaacaaaagcttcgataaaaccaggtcctattgagcatggaactcctctcaatccttatattcctaagcctccttctccttcttcgtctcctcctccacagcaatcccaagtcggtggataacaccaaatcttttctctgatttatttgccccgtgaatgtgatctacgcactgtttgtagttataattcccacgttttttttcctctttctttatctctcttctgtactaaca

SEQ ID NO: 145446 - DNA, 2057 bp, Arabidopsis thaliana landsberg
gcgaagacgaagacgatgagcaacaacaacaacaacacactagtaacaacagtagcatcagcttgaaagagagaactaaaacctataaatcgagagagattggtggaagatttttcaccagatttcatgggagaagaagagagtcgaattggagacgagctttcgattttggttctcacggcggagcgactccgtgtagctgtggatgaagctgaatcattcaaaacagagtgtggcgaggttggtaaacaagtagatcggcttgctcaaatgcttagaacacttgttcgattcgtctctagttcttctcaacaagtttatgatcggccgattcgtagagttatcgtcgatgttaagaagaatctcgagcgtggttttgctcttgttcgtaagtgtaggagacacaatataatccgacgagtttgtattatcatcaacgctgctgattttcgtaaggtgattaatcttctggaatcttctaatggtgatgtgaaatggattctgagtgtgtttgattccgacggagatggaagttttggtggtggaatcgtgatttcgcttcctccgattgctacgaatgatccgattttgccttgggtttggtctttggttgcgtcgatacagatggggaaattggttgataagattgatgcggcgaatcagcttggttctcttgccggagataatgatcggaataagaagattattgttgatgaaggtggtgtttctccgttgttaaggcttttaaaggagagttcatcggcggaggggcaaatcgcggcggctactgcgttagggttgttggcttgtgatgaagataaggttaggtctattgttaatgaacttggtgttccgattattgttcaggttcttggtgattcttctgttagagttcagattaaggtagctacattggttgctagaatggctgaacatgatcctgttgctcaagatgagtttgctaggcagagtgtgattaagccattagttacgttgctttcgcttgatgtgtttgttgatgatattcatttgagtaagcataatagtattcactctcttgttcagatgaacaaagaggttgagaaagatccgtcttcgaagctttataggccgcttaagagttctaagtcgaatgtgtatcgtgacattggtggtagaactgggaatttcaagaaggagagggataatgagaatcctgaggtgaaacatgagcttaaggtcaattgtgcggaagctttgtggatgcttgctcgaggaaatgtagcgaatagtaggaggattacggaaacgaaagggttgctttctttggcgaagattgtggaaaaggaagttggtgaattgcaatataattgtttgatgactctgatggagataaccgctgctgcggagtcgagtgctgaccttagacgggcagcattcaagactaattctcctgctgctaaagctgttattgatcagatgttatggataatcaaagatgtcgatagcccgattttaaaaatcccagcgattcaatctatcgggtcattggcacggacattcccggcaagagaaacgagaatgatcaagccattggttgagaaactcggtagtagcaaccaagaagtggctataacagctgtaatttcattgcagaaattcgtatgtcccgagaacttcctctgcgcagagcactcgaagaacataatcgaatacggagcaatcccgttattgatgaaactaataaggaacgtcgagcagcaaatgcagttacagtgtctagctttactctgctacctttccgtgaatgctagtaaccaccaacagttggaacaggccaaggttttgacggtgctcgaaggtgcagaacgtttggcgggtctgcagaatatggagttgagagaactcgtgtcgaaagctatatatcagctaagtctatacaatgcaggaagtcacagtcaaatgctatcgtatgttggtccttaaagcaagatacagtttatagtgtgttggattcatatcgtacagacaggaatcttcattgttagatttacagagaaagagccaaaagcagaatc

SEQ ID NO: 145447 - DNA, 353 bp, Arabidopsis thaliana landsberg
tgttccgaaatctgaatggcattgctcaagatgtgtgcaattatacaatggcaagtcttttcctcctaaatacggccgtgtcatgagaagcgccactacagcaaaaatgtcttctagtacagccgaagttcaattacccgcagagaagggggttggtaaaatggatcaaaaggttagtcaagagggaatgccacatctcgagacagcaaaaccaattaaggattcagctatggaacaaacagttgaagctgaagatgtagctatgaatccaatagttgaaaaagctatgaatgaaatggtggaagctgaaggtgcagctattaatccaatagttgaagctgaagatggagcta

SEQ ID NO: 145448 - DNA, 341 bp, Arabidopsis thaliana landsberg
gaaaccaattactatacttatatgtgtttatataacagttaaatcaatctgtcagacacattttcacatctctagagaaagcataacaaatgaatatgtgaaaaattccctatgcaatttgtaccaataatctatcttctctttttcttcatgctgtctctgaagccgcgtggtttacatatattgaatctactttgtatctccttacacagcttcaggaccgtcttgcggtagaatgaattgacgcattggccttggcgacttggtacactcgtggcgtctgaaagtgagtgggatcccttcttgctcaaacccattactatctttcaattgttaggaag

SEQ ID NO: 145449 - DNA, 225 bp, Arabidopsis thaliana landsberg
cataagagcaacatctcaaccgcagagactggccatggatacgaggtcgaagagagtaaaccggagttagagaaatgctaaaagcgccaagctaagaagctattagtaatttggtcttactttgagagattgttttctaggagacaaaaagagtttcaaaggtatttgaattgatttgtagtggtaatgatttgactaactttcgagtttctttcttcttttgtt

SEQ ID NO: 145450 - DNA, 472 bp, Arabidopsis thaliana landsberg
gtcattagagataagcggactggtaaacccaagggttatgggtttgtgagtttcttaaatcctgcggatctagcagcagccttaaaagaaatgaatggtaagcaccttgtttttagtttctgtttgatgtgttgcttcatcttgatatctcatctcactgtttttgtcagaacttgttatatgattctgttctataatcactgtcgttgaacattctgatttggtccactgatttcatatgaatacacaggtaagtatgttggaaatcgtccgataaaactacgaaagagtagctggaaagagagaacagatcaggaggctgctgaaagacaaaaggcaagtatcttgactcgaacgttttgatagatacatttgcaaaggattttatttttatgagtatcccatctcttgattataactgatggttctctgttaaataataaatgcagcatcacagcaataagaagcaaaa

SEQ ID NO: 145451 - DNA, 88 bp, Arabidopsis thaliana landsberg
gtgagtgcaaatcccatcataccaactaatataaagttataccatctatgatattctatcgtgaaaaaatatgtaaagtctaatatca

SEQ ID NO: 145452 - DNA, 93 bp, Arabidopsis thaliana landsberg
acgggagcttgatcattacaaggatatgcttgaggagtctaccaaaactcaacttctcttgcaagagaaagttgtagatgtggaaaacgactc

SEQ ID NO: 145453 - DNA, 417 bp, Arabidopsis thaliana landsberg
  unsure (1)..(417): unsure at all n locations
ctcgtcatggtcgctacttgacagcttctgctgtcttccgtggaaagatgagtaccaaagaggttgatgaacagatgatgaacgtccagaacaaaaactcctcatactttgttgaatggattccaaataacgtgaaatcaagcgtctgcgatatagctcccactggtttgaaaatggcatcaactttcattggaaactcaacttcaatccaggaaatgttcaggcgtgtgagtgaacagttcactgccatgttcaggagaaaggctttccttcattggtacacaggagaaggaatggacgagatggagttcactgaagcagagagtaacatgaatgatcttgttgcagagtatcagcaatatcaagatgctacangtcgtgaagaggagtacgaggaggacgaagaagaagaagaag

SEQ ID NO: 145454 - DNA, 410 bp, Arabidopsis thaliana landsberg
gatgaaagagactttgatgggacttggagaagagaaaagagaagcgataaggcaattatgtgtttggatcgatcaccatagaagtcgttgtgaatatcttgaggaggttttgtctaagaccgttgtggctcgaggccaaagaagagtgtcgcagcgaacttaaggactcagtaccatggtacgttgtttatctttcccaagcctagtttccacctcacatgaatgcaaacaatgaaactacatatatgtgtttattaggttttgggctctggtcaatcaagaagctggtggagaggtatttttggttggggacttttggtgtacctgtgttcgattttgttgcacttttatatgtttgttaacttttgttgtataatgtaagtcaaaatttttggtttattgtgggcaaa

SEQ ID NO: 145455 - DNA, 680 bp, Arabidopsis thaliana landsberg
ttgcaaggcttcatcgagcatgagatggaaagaaccgagatcacagcggctctcgcaaacagagaagtggtgtttttcatggtatgtcagttcatatttttcagagcttgtagatggtttaaatcaatgtttgatttgtctgatccttaatcacatctgattaaaaatgaaatctccaggcatctgcactaattaccttcccagtgtttggagcatggatgttactctcttcctagtttggtttctggatgacatgttcaaccgatgcatcagcaatgttcagattggttttgcttctcattgctcaagaaattgtctagttttaagctttgagatccgtaggataatcctagtaggatcaattacatccgtgaacaaaccaaaatccggttactctgtggtttaaagtttaaaccagttattatggggcaaggtgcacagttgtatccaagttcaattgttggaaattgaatttgttattgaaaaaagagacaaaaccaaagagatgcagacaaaagtcaagtccttgttcgttgttttaccgttagatgtttgtcgtaagtaggagtagcctttgtatggtttaacgtgagatgatttaactacatgtagtgtagtgaaagtttatatatacaagaccacattattggaaaatgaaagttattttactaacaaacaaa

SEQ ID NO: 145456 - DNA, 391 bp, Arabidopsis thaliana landsberg
tggatattatataacaagatgtaataagttgaaccatatgcaataaccattccaaaacgagtcgattgggctatcaattatcaaactacttttagttgtgttaagttgtcatctgtcagaatatttcacatcgtaaatcaaaaaatgattttaacattttcattatgcaaagataatggatctttcaggatttttatcaattaattttgaattaaaacaatcttttaaaaaaaaaaaatagtattagtgctatttgtgaaatgatgaattttcggatttttgtcttttgccgcaaagaatttttgaattatataagttaggcaagaaaaaaaaagaatatgtgaataaactattaaagcacgattaaataatcatgattgtgtttattagt

SEQ ID NO: 145457 - DNA, 4375 bp, Arabidopsis thaliana landsberg
  unsure (1)..(4375): unsure at all n locations
ccaaagaatgggggaagatttcctgaactatttgaggaagggtgaagcctccccaacagaattcaaaggtgggctccaacagggggtttcaacaatgacaaaccccctcatcctaatctctcctacagaagcaacaatgtggccaacccacaagatcaagtataccctcaacagaaccaacagactcaagctaagccctttgtaccgtacaatcaaggctacaaccaaaagcagaactttggacctccaggtttcacccagcaaccacaaactacttctgcacaagtctcagagatgaaaactctacttcaacaacttgtgcaaggacaagcctcatgctccatgaccatggataagaagctggttgagctcaccactaggattgattcctcttataatgacttgaacatcaagatcgatgcacttaacactagagtcaagagcatggagggacacattgcttctacttcagctcctaagcaccccggagtatgcccatgctatctccacagttcatacttctgacactgaggactgtgagattcaagagggggaggttttgagatcaagatcaagacaggaaattgaactcgacttctttgctcggcttgttgaacgagcacatgacccgagtaacccaatccctattccaccttcctatttgcctgaactgccatttccaggaagaattgcacagattaaagaagggatcttcaagaaacacaagatgatgttcatcaagtgcatcaaagagttagaaaagaagatacccttggttgatactcccaaggaagtgattatagaaagactctaagaagttcaggaaatagttgaattgagctttgagtgtagtgctatcatacaaaggaaggtgataccaaagaagctaggtgatccaggttcctttactctaccttgttcactaggacccttagtgttcaacaatagtctttgtgatttgggagcttcggttagtttgatgcctttgtctgttgcaaagagattaggatttgataagttcaagcctagcagcattcatcttattctagctgatagatcagtgagagtgcctcatgggatgctagaagacttaccggtaaagattggatcggttgagattccaaccgactttgtggttctagagatggatgaggaaccgaaagaccctctcattcttgggagaccattttagcaactgcgggcgctcttatcgatgtgcaaatgggtaagatcgacttgaaccttggtaagaatctccatatgagctttgatattgctaagaagatgaagaagctcactatagaagggcaacttttctttattgaagaaggaaatttagatgctgagttgttgagtgggttggaaaatcctattccgtactccattccgactcgccacctaggagagcccgaagagcttcttatgatagaaggaggacctagcttagaggttgagactaaggggaaccatttggatgttggtcctattgctagagagcttatggagctcaggaaacagtatggagctcaaggagagaccatgaaaaagttggatctcaagatggaggagctgaactacgctatcctagagcttaaggagatgattaagggttacccaggtcctgagattgatgaatactttgaggaacccgatcttggagaagaggattatagtactgatgagaaagaggcttacttcgaggaaagatcaaatgagtattccacactccagctatcaagagaaaatgcggagtatgattcagactttgaggattcaacaagtgaggatgaggacttctcagttcctctcctcaatctcttctctacctaaacattgtgagagtcaagcttagtgactttaaacaagctcacttgggaggaagtcccatgtctatccttgtatatattgctttcttgttatttttgatgtttttgtttaagtgtttcagggaaaaagacttctagagaatttcaggccacactcgaccgtactactcggctacaggccgagtgtgggcttcaattgaccaaaggcccaagattgaatagtactcggcccacaccactcggcccaaggtcgagtatggacctcactgttcaaaggcccaacaagatgcagcactcggcccgaagccgagtcagaaaaagaagcccatcaggcccaacactgtactcgacacgcgcgtcgagtatgtcggccgagttcacacgtgcgaggtcaacacaattcaaattcgaatttgaattcgaatttgctgggccccaccaatcaaatcctgctccccaaagcccttcaaagattctgctgcaaatagtgagacatgtccccttgaccaaatgaagggtgaggatctaaggtgtttggagggctaggatcaaatcttcttgtctataaaaccacactcaacaagctaagtcactcacactctctttttgctcaaaaatttcgaattttactccttctctccaaacattttaagttcttactctcacttctctagatttctcagaaactttgccaaaatctcttgttacaaaccttttcaaagcctctcttacactctttgttcatttttaaacatcaatttctcttctactttgacctacctttggttattttgtggtgactatctgcagtaaatcacctcaagatcatgaatcccgaagaatcaagaaggagagcctctgctcgagcagtggcaagagggtttgagatgattaatgagaagaatcagtcaaggaatcagaaagctgcgagtcctggttttactcggatgacaggccgagtacaatggccgagtatggccccggagtcctctgagggtcgttctgcggctgctcaagaggaaatagcaagaggcaagagggtctgggagtccgagctagttgcagaagaagaagtgcctgagatagagaaggaagcatctgaggaagatgtgcaagttgatgaagaggtcccgatagttcctacaagtagaagaaggaacaccatgaggagaaagaaagaacctaccatagaagagcactaccaatatctcatggagctgagttttgaggggacaagatatccccatagacctaccatgcaagctttggggatatgtagagatgttgactacctcatggagatggccaagctggagaccttcttctcctacaagtatgaaggatacaaaactgagagctgccaattcctagccactttgaagctccatttctatgctgaagaaagggagagagagctgnnnnnnnnnnnnnnnnnnnnnnnnnncatggtgtttggaattcaatactcggttcccattaggcagttggatgctattttcaagttccccaccaagtatggaatccgccaaaacttcagcaaggacgagctccttgatctatggttgacaatcgccggtccactcccctacaagtcatctagggccaagagtttgttgatacggagcccggtgcttaggtatctccacctttgcattgcaagtgccttcttcccgaagaagacaaccggccatgttaatgagggagagctgaagttgcttgatctcaccttatgcttcattttggggcacacgagaaatgggatagagatggaaggggatagggctgatacatccctttcggtggtgttgattgatcacttgattggttttagggagtatgcagccggaatccaccaatccggctatggaggaagcttatgtgctggaggagtgatcacgcccatcctaatagccgctggagttcctcttcatacccccactcacacagcaacctacatcgatatggagtacttgaagaggaagtgctacttggataggtctgttccagcggaccaactctacttcaagttcaagcactccacgctaggtctctctaggctagcactaccttgcaagaagttcaccaccattaggattgggaacaacattgactttgatcctcctcaatcgatcttagtcaatgtccttgcgcctctacaagtagagccgagcataggaagtgagtctcaagaagaaggagcagagtggaatgaagaagaagccgagcaggaagcttatactcggccgagtaactttcagcaggccgagtatggccatnnnnnnnnnnnnnnnnnnnnnnnnnnnnnnnnnnnnnnnnnngatgaacaagaagattcgtgcgaagctgcagcggagcagtttttctttgaggattatgctgagtccgatccagagagagatcccggtcaagttcacaagaagttgggaatgctcaaaggtctgggcaagtttcagaggaagttgttcagtgggttgaagaagaaggtgaggaagatgaagagagcaatggatggcatggcggtnnnnnnnnnnnnnnnnnnnnnnnnnnnn

SEQ ID NO: 145458 - DNA, 175 bp, Arabidopsis thaliana landsberg
tctcctcgctccttcagctctctgcatttcagaaaaccactcctctttctctcttcttcttcgacattttcctcgaaattacagcagagcgagcagcaatgtaataatcaccaggtgagacacgtgtccaccgtacctgtcgagtattctacaccgactcctccggaatccgacg

SEQ ID NO: 145459 - DNA, 78 bp, Arabidopsis thaliana landsberg
tgtctccttttttgggggttcggtatcacggtgtgtattgtgtaatggaacctaatggtatctgttaatctatttgaa

SEQ ID NO: 145460 - DNA, 703 bp, Arabidopsis thaliana landsberg
tcaaaagacaaaagagtaggagttcaactccatctcctgcaaaaagatctcccgccgcaacccttgagtcagccaaaaataggaatggagaaaaacttaaaagagaagaggaagaacgaaaaaggtaaatcaatacaaaattttgaagtaagatggatgttatggtgaaattaaggttttttgttctcaaatgttattttagtgtagtgtggaagtccttgattgttagtctcaaaagtgcgacaggttttatggtattctctcacaggctttgcttatggaagataagctatatttcgatttgtttatatttgatcctctggcacaaatgttcgtactatctcgatttgatgagttaccgtttgttcattacatggatcatgattgacttagagatgtaaatatgtccaaagcacaagaataatcttggtgaaggtttgcttgtgttatggtgacaaaaaagaaatttcttcacgaaatttaccattggtattgggaggagtgaaaatggaaacgatctcaacattttttacggatttgcaataaatttttggtcttttgctgttcaagattgaagacatcaggaaatgagaaagttcaggtgatattcaatattctgaacctgctgtggatgtcctctaatttttcactgtatttgctaccaggcgacagcgcgaagcagaactgaagctaatagaggaag

SEQ ID NO: 145461 - DNA, 436 bp, Arabidopsis thaliana landsberg
ttttcttgtagttggaataatcttccaaacctaaatacattgtttcatttgtattcatacatcaaatgtatatatattttcttattttattttcttttttgacggctgaatgatttgtttttctgtccgaagacgaatctacggaaacgacgacgtttccagtggctgacatggtaggataaaaaattcggttcaatattttttagcaggtgagcgcttcgtatttaaccgggattggatggttgaaaccagccctggttagtagattcccaaccgcagcgagatctctacagaatactccttggtacgcattggaatttaccggtttcgtttcagcgtttccggttctcttaatagaaccggatttttcaaccggtttgcgttcttcaatcttttgagcgtgagcaatggcgttcttcctctgctcctcggctat

SEQ ID NO: 145462 - DNA, 231 bp, Arabidopsis thaliana landsberg
cttaagagcgtgacaacaatatcacactcagataaatatcaagagatagagagagtaacagtgatatagtctagaaaatggcgtcgtggatgaaagcggtgctaatctctactggcgtcgtagccacggctatgcatctaaaggttattgttcctgtggctatggatttcttacaaaatccgattattttgagctcttttctcacgtggctgaaaccgccgaatctttacg

SEQ ID NO: 145463 - DNA, 444 bp, Arabidopsis thaliana landsberg
acaaaagataaaggcacacacatttatattcaaaaactaagaacataggtcacacaagaaagattcatacatcacatggcaaaacaaaaaaaaacaaaaaaatataaagcctggagagcagatgccaaatttttaactatataatttggcatttatagcttaagagaaaatacataatgggtgtagataaaacagtgatagtactgtaaaaataaataaaatagtacatttagagagactttacagctagaaaacgaggctctttaggcatgaacttctggtttgcataaacatccatgtaatctccaaacacaaactttggatacttcttctcacttccttcctcttccgccaccgcggctggccctatcgccgccttgtacgacggattgtagaaggaagctatagaccttctgtttccttcctccctcgccaacaccctgt

SEQ ID NO: 145464 - DNA, 406 bp, Arabidopsis thaliana landsberg
ccaattctcctaaagtaacatctttgtttatctctcgcctctaagaaacaatgttgagtgcctttttgggtcatgcgtcagctattgctatagcttcaccagtagtcagcattgtgggcatcaggttattttcttgatttatacttttgggattatgtgaatattgtactctccctctctctctctttctttttttttcaatgtcattttcagtttattgtttagcaggcatgcatattcatctttttctttacatgttaattttaattaaggcgacaaacatatgcacagatgaaacacgtgggggtcgttgaaaaacaaagagaaatgccaacataacctcaatcgtttcctatgaacggtggtgatggtccgcacagttacatccacaattcctcttatcaag

SEQ ID NO: 145465 - DNA, 419 bp, Arabidopsis thaliana landsberg
  unsure (1)..(419): unsure at all n locations
cggancttgtcgtcttatttccccaattcgccggcgttttccggtttcctcctccgtcgcttctcttgctcttctagactcctcctctatgatcgtcgacgacaatctcggcgcatttctcgaggtctaatttacttttaatcacctctctattcgtctttgttctcttctcacactttcgtctttatagattcttccaaaagatcttcgtcaccgtctcttgaacgattcaagaagaaaccagctcgtagaggttattgttactcttgtgaaaacaatttcaaaggctaaaaattgaaatgagaaagtttaatggtgatgaattttgaaaccttgattaggtcataatggatttaggaagaccacctgaagcacgttatctcggagaacctggaggtcaatatcttaggaacaacgag

SEQ ID NO: 145466 - DNA, 305 bp, Arabidopsis thaliana landsberg
tacaagctcagaaccttgtgagagaccgtcaatgtcagaagtggtgaagatgttagaaggtaagattatggtggaggtggagaaacttgaagaagcttcagtccatagagaaacaaagagacttgaaaacatgaacacgatgaagaagtactacgaaatgatagggcaagagataagtacaagcatgagcatgatcatgagtgatcgtagtgaatcatcagcagatcattagcagttgtgtaaataacatatcaagatggaaacccaaaaaactgtctttagcatttcagaagcaatctaagtaa

SEQ ID NO: 145467 - DNA, 199 bp, Arabidopsis thaliana landsberg
atgtttttaaagagtggtgtgacgtaacgactagagtcagcaaaatccattattggatcataaatattctcatctataaattacctaaacccttacaagtagtgtcccaaccaaacaaatcgagaaagacgaacacttaccaaacaaaatctctttgtgagctttagcgatcgtaacaatggcgaacgaggtgattctt

SEQ ID NO: 145468 - DNA, 282 bp, Arabidopsis thaliana landsberg
atctggaccgtacgatactccgattacccttctaaagctttaacataggggtacatctgtaacttcacattccatcttcccccaatctcctatttgtgtcttcttcgagtttatatatagagagatagagattggagagcgagcgagacaaatcagaagagagagatttagatattgtagagtgagattctaaagagagagagagagagagatatggctagtggaatcgctcgtggtcgtttagctgaagagaggaaatcgtggaggaagaatcatcctcat

SEQ ID NO: 145469 - DNA, 317 bp, Arabidopsis thaliana landsberg
ggatcgtcttaagctttatttctccgttttcgttttgtctttctttatcgtctcggtttcgtcgtctgatgtcaacgacggcgatgatctcgtgatccgtcaggtggttggtggagccgagcctcaggttttgacctcagaggatcacttttctctcttcaagcggaagttcgggaaggtctacgcttccaacgaggagcatgactatagattctcggttttcaaagcgaatctcaggcgagcgaggcgtcaccagaagttggatccgtcggcgactcatggtgttacgcagttctcagatctgactcggtctgagt

SEQ ID NO: 145470 - DNA, 391 bp, Arabidopsis thaliana landsberg
  unsure (1)..(391): unsure at all n locations
caaggatttgcgtactcatttcattccagcagtcaagtaatagtagcttccttatggtggtgtatacacaataacgntattgtacatattttttctgtgtaaagaaatggagttgtggatttatacaggagaagtactacaaaaagagagtagagaaaggagtggtaaaaaaagaagatatggagctttacctctttgcctccaagccttcaagtggtgctgccatcttcaacctctaaacacatctctctctctccttattaattttactcaaatccgaattgtttgcagcaattgtgcccattgaattcccagcttcatttttaataaatatttttgaataatatgtaggagttgacgacaataataaattgaagtttcattcacaatt

SEQ ID NO: 145471 - DNA, 417 bp, Arabidopsis thaliana landsberg
tttttgttgtgtctaaattcacaaagtcatcttctggcttttgcgcaccgaacagaacagtcagtttaatgggttcgccggataagcaacatcgccgccacgtcgccgccgaatttctccatagcgcggtaacctcaatctcttcctcaatcattcctctcttccctcccaaaacggcgccgtctcgtgtatgcctcccacttagattctcggtatcagacgatgtctcgtcccctttcgaatcgacggtcaagagcacatcatccgcgtcctcctccggccttaattcaacggttaggatatcatctctcagctccgatgggaaacgcggtggacctgctttcgtcggtcaggtatttagtatgtgtgaccttactgggactggtctaatggctgtttctactcgcttcgatattc

SEQ ID NO: 145472 - DNA, 919 bp, Arabidopsis thaliana landsberg
aggtaattcataatatatttttacttatatatttgataaacaatattatatgaatcagataaaagacgtctgtaataattttcttatgttgttaaataatttatgatgagcggaagggtatttttgtccaacttatagaaattgaggaaagagaactaattatacaaaaattataggtctattcttaatttttatgttttctgggtatataaattaatatagaccctcacacaatcctatataaaccctacgaccgcagcccttgactcagttctggctcgtccttcacgccactctctcctatatctctctctcgctctcctccccctttccgccgatcgtcctttccccaccgtcgagtttttccctatccatctccgggtacgactttttctctctgtttctaatcctacgccgcgatgttgtggatggtgattttctgtgttccgatctagtcttaggttttccttttgtaattcctgaaatgggttttgatctgatttgaaccttatcgattttccgattcatttttagggttcttcactttatctattgtagtttggtttcaagttggtcgtcgggtagttcaatttttcttcttttggtttgtttcaatgtctcattagcaggctttacgttgcacaccagatgtctgttgatctctgcaagaagaatccatcttttctttggtgtgactgtggttatatgagcagggggaggttgtggtgttttcagattatcctcttcaggcactggacttgacttgtcttcaattcctcgacttctctctctttcttcttctcctctcttctttctcgtttctctgttttttttttctgcttgatttgatcaaagggtattcgtttctgctgctcctgtttactgtgaacttgaagactaagttttctttgctaaactc

SEQ ID NO: 145473 - DNA, 1220 bp, Arabidopsis thaliana landsberg
catgacttaaaaattaaaataaaacgaaaagggaaagcgaaattgttccttcctttttagccttttaggtcttcgaattctcaattttcttcggtgatttctggagaaatctgctttggatttggagaaacaactctgtctatgtatgaatctcgtttcgaatctccggagtttgctcaatgtaagtgagttcttcgatttggttactttcagaagcgaaatttcaaaaactacttgtagtttggtgctacgattcagatttgtagtttctggagctggtaatgaacaggttactttgtcggaatattggagttagagtttgcttttacatgtttaatctctcattaactggtttatagaataagtggatctcgctataatgtggatgatctcacacaaatgctttttgatcatcagcttcagttatttacattttggacaaatttattgtttttgttgtgtccacttgctcttttcttggtgctatcaaatttgatttctgtgaatcgtaattgtgatctgcatttgcaggttgcttctcttggcgtgaagtttgttagatgatggatgatgatttctgagaaaccgttgggagaagaatctatacggcaggatctggaggttttaaccgtttcgaggaggcttgtgaaaagtgttagccagaagttgaagaaaaaaattcataaaactgaggtggtggaagatgaagaggttgcaaggggagcggtgaattgtttaagcatcagtgttggttgcagagttgctgatacgggtgaggattttgaggaggattcaagtaataagagatggtctagtgctagtgaggagggtaagggattgatgacaatttgtggaactgaagaaactaggttagattgtttttcttatggggttagagagaggttctggaagaagaataatagaaaatatctagcagactcgggccaggattaccgcaagcacgtttatcttcccgatgatattctggaaatgtgtttgatgcggcttcctttgaccagcttattgaatgcacaccttgtttgcaagaaatggcaatccatggccaacactcagcggtttctccagatgagacgagaaggctcctttcaaaccccgtggttgtttttgtttgctgctcttaaagatggatgctcctctggtgatattcatgggtatgatgtttctcaagacaaatggcataggattgaaactgatctact

SEQ ID NO: 145474 - DNA, 341 bp, Arabidopsis thaliana landsberg
agagctcgatgagaagatgagagatgtattccatggattcctagaggaacgaggtgtgaacgagagtctcttcccctttcttcaggcatggctctatgtaaaggatcaccgtaacctactgcgatggttcaaatcagttggcacgtttgttcatgaaaacccatctgcagaaaacaccgcctagaaggacgtgtcttttcggtctctggatcggtttctgcggttaatttttttagtatggcactataccgcttttaaatgtttcaggaactgaatcacttttattttcaaaccatttcaaaacatatgcatccgagattaatgttaagaaaaagttctct

SEQ ID NO: 145475 - DNA, 253 bp, Arabidopsis thaliana landsberg
  unsure (1)..(253): unsure at all n locations
aacttgaaggatgtaattgctaagaaagatgaagagctacaaaattttcagaaggtaaaaggtaataatgcaacatccctgaaacgtggattaagcaatttaaggttggtggggcctacatcacctagaagacattctattggagcgtcaccaaacgctcgacgaggaaaggcctctggtttatttggaagaggaacctcagatgttgacaactgctctgaatatagcagcaagcattcngattctggttcac

SEQ ID NO: 145476 - DNA, 300 bp, Arabidopsis thaliana landsberg
agcaaatccgagagcttagtgtgaagtgaagaagagtttcaatggcggcaattttttctctcttccttttcttcattctcttcatcgtctctcttctcatcatcttatctttcatcgtacggccaagatccgtcacgatccccatcaagtttcgccacgtcttcatcaccggtggatcaagcggaatcggtctcgctctcgctcaccgtgccgtctccgaaggcgctaaagtctccatcctcgctcgttcaactgaaaagctcgccgaagccaaacagatccatccagctagctaccggt

SEQ ID NO: 145477 - DNA, 65 bp, Arabidopsis thaliana landsberg
aaaagtttttcttgaaaatctgacaattgttttgtgaagttcaagaactcttttacgagtgtctt

SEQ ID NO: 145478 - DNA, 181 bp, Arabidopsis thaliana landsberg
aatgccattaccagtacaattttcagttaacgtacatcttgtattattcgtcgtattataacaaatgttgatttcatgtgttcgctctatagaaaatgcctttgctacagcaggatctaagatgtcagaatctagcatcactatgccttcagtacagatagctgcccgatgctcagattta

SEQ ID NO: 145479 - DNA, 196 bp, Arabidopsis thaliana landsberg
gcttaccttgatttttctcaatgccaggaagagagactcggaagatgtaagcaacttcgctgacgccaatatcaacaagaccaatgggtggcccaacagagcctagcttagcagtaccagtgcagaatacatgtgagatcactttcgagtgagtagtagtagtctgattattctcagcgttcatctttgtgtttct

SEQ ID NO: 145480 - DNA, 580 bp, Arabidopsis thaliana landsberg
tgtcgaccatttttgtttctgagttgttcttcttgattagctttgtccgcttggaaccaaacatggcgagtcttggccatatagccagagaatcatcagacatcacacgcctcgcccagttttacaaagaggtaacgatacctaatcgacgttttcaatttcttacacttttctttttcttatctctcttcgtattctctgttctgggtttgtgttgttactaccaatttcgacccaaaaaaacaaacgcactgagtcgattacccatctggattagaatctatggtttgtaatttggctttttatttagagatttgtgttgctattgtggctttgtctctttctcttgtcacttatctcgtttctagtttctattgagagtgtccacttttggatgcctttaatccttttgattaagttagtgttatcttcatcttcgtggtttgttctgaaaccaatggattatatatgtataattgtcaggtgtttgggttcgaggagatcgaaagtcctgattttggagacctaaaggtggtgtggctaaacttaccaggtgcttttgcaatgcacattatccaga

SEQ ID NO: 145481 - DNA, 290 bp, Arabidopsis thaliana landsberg
gttaacactaaactggtttatgtaaaacggattcataaatgtatctagacattcacttacataaaattcatcacaaaatttcacccaattacggttttgattcggtatagggaccaccttcaaaattacccaataaataaagagtggataacaactagcataaaataatcaaagcatccactaagacacaaaacacaatttcataaagatgatgatgaatcacataactttaaataaacattctttcaaaaaggcaaaacttttaaataaatatcattcgcctgtcggcc

SEQ ID NO: 145482 - DNA, 230 bp, Arabidopsis thaliana landsberg
cggcggaggatttagaaaagtcacggttctgccgtcaacttctgctggagatatcgctggattgttatctggcgttgaggttgcggcgaggacgtctctgcctgtgagaggacgcgccgttttgaatttccggtggggcgttagggttcctacggagatcagacgcgatttcgatccaacggctgctatttcgttgaggagattcccttttttggtgatgaataaaatag

SEQ ID NO: 145483 - DNA, 528 bp, Arabidopsis thaliana landsberg
cttctatcttaaaacttcttacctaaaatagaaatttgattttttgagaaatggcttcaaaaatttcagcctctcttgtcattttcctcacattcaacattctttttttcactttaaccaccgcatgtggcggtggctgcagttccacccctaaacccaaacctaagcccaagtccaccggaagctgccccaaagacactctcaagctcggtgtttgcgccaatgttctcaaggatcttctcaaaattcagttgggaacaccaccagtgaagccttgttgttcgctcctcaatggtttagttgatcttgaggctgccgcttgtctctgcaccgccctaaaggctaaagttttaggcattaatcttaatgttcccgtctctctcagccttcttctcaatgtttgtggcaagaaggttccttctggtttcgtatgtgcttgatatatctatccacccttcgattgattataatgtttaagttatcttttgatgtttttccttgattaagattctttgaattcttctattt

SEQ ID NO: 145484 - DNA, 582 bp, Arabidopsis thaliana landsberg
gattcccaagcccgtctcgctatgtacatagcaatggctcacgctggtctcgctttcgccatttgtgttctgtatttcgtcggaaagctattacaagagtatctaagaccgattcaatgggcgattctctgttcgattcctttacgaggtattcaagaaacccttgttgatttctggagcgagcctttgaaattagggcttacggaagttgttctcgctgttcctgtttctgtcttcaatgttttcatcgggtcgattgtggatattaaaaacgtctgctttagggtttttcttaggagatcgaaacctaagagaacgaggaagaagaacgatactgggttttctaaactggttaaatggttagtctcttttggtgtctttgtcattgcttatgagaggattggtggaattgggtctcttgtcattctctctttagggtttttgtttagttccaagaatgttgattcgtctctctctgcggtctcttctctgaggagtaatagttttaggagaagccatttcactgcttatttcactagagggataatgacgagattgaatactatagttgctattggtttg

SEQ ID NO: 145485 - DNA, 140 bp, Arabidopsis thaliana landsberg
aatttgatgttatgatgctaggtgaactgtaagaaagatatcaaaaccagaaaattggagctttctgattaggtaattgctcttaaagctaatataaagttataatttggatattaattttaatttaacgcaatatttgg

SEQ ID NO: 145486 - DNA, 372 bp, Arabidopsis thaliana landsberg
gcagaatcatcaggtgacggggcaggcagatttgcggcggattactgggtgagaagatccagaatttgccgtctcatggcaatggcgtagagggatcaaagaaagcagaaaatttcaaaccattttgacccaccatcatcaagcttaaaacgaaggcagtggtcaacttctaaaacatgaaatgaggttctggaaaaagtttccagctagggtaacccaattgagaggtaaccttacctcttgactatgtccgtcatgtaaaatcatattcattagattcttgtgttcttcttgattcaggcgggggcaatggatacttgatcgagtgattttggggaaaggaatcattctccagggaattggagccgtgtg

SEQ ID NO: 145487 - DNA, 251 bp, Arabidopsis thaliana landsberg
aaggctgttactgatgaattgggagagtttgaaatcgatcttccctcccaactccatgcgattccacaccttgaaaacacttgtttcatcaagccagtatatgtgcctaggccctatagatgctataacacctctaccaatatacacaaacctatcaaacttgtttcctctaccaatggtttccgtgtctacacctcagggaagatcaggttacagggccacagttcgagatcatagcaagctcgttgaga

SEQ ID NO: 145488 - DNA, 219 bp, Arabidopsis thaliana landsberg
agacattctttaaatgcttagatgctaactatgttgcaatggcactcatggaaaatttgcagtcgatggaattcaggcacattcggctgtttattcatacctttataacttatatagtcaaatcttgtccggcggatatgtgggagtcatggctgggagtgcttctgcacccattgtttatacactgtcaacaagctctcagctccgcctggccaggtc

SEQ ID NO: 145489 - DNA, 372 bp, Arabidopsis thaliana landsberg
aagaccatcaacaatggatgctcctcatcaaaccttcctctctcctctcttatctcttacatatctaaatacatgaaggtactttcgagctcccatcgccggagatgagatgagacgggggccatatttggctggagaaggaagtgtgatccgtaagaccattttctaataaggtgtgatccattttatgggtgaaaactagagttagaaattgggcaactatgttcctttggcatttggttcttgaagagtttttttcttcttcttttgttttccacgtttcttgatgatataacaactatgatttgtcagtattttttgcttcttatttctttttacttataaccgcatattgtattaatccgttgctgt

SEQ ID NO: 145490 - DNA, 428 bp, Arabidopsis thaliana landsberg
tatgaacagctaaaggataatctttacctaatgttattagttgccctgaggtaacctttgtttaatacatttaattaaagagacacttttaaggtttctatgtcatttattttggctttctttaatcagtgttgtatgtttataaatgaatgtctctgtgcttagtcaaggcttggagaaattataagctggatccttaaagaatcaatcgattttaaaaataggacgtgaagagttggttgatgagacaagggagggatgtttttcaagacaatagggacataatactacttcttaagcaacatttgcaatgttttattgttctttaacgttaatctggaaacatgttttaccatgtgacagacttggtctatgaaacggttcactgaataatcaatagatcagtcacctagtttaattctattgga

SEQ ID NO: 145491 - DNA, 372 bp, Arabidopsis thaliana landsberg
cggaaatcatcaaagagaaggagattgatcaagaaagatcaacagtataccaagtatgcagctgtagtttcttctgggatctctccattggaacctctgtgtgcgatgttataaggacgtgaagtctgaagttgaagcttgacagttttgggtcctttaacagggagagggtgcaatgtcctcccagcagcacacacagtaagtagatatagccatatcaagggtaagcatcctgtcccctcaccaataaccactttgtattgacgttaacagaaacagagccaaaaacagaaccaagactcaaactttttttagcttaacaggaaacaaatccagatagaatgagaaataagctttggtctctcaagaccc

SEQ ID NO: 145492 - DNA, 225 bp, Arabidopsis thaliana landsberg
tttttttgaaaacattcttacacaaaaatagaagaaatcacatcttgaagtgaaaaatgtatcagacatatttttttgtttagtcttgaaacaatacaagagaaatagaatgacaagaagtagtattgtcaagacactaaacgtgagattggtaataagagctttgattaatggcgaccgccgccgccaccactaacgcttccgctgccggaaccttgaccagag

SEQ ID NO: 145493 - DNA, 413 bp, Arabidopsis thaliana landsberg
tttaaaacataactatcgccattaaataacatatactttatataacttcaaaacattctattcatctcccgccagaaagttgagaatcagcgatggaagatccaccggtaaaccctttgaatcggaggaggaatacgacattcctaattcactaaatccgtcatgaaccccaaacatcatcccacttccggacaagtccaacggagacaattctggtaactttgcatctcctcttagataatgtagcacttgtctcatacttggtctagcccttgggtcatagtgagagcacaagagacctagcttcaaaaccatttccacctctttttcatcacattccgaacccatattcggatctttagcagccaagatgtctcccttgttccacaacccgaaaacccaatccacgagca

SEQ ID NO: 145494 - DNA, 72 bp, Arabidopsis thaliana landsberg
aaattttacaatttcctttcgatttcgcccagaaatttcggtaactttcagattctgttcagaacgaagaaa

SEQ ID NO: 145495 - DNA, 406 bp, Arabidopsis thaliana landsberg
ggtgaagaacattggaccggtggttccatcgaagttcttggataaccggttgccagaagacaaagattacgaactcgagaactccaagacagagccagacgagtctgttttgaagtggttgggaaacaggccggcgaagtcggtggtttacgtggcgtttgggacattggtggctttgagcgaaaaacagatgaaggaaattgcaatggcgattagccaaaccggatatcacttcttgtggtctgttagagaatccgagagaagcaaactaccctctggttttatcgaagaggcagaggagaaagactctggacttgtggctaagtgggttcctcagctagaggttttagcacatgaatcaatcgggtgtttcgtgtcacactgtggatggaactcgacattggag

SEQ ID NO: 145496 - DNA, 686 bp, Arabidopsis thaliana landsberg
ctattttccattctctgcacgttttcatggcgactcaagattctcaagggattaaactctttggcaaaactattgcatttaacactcgaacaataaaaaatgaagaagagaaacacccgccggagcaagaagccacaatagccgttagatcatcatcatcatcggatctgacggccgagaagcgtccggataagatcatagcatgtccaagatgcaagagcatggagacaaagttctgttacttcaacaactacaacgttaatcagcctcgacacttttgtaaaggctgccaccgttactggaccgccggtggtgcactccggaacgttcccgtcggcgccggtcgtcggaagtccaaaccacctggtcgtgtcgtggttggtatgcttggagatggaaatggtgttcgccaagtcgagcttataaatggcttgctcgttgaggagtggcagcatgccgcagccgcagctcacggtagtttccggcatgattttcccatgaagcggctccggtgttactccgacggtcaatcgtgctgattataattatttactctctttttaaaaaaataatttgttttggttttggggttgagtggttttcctctaaacccgttgaagaacgtggtgaatttggttgctattgggtacatacaggctggcaaagtagttaatttgtcatttgtc

SEQ ID NO: 145497 - DNA, 343 bp, Arabidopsis thaliana landsberg; identical to SEQ ID NO: 47210

SEQ ID NO: 145498 - DNA, 511 bp, Arabidopsis thaliana landsberg
gcatgaacaacaacatgaaccaaagaaacaaaatcaatctctaaaaccatatcaatgggactacaaggtcagctctccgacgtgtcatcagattcgatcccactgatgctactggctctcctcgcaactttcttcagacacgtccggtctcttctcctcttcccttcttctgcccccgttgttgttgttacttcaaacctcagcgtcctcgccgaccagctcaacctaaatcgcctcttctcgtaccgctactccgacaacgcagcctctgactgcatcgtgtgtctgtctaaactcaagaccggagaagaagtgaggaagctagattgcagacacgtcttccataagcagtgtttggaaggctggcttcaacatctcaacttcaattgcccgctctgtagatctccattgctaccttatcatcatcagggacatggcagtgatgcgtcgatctcagccttcccttttcgctctacctctactgcatcatttcattgatttttatgtgaag

SEQ ID NO: 145499 - DNA, 81 bp, Arabidopsis thaliana landsberg
tcggaagagaggtcgttttgtttttcagatttccactctgtaaattcttagtatgaaaagaatcaaattaagcttcatgta

SEQ ID NO: 145500 - DNA, 216 bp, Arabidopsis thaliana landsberg
agcctatccatggagtggtcgcttactttgtcatggcaaaacctacaagtgaacaactgatcacaacaagcagctcgaagcttgcagttacgcttgtaatgctcgcatccatatatctgcttctcgggatcccgaaaagacggggaacatccaagttcaacatcaccatttactgcagtttctgcttccttaggtaacttttgctgagccgcaatc

SEQ ID NO: 145501 - DNA, 676 bp, Arabidopsis thaliana landsberg
aagaaccttcacttttctctcccattctaccttttactactctcacacatatctctgtctatatatcactttacataaaccactattccacacacaaacacacatagccatggcctcttctttctcttcacaagccttcttcttgctcacattgtctatggttttaattcctttctctttagctcaagctcccatgatggctccttctggctcaatgtccatgccgcctatgtctagcggcggtggaagctcggttcctcctccagtgatgtctccgatgccaatgatgactccaccacctatgcctatgactccaccacccatgcccatgactccaccacctatgcctatggctccaccaccaatgcccatggcttcaccaccaatgatgccaatgactccatctacaagcccaagcccattaacagttccggatatgccttcgccgccgatgccatccggaatggaatcttcaccttctccaggacccatgccaccggcaatggcggcttcaccggatttcgggagctttcaatgttagaaacaacgtcgtaacactttcatgcgttgttggagttgttgcagcccattttctcctcgtttgaaatgattattgaattggtcagcctcgatcgttttcttgtaatttactttcatatttttttttcctcaaatt

SEQ ID NO: 145502 - DNA, 484 bp, Arabidopsis thaliana landsberg
ccagttccagtcacgctcttctcgccctgtccattctttttattagcgggcacatgaaaagctttttctttatccaaagaggatttcgcagactgatttttagctggagcagcaatagattcactcttagcctgatggccaacattagagcttgagtgctggaaattctttccctggtttgacggcactgtactcttttgaaaatttgaactacttttagattgtcctgtagttctcacactttcagttcgcggggcggtaacattttcagtggctccctctatattgcgcttcacacaagaattggagacgccacaaaacctggtataaaagtcacacctctctagttagaagggcaaggctggtcaacagtagtggacagctttcatacaataacagaaaagctgtccccgttgcctttcaaacaattatcagtgacaaagagctgcctgaagagttcttctgcttgtacaaactcagtctt

SEQ ID NO: 145503 - DNA, 419 bp, Arabidopsis thaliana landsberg
tgttcatcagatacatgtcagataaacggaccatgtacataccagatatgctatgtatatctctacaggtctggtccagatggttggatcccaaacagtgtaaagatatatagccatggctctaaagcggtcaccttcccatataacacatatgttcctgagagtgtatggtatggtttcaattactgcaacagcgcctcagattctaatgtccttgccattggtctcagaaggagcgtgatcatactcctaggttttgttgtcgccggtaccacattgctcttgtaagctgttatgtttccggttttgtataaacatattaggacttgtgaagaataaatgtgtaccgttttggggaaatgggtctcagatctgtattaagtattaaccataaatctatgatgaagttacttactcct

SEQ ID NO: 145504 - DNA, 816 bp, Arabidopsis thaliana landsberg
acttcagctttaagacagctaaaactaaatacaaagaaacagagatgggtttggttacagaggaggtgagagctaaggcagagatgtacaccggagatgagatatgtagagagaagacaaagtgtttcctcaaggaaatatctatgcccaatggtttattaccattgaaggatatagaagaggttgggtatgacagagagtcaggtgttgtatggctgaagcagaagaagagcatcactcacaagttcacagagatagataagcttgtctcctatggaaccgaagtcacagccattgttgagaccgggaaaatcaagaagctcactggagtcaaagccaaggaacttcttatttgggtcactatcaatgagatctataccgaggaaccccctaccaagatcacgttcaagacaccgaccacactgtccaggactttcccggtcacagcttttatagtcccagaagaacctgccaaggaggaacctgccaaagaggaacctgccaaggagaagagcagcgaagccaccgaggccaaggaggctgttgcaatcaaggaggctgtcgcagtcaaagaggcggcctaatcagctcagcttcagcagataaaagagacccgaatttttaagtgtacttcaagaatttgaacaaatcatggagagttagtgtttctcactgctctaactatcatgtattatctacctaccacttgttgctgcttgttttacctgtaataagatatcaatatcatcctgttccactaaaacttatccttaattatctataaactacaatacagctggttctgtatgtcacttc

SEQ ID NO: 145505 - DNA, 231 bp, Arabidopsis thaliana landsberg
attttctccctcaaaagtctctgtttttctttcccttttcccggcgaagctctatttagcttgattccggcgtttaacacgcgttttaatcgaaacagacatttgagatcgaattaattttgtagcgggctgtgtctttattatagatggagagagattttctcgggttgggttcgaaaaattctccgatcactgtcaaggaggaaaccagcgaaagctctagagattcag

SEQ ID NO: 145506 - DNA, 636 bp, Arabidopsis thaliana landsberg
tttgtgtttgtctcattggtgcagacaatggctttcctatgagagaacgtattgaaaaggagaaattctttgttgggtggaagtgaaaatggacctccgcctcaaaaacgactgaccaatcctaatcagtgaaacatctgtaaatttgtgtactactgctaaatttattgtatctgcagagattcttcaacattcatatacagtcaaattatgatcaacaattttcataacctctggacctttgagacatcagtacaatgactcataagcttatgatttatataaactctcacattgagataaatattatcagtcttttgtgacaagtaactcactagaagttctgtactgaaaagtctgaatcttcttgggctccaaaaggttgcattttcaactactctattttgagaaagctgcttcttcttgttcagcatctgctgtttctgactcaatcttcttgaatgtgagcttttgctgaggtaactggccattggagaacgctgtgacctcggtatcgatcaaaatgccatcttcctccttgaaatctcctctcaagatacccttagcaagctcattctcaatgttttgctgtatcacacgcttaacaggtctagctccatagtttggatcataccc

SEQ ID NO: 145507 - DNA, 283 bp, Arabidopsis thaliana landsberg
ggatccccagatctgcatagcatcttgttcgtcttctgcagcagtttcatcgtttttgattggttcactgaacatatacggactctgatactcaacaagatactgcatcgatctcctcacatccaagaacagtctgtaaactctctgaatatcctcaacctccacgactttccctttccgtttctggcatgacaatgcagctgcggttataagatgaatcgcataccttagagatgtatcacgtccgatcaatgtcaaaagctgtttggcctcttcgttcatc

SEQ ID NO: 145508 - DNA, 212 bp, Arabidopsis thaliana landsberg
ctcaccaagccacaatcatttctctcttctctatctctctggttttgaatcggcgacgactgagtcaactcggtgttgttactggtttcgtcgtatgtgttgtaactgattaagttgatggatccgagtgggatgatgaacgaaggaggaccgtttaatctagcggagatctggcagtttccgttgaacggagttcccaccgccggagattc

SEQ ID NO: 145509 - DNA, 573 bp, Arabidopsis thaliana landsberg
aacatcattggactcattgcagtaatcttggccaattacattgattattggattgatccagttggagctatcattgtaagtttccaagtttatgaaaacaaaatcaagtctttttttcctcgttgctgaaaattgtttcttaattcatgcagcttgcattatacacgatacggacatggtcaatgacggtcttggagaacgttaactctcttgttgggaaatcagctagaccagagtatctgcagaaactaacttacctgtgttggaaccaccataaagccattaggcacattgacacagtgagggcatacacatttggctctcattattttgtggaggttgatattgttctcccagctgacatgcctctgcaagtggctcacgacattggagaatcgctgcaagagaagctcgagctactagaggagatcgaacgggcttttgtgcatcttgattatgagtacactcacaaacctgagcacgctagatcccactgttagctgattatcctttttaaagatctctacgtttctatatctttacaaattaatcttcactgtattgttgtttagt

SEQ ID NO: 145510 - DNA, 988 bp, Arabidopsis thaliana landsberg
ttactctcatgagatcaatgaacatgagaatgagcgtgccttggagggattgcaagatagagtcattctcttaaaacgagtaagcctgcctctggttcctctgtcatgttcaaacttgtgttcagcacttttcagtaggattaggaatatgaagtaagccctaaacgtaataggaacatacacttgcaattcattttgtacactaatgagtttctgtatctactacttactgcccataggattagtatggaaaccgtaacatagttttattggttcaacattgttgttgtagttggactctatatgcacaactaggtttgaaccagattcttatttgtttcttttttcatgaaacagctatctggcgatataaatgaagaggtcgatactcataaccgcatgcttgacagaatggtatttaccagaatatttgtgatacttatattttatcatttgctcacagacgctattgttactgaacattttgcaaggtttctatgtagggcaatgatatggattcatcaaggggatttctctcaggaaccatggaccgctttaaaacggtatatctgactagaaatactctctcagaaccctaagcctagcttcattatgtgttgcaaagtgtctttgacatgtttgtttttttggtgtgtctgtgtctgtgtctttgatatgttgaatcgaatccttgcaggtgtttgagacaaagtcaagccgaagaatgctgacgctcgtggcatcgtttgttggtttatttctagtcatatactatcttactcggtaaaattggcaaacccggagtattcctgaacattcatccatgatctcatgatattcccagtctctctctgttggctcctacgatctaattgtcaccaaccagtgtaatgatgtatgcctccagtgttatagtgtgctctagtgctcgggatgaggacacatttcatacaaactataaaaaggttaatatattctgattctatag

SEQ ID NO: 145511 - DNA, 417 bp, Arabidopsis thaliana landsberg
aaaaaaaactatagtaactaaatttttaaaaatcttacaaaaaaaaatacaatccaaaccatatagtaatctttctatttcatacacacaatatactaaaaatacaaagacaaaatgaaatcttcaaagcaaataacaaaaccagaggttttttttcttcttctaaatctggtttcaaggaatgtccttaagctcaaattcagagctctctttcttcgtcacttccttctccactgaatcatcatcagtcacaagaacagtaatcacatcagctttatactgatgtttcatggcaaacacaataaaaatcaagaagttcaatgctcccaagacaacaagtaaccagtagaagtagttcaatctcgctttgttaaggttacttctaagccagcttttgtctgtaaccctatcaacaag

SEQ ID NO: 145512 - DNA, 61 bp, Arabidopsis thaliana landsberg
  unsure (1)..(61): unsure at all n locations
gcanacgaagcacactacacagagattctggatgaagaacaaatccacatgaaattcgatt

SEQ ID NO: 145513 - DNA, 661 bp, Arabidopsis thaliana landsberg
agctctcctggactctacttcacagagctagcagaactagtcgaaaaagctctccttctccagaccctcgaagaagcagttggtaaacacaagatcacaatcttcgcaccacgcaacgatgccttggaacgaaacttagacccactcttcaaatctttcttgctcgaaccaagaaacctcaaatctttacaatctttattaatgttccacattcttcctaaacgaatcacttctcctcaatggccttctctttctcatcaccaccgtactctctccaacgaccatctccacctcaccgtcgacgtcaacactcttaaagtagattccgctgagattatccgacccgatgacgtcattagacccgatggtatcattcacggcatcgaacgtcttctcatccctcgctctgttcaagaagattttaaccgccgtcgtagtctccgttcaatctccgccgttataccagaaggagctcctgaggttgaccctagaactcaccgtctcaagaaaccatctcccgccgttcccgccggagctcctccggttcttccaatctacgacgctatgtcaccaggtccttccctagctcctgctccagctcccggacccggtggtccacgtggccatttcaacggcgatgctcaagttaaagatttcatcc

SEQ ID NO: 145514 - DNA, 422 bp, Arabidopsis thaliana landsberg
gtgaagaggagtgacttgagaatggcctcttcttcttgctaaggttagagattgcttcaaaactgaagcagcctctggtgttagtgtctggtgcacggtataagcccctgtacgcatcacaaaaccacccaccttaaatccctaaacccctcgcaagaatcgatcgatctctttttgctatttcctctctacccacaaacaaaaggtttaagtaagactttgaagttcttgaagcttaaaggaagaaaaagtaatggtggaagtaaacttagtgtttataaagatatgtttagtctgagagaagtatcgaagagatgaggacagagcaagttatgaatttatattgttgggttggtttcatactttcgatgttgttttttcttttattaattaaacatcaatttctttatggtttttgtttt

SEQ ID NO: 145515 - DNA, 370 bp, Arabidopsis thaliana landsberg
ttgcaagatgactatatataccacaaccgtgaattagaccaaggaaagccagtatgacaataagaaagtgagatctgattagatcttatctcatgtactgttatgttccaacagcactgaatactatcgagcctttccagattcgtcctgaactgaaagaactagacacattccgggtagaaacaatggtaagatgccaaggaacattttgcattggcagacattattacagggaagcactaatcgaacacagctgattttctcattcaggctaagcctatgccagcttctcagattcctttttctctacgagtttgatgaaattgcgaacaattgtcttgccttcggttgttataatactctccggatg

SEQ ID NO: 145516 - DNA, 76 bp, Arabidopsis thaliana landsberg
tacctgaagagattattgacgaagcagagagacaagaaaagctgttgtttgggcttctgtctcttctatctttatg

SEQ ID NO: 145517 - DNA, 360 bp, Arabidopsis thaliana landsberg
  unsure (1)..(360): unsure at all n locations
tatttaggactacgatcaagaacagaatgggcttttccaaaccaaacagagatntgaattttatggtgcggattcggttaactggagaatagctatcaacaacaatttaaatagatttagctagatcggtttggttcggttcgttttgtattctctgtcactcctcacaatcgcttatattttatattgtatgtttaaaagtcaacattgaaatattgtacgttagtatgtcacttatcataatgtttattcgtaaacacaatttgaaaaggtcaaagaaagaggaaagatagttaatcaaacccttgttgtcaaaaataattattttatttactgtcatcgtaatgtttatcaatgcag

SEQ ID NO: 145518 - DNA, 264 bp, Arabidopsis thaliana landsberg
aacatgtctacttctcatcatcatcatcaccctccttatctcatcaccacattattcttcttgtttcttaacttctcctgcctccatgcaaatgaactcgagcttctcttatcattcaaatcctcaattcaagaccctctaaaacacctctcctcttggtcttactcttcaaccaatgatgtgtgtctttggagtggcgtcgtttgcaacaacatctctcgggttgtctttctcgatctctcccgcaagaacatgtccggtcaa

SEQ ID NO: 145519 - DNA, 442 bp, Arabidopsis thaliana landsberg
ctttgaatgctcaatcaaaggtgctggatagttaaacttcctcacaacgtcaaaactcgagaagaagatgaaagagagagattcagagagttttgaatctctctcacatcaagttctcccaaacacttcaaattcaacacacatgatccagatggccatggccaactcaggttcatctgcagccgcacaagccggtcaagaccagcctgaccggtcaaagtggctgcttgactgtcctgaaccacctagcccgtggcatgagctcaaaagacaagtcaaaggctctttcctaaccaaagccaaaaagttcaagtcacttcaaaaacagcctttgccaaaacaaatcctctctatcctccaagccattttcccaatcttcggttggtgcagaaactataaactcaccatgttcaagaacgatctcatggctggtttaaccctc

SEQ ID NO: 145520 - DNA, 309 bp, Arabidopsis thaliana landsberg
ggataatggagggagcgtgttgtcgctctctgctccacacttcccttactccgccaccattctccgacgtcactctccgatggcttccatatctttctcccttaagcaaccaccaccgcaaccaccagaaccttctgagagtcctcctgacctccgccgcccggagaaatctattggttcttcttcttcttcttcctctccttcccctatcccttctcctaaaacccctcttaagattaatccactcaagggtttaaccaaccgctcttctgtggctcctcttagttcaatcaggaggttttcgagtta

SEQ ID NO: 145521 - DNA, 236 bp, Arabidopsis thaliana landsberg
atatattctctgtctttttttgtggcaaaagtaaatggcgagaagacaactcttttaccatcgaatgttcttggttttagctcttctctatctcatgatctcatggaagcctctcctaatcactgcaagtctgtaatacctctctctttcttctaacctcctcaagtttctttgttctgtttctttcttggattaacttcttattattgcaggacctgagacatcaacagactttg

SEQ ID NO: 145522 - DNA, 441 bp, Arabidopsis thaliana landsberg
ctcgggcaaggaagagagaaagcactgcagcacttaagggaaaaccctgctcttcaagacgaaattgagaaggtttgcttcctctattcttaatcttaacccatctctgaagattgcaaaaatccatccttttaacaagaatgtaattttttgcatcaattcgtcctccttacgttggcaatggtgttgcagaaagtgagattgttgatgttagatggagaagttcatcgatcaactcctttgatgagcagcagctcttcctcggcttcacatcgcgaagaagaagaagaagactcgcttgacgatttccaatgacataacacttaagcttgagactttcggatctatggatgtacaacacttgattttctctcatcatgttcacctcttgtttcaagtttcatcaattaaaaaaaaacactcatatggttcagtcttaaa

SEQ ID NO: 145523 - DNA, 329 bp, Arabidopsis thaliana landsberg
gaaaaattgatttttattttcctctcgcttggttggtgcatgcacgatgaaaatgttttatcttttttttttttctctcaaaaaccgacttgacattgtatctatcggagtgttgtaaattatgtaacctcttttgataaagacgagactctttttcatcgcaacaatgacatatcctaattcttagaaatccttatttggctgctatagaagaacaacatatttttttctttttccaccagccattctcccatctactcgttggtgcaatattcacatggaaaacagttggatttaaaggagattacaaaacttaattcataaaatcg

SEQ ID NO: 145524 - DNA, 125 bp, Arabidopsis thaliana landsberg
tatgcgaaaaacaaaaaacttgtgaacgaatcctatcctttttgaagattgtaatgctttttatttgatattgtgttggtgccaatgcatttatgaacaacaagaatccttttaaagtgagtttc

SEQ ID NO: 145525 - DNA, 87 bp, Arabidopsis thaliana landsberg
ttctaaacaatgttatcggttgagttaatgtttccgaaattacattaccgccactattatatttttctaattttggtatacaatata

SEQ ID NO: 145526 - DNA, 301 bp, Arabidopsis thaliana landsberg
aatttttcattgcagacaacagattagtgaccagaagcagctaacttgggaggatttttgccttccaattcttttggttaacttagtaagtatcagcctttagtttttgttagactccctttggaaccaaatccacatcaaaaagcagatggttggggacttgggatgatgcaggttcttccacgaggaagacgggcttttgctctgcgtttttgtccagggttgtaagactcatagttattatgatgaaacttcctgaaatgctaggttgagttcgagcacagacttggccaccaaacct

SEQ ID NO: 145527 - DNA, 57 bp, Arabidopsis thaliana landsberg
cgagagaagctctatcttcttgctgctgggtattacagaagtgggaattactcaagg

SEQ ID NO: 145528 - DNA, 56 bp, Arabidopsis thaliana landsberg
cttcttgatatcaacaaaacacacctcaacaaaaaaaaaaaaaaacttcatctctc

SEQ ID NO: 145529 - DNA, 416 bp, Arabidopsis thaliana landsberg
ctctctcactggtaaaaagcaaacaatgttgctccgtcgtgcaaaaacactacccaaaaccctacaaaacctccggttattctctccggcggcgaacgcagctctatccctagatcatatccaagaaacccaattaacttacctccctggattccctcgacccgatccaaaacacgcagagacgatcttagccgttccaaggtctgtctccggcaagagcatatcaccgaaagagcgtaaagcgggtcgggttccttcgatcatattcgaacaagaggatggacaacacggaggaaacaagaggcttatttcagttcagacgaatcagatcaggaagcttgtgaatcatttgggttactcttttttcctctctaggctctttgaagttgaggttcgagctgatattggatctgatg

SEQ ID NO: 145530 - DNA, 207 bp, Arabidopsis thaliana landsberg
aatctacacacaattaacaaagctcaatctctctctcttctctcactctctacctctgtagctgatagggtcagcttcgtcggatgctatttctgccggatttcacggacgatttgagatctgttcttccttcttcttttttcctctcctgatctgattcaactctaatctgcttcagtctctgtgttacgaactgattccgttcag

SEQ ID NO: 145531 - DNA, 1233 bp, Arabidopsis thaliana landsberg
atgtctgatcttttcccggatttggtagaagagatactctctagggttccgatgacatctttgatttcagtacggtgtacttgcaaaatgtggaacgctttatccaaagaaggtattttctttaaagcagcaaggaatcagtttatgggattcacgataatggattctagggtttgttcaatgaagtttgatctccaaggaatccgaaacaacgaacaagactttgttgatccatgtataaagcaaattgctaaacttaatcaagtcgagatatctagagtgtatcactgcgacggcttgttgttatgcgtggctaaggacaactcgagggtcgtggtttggaacccttatttggggcaaacaagatggatcagacccagaacagaatccaacataggagacagctatgctcttggatacgacatcaaccgtaaccacaaaatcttgaggatggtgcagacaagaaacgtttccgtttacaggtacgaaatctacgacttgcgctctaattcatggagggttctcgaggtcactcccaacggggaaatggaccctaatcatcccctctacggcgtttctgtgaagggaaatacctacttttttgcgcatgaggatagcagcagtggtgaaattgatgaagatggcgacataatcgatcttgaagatttcttactctgttttgattttacaacagagacatttggtctgcgtctgcctcttccgtttcactctactatcgatgcgactgtgaccctctcttgtgttagagaccagcagctcgcggtgctatatcataatgagggtcttcacagtgatgatcggtttaccacagttgagttttgggttactactagtattgagcccaactctgtgtcctggagcaagtttttgacagtggatatgagaccattggcactcactggtgttcggtttgacaatgatatgggtgccaccttcttcattgacgaggatgagaaagtcgctgtggttttcgatctagacggatacctaagcaccgagagcgctcgttaccacaccgcttttatcagtggaaaggatggattctttaaacctgtgactctaggagtagctcccaatgtcggggaaccttgtcccagaaccgggcatattccgactacatatcgtcccccgcttgtctgctcgtctacttaccttccgagtttagtgcaagtcaaccaacagcgcaaaaggaaagaaagacatgttagtttg

SEQ ID NO: 145532 - DNA, 622 bp, Arabidopsis thaliana landsberg
gtggattttagggaaaaaagagaattcgaacaaggtcgtcgtcgtcgtcggatttgtagatcatcatggagttctctttgatcgcagatacagtcacagtttgcacggctaagcaaggtatcgcgtttgggaaatctcttcttcaaaggttggatttggccaatcacatttctttcgccgattccgttgttgatcatcaatctcccggtggaggaatcgttcaagcatcggcgattattttccccgtcgatgcaattgctcctccaccggtcagatctagctcttataagacaattcgccggatccgtaaaaagcgacgaaccaggcgagtttcgtttggtggagatggagatgacgcaggagattttggtcgttttctgttagaaggtgatttcggtggtagcgacggtccatttggatttggaggcggaggaaacgatggaggcggaaagggatggaactactgcggcggcggtggtttcgggagggataattgggatgggtcttcgttttcgtcttggtcagatccagcgatggaatttgtgtatgaagtgatttgctggatcgcgttgtctaattgtgtgcactttgcgttcaagaggatagtgaggatcgtgaccga

SEQ ID NO: 145533 - DNA, 309 bp, Arabidopsis thaliana landsberg
atcattcgatactctctctctctcaagaaaccaaaactaaggagaggaagaagaagatcatgtcaggcgtgtgggtcttcaagaacggagtgataagacttgtggagaacctaaccagtcaggatccgacacacagaaccgaaggaaagtgatggtctatttaccgacaggagaagtggtctcatcttactcgacgctcgagcagatcctccagagtcttggatgggagagatactttggcggcggcgacacagatctcctccaattccacaaacgctcctccattgatctcatttccctgcgtagaga

SEQ ID NO: 145534 - DNA, 328 bp, Arabidopsis thaliana landsberg
gtccttgcgctaaataaaaagcatttagctgcggcgtagtaatgttccatatatattatacaatttaaccactgactaacttagaaggtcctacaactacaacagttacattttaatcatcacatctacacaactcacacctaatacaaaaatcgtaggtactctctgtctttaaaagttacatccttcgttttccccatctttttccggtgtctaaaccaacgagccttgaagatgatggagcaggtgatggaccttctataccaacagactctggaatatccagattcccttgcattgattgcgcagatgctactagtgactgttc

SEQ ID NO: 145535 - DNA, 326 bp, Arabidopsis thaliana landsberg
ggaagctggaggagctgtgactcggatggacggagggaagttttctgtgtttgataggtctgttttggtctccaacggcgttcttcaccccaaggtttcatgaactgttcatacttttgtcaatgcttttaatctgttgtgcttagagatcaggtctcacatattttttgtttaatcggtgtagcttctggagagaattgcacccgcaactgagaatttgaagtcgaaaggaatcgatttctcgttatggttcaaaccggaagattatcatacagagctttaagacttggtcaagaaaggtatataagattacattgttatgatct

SEQ ID NO: 145536 - DNA, 175 bp, Arabidopsis thaliana landsberg
aagaaagaaaaaactagagagggaaagaaaacaaaaccacctttgtagattacacgattgatactcagactcaccaaccagatatctatagcctttacaagtttatgttaacctggtcgcttagtgtgtttgttcttcgatttagttacctccaggctgcgctttccattcacct

SEQ ID NO: 145537 - DNA, 362 bp, Arabidopsis thaliana landsberg
atcggtgatcaaatatccgccatggacagagcacaattgatcttgttaggtctacctctattcttattttgttcggatctcttcaacctcttcactcctccgcctcctaaacctcagcctcaccgtcctcatcagccaccgcatattcctcaccagcatcgtcctaatgcgatcatccccgaaaccctagactttccttcacaggttaaatttcttttatactttcgtgtatttcacttctattggttacggttttgatctctaagctcccattattttgcagaagacaagtggcttaggaggagcaattggatatggaaatacagtagagatcaacttctgcgtctcctgttcttacaagt

SEQ ID NO: 145538 - DNA, 65 bp, Arabidopsis thaliana landsberg
caattattcaagatcgagacaagtgaagagtcgacaagaacatatagagattcatccatatcttg

SEQ ID NO: 145539 - DNA, 327 bp, Arabidopsis thaliana landsberg
cagactaactacgtacttgaaggaaactttaaaaatatgtttcatagtcgatatctagagcataaggatcagagaatgacaacttggcatgcgctagagagtcttggaatagtattgagttcttttaggatgacagattcttctttctttatggaatcatccaagcatagggtcagtttcttgaggattgttgaattctcaagtaagtaactcactagtttcatctccatcgcctctcctttcaatggcctttctatcttaacatactcgagagacgataggaaaccccgaggtacagacaagatattaattccctccttctcccga

SEQ ID NO: 145540 - DNA, 267 bp, Arabidopsis thaliana landsberg
ctgcggcatgcggtggttatagtgaggctcgctacacggggcatccatcaatcttaggctatagcgcctgagagattttgaggcttttctgattttcaagtgtttcgaattataacgttaaagatgtcaaaataaaagaaatgtttagtatgtaaatacgtacgtagcaataaggtcgtctaactttttttttatcgattgttatctttttaataaaactttgttaaatattgttgttaccatttacatctaaaatctttagtgatc

SEQ ID NO: 145541 - DNA, 435 bp, Arabidopsis thaliana landsberg
ttccaaagtctgtttttttttttaatctctctctcttctctctcacccaatttcacaaacccgaaaccctaattttctcgggacactgaaatttttacagcttctttcctcttcttcaccggggagatttgtcggtactaaatctagggtttttgggtatcaccggagggttgaagagagagaaaaaaactcacaatggaatcagatcagggaaagctatttatcggcgggatttcatgggataccgacgagaatcttctgagagagtacttcagcaatttcggcgaggttttgcaggtcactgttatgcgagagaaagctactggtcgtcctagaggattcggattcgtcgcattctaggatcctgctgttattgatagggttcttcaggacaagcaccatattgataatagagatgtaagcaaaaatcttgtt

SEQ ID NO: 145542 - DNA, 331 bp, Arabidopsis thaliana landsberg
ttttctttctcttcttataataaaagaggaagaaggaagaagtaaagtactaatgactaacaatgagcgatgaagaaacttgtttgatgatgtatgatgctttctctcctcataaaactctgtggtgctaacaactgtcttcagtgcgcttaaccaattttttttcttttttatatgatcaaaacctattcgaaatgaaattaggtgaagaattgagcctaaacccattttagatggtacttagataagaaaaagattgaaacgattttttactaaacttttagttcacattaccaaaaattaataatctgattcgagctttcctaacctt

SEQ ID NO: 145543 - DNA, 355 bp, Arabidopsis thaliana landsberg
tataagggagaaaatcttcctaaaatataaaacaaatctggtcataaactgaaaagatcatattacaccatacaaaggccaaagagattcatatcattctcctaatccttcctagagtgcaaaagcaaatcattgaacagaactttaaacaccatcaatcgaaaccatcttaatctgaaaataattaaaaaccatgaaataaaaatgataagaagttatttgaaaacatcatcctagtctctcttgatgattggtgctcctgcttcaacagccttgattctctctctgatggctttgagcttcttatcaaccacatcagctgctctggccagttcctccgaacaatcagtatcgg

SEQ ID NO: 145544 - DNA, 245 bp, Arabidopsis thaliana landsberg
ctcatcttcaatgtatggcatccacattgtttacttgaggtacaagcaaaacgtctaagctcgtcaacctcctcttaatggcttcaagttcaacttcattcccgttaaccaccgccccaccgcagggtgtcaggtttaaccggagaaaaccgaggttaaccgtgtgggctaagcaaacggcgtttcaactcgggaaaacgaagggtgatgatgactcggaggggaaacaaaaagggaacaacccg

SEQ ID NO: 145545 - DNA, 322 bp, Arabidopsis thaliana landsberg
cactgccgtcaacaatggcgaaagaatgtgaagaacgtaagattgagaagaaagagaagaaggagaggaaggagaggaagcgtcgcgaagctgaagaactcgctgtaagagagaagaaaatctcaaaaaaacataaatcgaaatccaaagaggaagagaaaccagagaaatcaaagaagaaatcgaagaaatacgaagaagtagaagaagaggagaaatctccatctccatctccatctcctaagaaatcgaaggagagtaagaagaaacataagagatcatcagatgaatccgaagagatcgtcgattcaaagcctgttac

SEQ ID NO: 145546 - DNA, 250 bp, Arabidopsis thaliana landsberg
aaaaatcaattaatctttttaccctaattgattcctgcgccatagaaacatctctttaaagtgttataatgttaactgtctggtacggaagcagaggtgtggttcaacgccatcctttacttttgtccaaaatccacaaagaatgattctaaaattagcaatcaacattacagagcaacaacaactaatctcacgttgttcttgtcctaatcctcgccatcatcaatgcgtgttcggaagaggtagtctt

SEQ ID NO: 145547 - DNA, 222 bp, Arabidopsis thaliana landsberg
acgactattgttgatcaagaagaaggttttaaagttgaaagatcatggatatcccagagaagatggagatggatcaactgaatcaagggtcgagctcatctcttaccaataagcgaaaaagaggtcgtcctcgcagagacgaaagccagactcagcaaccagtgaacccacctgttgatgagaatctgataggtcgagttgtttctggtgtggttgaaggtt

SEQ ID NO: 145548 - DNA, 396 bp, Arabidopsis thaliana landsberg
gttaaaataccatatgagagattatgaagatcaaccttacataagaatatttttttttatattagcctaaagagagattacacacataaacgatgaaagtagtagagtcgctacatatacaaacacatggcatatttgatcaaaagttgacgaagctctctaagcagctggtgtctctatgactctctccatgtctcataccctcattactattttaaaacgccctttttgagaatctaacaccaataattgttttgtattcatacattaacaaaaggatgttttgcaataacttaaaaagaaataaggaaaaatgagaaagatgactcactcattcattcactcactgtcttcctttcttagtgcagcaagaagggcatttgtattgcttgatgc

SEQ ID NO: 145549 - DNA, 78 bp, Arabidopsis thaliana landsberg
aaaaaaaaaaaaaaaaaaaaaaaaaaaaaaaaaaaagaaaaaaaaaaaaaaaaaaaaaaaaaaaaaaaaaaaaaaaaa

SEQ ID NO: 145550 - DNA, 229 bp, Arabidopsis thaliana landsberg
cgtaaaggatgaatcctttaacttatcgcaaatttacatatcttcgataaagaaacctaagtgtagagtgtaaagatacatatctgaacttaaccacactctagaacagacatggctgagtttatagacatggaaaacgatgatgtatggatccattcacaaaatgtagttgactagagtctccatccaagtggggggagatgactacttatccgaggatgaagatgat

SEQ ID NO: 145551 - DNA, 590 bp, Arabidopsis thaliana landsberg; identical to SEQ ID NO: 44365

SEQ ID NO: 145552 - DNA, 385 bp, Arabidopsis thaliana landsberg
aatgattacatgtaaattctttacctgatgagaaccaacaaaaaaaaacataaaaatttgccctttttctcttgtctgctcggaatctggatgggacgacaacaagtgacaaccgaggacagacaaaacaaaacaaaatcctttttttctttcggtttcataaaactgatgatgagagaataacaacaacaacaacccttcacgcattgtacactcccatgtttctttgtaatttgttcccaatttgtagctttttttttagattccgacaacatgaacaaaaccattcccttttgtgagttccgatccaaaaacggtattattccatttgtaattttttccttgtttgaataaattttatgttaataaagtggaatatgatcga

SEQ ID NO: 145553 - DNA, 533 bp, Arabidopsis thaliana landsberg
gccagtctagagattatccgccgtgggatatggaatttcttcaggtgagaaaacataagttactgcaacttttcttcaccatgtattagcgctatttaccgtcacataacatataatataactttcttggggatttgttgatgcaaaaaacaggttagagaatgagcatttgaacaatgttgggaagtatcgagcatttaagacggttccattaccgtttaactacgacgaggatgacgataaaggcaactagttttctcggtttctagtcttagattctgtaaagactgattcatccacaacgagtaggaggaagatggactagactaaagctggttcattgagatcaaggagatgtttcactcaggataacggatattcgctagattagccatagtaattagggtcactgatttgcacttaaaatttgtttcattgagagaaacatgaaattcatgggcatcaacaaagcaatgacttaaaaaccaaattctcccacaataacaaaagtaataatcagaaacattcaaagt

SEQ ID NO: 145554 - DNA, 225 bp, Arabidopsis thaliana landsberg
gggtcagatttagtttcacaaaatcctttattgctgaatggttatgttgttacatagtgtgggactaattccatgttcaaaccaacaaaagtcttttctcttccatagttattaccgttacagatgcatagtttgttcatctgaaacaggtttgtccataagaagacaagctttggagcaagttgattctaagttgtctagtggagacgaaagagctgcattgtc

SEQ ID NO: 145555 - DNA, 254 bp, Arabidopsis thaliana landsberg
actaggttcccggttatgccagctgaatgtaaagggacagagacgcataagttactactcttgagggttttaatgaatttatgctatcattattatttgaattatgcttgttcaagagattgatatatgtattgtttgttggcccatgatgtttatgctatatttgggccaagaattacatgttataattcatatatgtattgattagctatgtattttcatatgttatgatctacttacaagttttattcttt

SEQ ID NO: 145556 - DNA, 180 bp, Arabidopsis thaliana landsberg
gatgaactagtattatacatacatacatacatcaaaagcatttgggtgatacacattagtttgaatgattcgagtaaacatcatcgagatctgatatttgatgatgcaaaagaaaagctgtagcttgacgcatcaaacctaaagtgataagtatcacactttgggtctatgccatcaagt

SEQ ID NO: 145557 - DNA, 62 bp, Arabidopsis thaliana landsberg
aaccctaaaccctaaacccgaaaccctaaaccctaaaccctaaaccctaaaccataaactct

SEQ ID NO: 145558 - DNA, 186 bp, Arabidopsis thaliana landsberg
ttaccttgaaaaaccggtgtcttcactccaatcaacaggtctattttagcactaaaattcttatcgttgtcttaccttttctttcgttgctctgttacatactgagataagccaaaattctcatgcttttccagatgaagcattgaagagccttgccaatgaatctccaaaccctgaggaaggtat

SEQ ID NO: 145559 - DNA, 792 bp, Arabidopsis thaliana landsberg
ttcacgctctttgtacactccgccctctctccccatctctttcgacagatctcttctctctctcgtgtttcacgaaacaatggcgactcaattcagcgcttctgtctcattgcaaacttcttgtctggtaatcaaatcttcttctttcattttaacaattgccttagagatcgctttgatcttacgattcatgatcatttcccgttgtttccatgcctgctcttgttatcgtatataaactcctgacgcatgtttattatgtgtaacatagaagatcttcgctttagtaatgatcagttttatgtttttgttccaatgattttatttctagtttcaaattctgtgatcggcaacacatggaattaaaatccgtggttttgtgttctggttgtaatctagatctacagtcaattgaatttatgattgtggaagtgaatgcttacttttggctgtgaataattgtgcatggacattcattggctaagaatttggcttgagttatgaaaattacagaacaaagttcttatgaatgcaatgcttttttttattgtgtgtgtttgatgaaacaaataggcaacaacaaggattagtttccaaaagccagctttgatttccaaccatggaaagactaatctatccttcaacctccgccgttcaatcccatctcgccgcctctctgtttcttgcgcggtatgagcattttttttcaagtttgttaatctatatatatagggctcaaagttttaaaagacattatatttggtttataggcaaaacaagagacgatagaga

SEQ ID NO: 145560 - DNA, 66 bp, Arabidopsis thaliana landsberg
gagcattcgaaacagcacagcgagaagaagattaggatacttctcatgctcaaccggaaatccgat

SEQ ID NO: 145561 - DNA, 911 bp, Arabidopsis thaliana landsberg
ccctccttgatctctactcaaggaactccacaaaaattaaaatctcacaactccaacatcttcttataacacgtcttgatttatctttaagaaccaaacaaaaaaccaaaacctagaagagaaaatgggagatcaaggagtacaacaaatgcaacagcctattgttgtgtatccaaacgcttacaataaacagtatccagacccttctacaaaaccttcttcttcctctggctcaagcggaaactttgggacggtcttcatagtcctagccgtgatctttgtcttgtcggctcttgcttgtgtctttggaaggctatgtaaccgtgaaagccgcgcggctaagcagcaacatagcaagcatccaaagcatgagaaagcttcttccaagaagagccgtgagattcggcctgtggagcgtgagccgagggagagaggtgatatggattttggtttcgatatgaaacggcctgaaccaattgagaaaccttctggaagagacggaggagaggacatagaattcgggtttgataacaagagaggtgaaagaggcgcgaaggcggaggcggaggaggaccacctccaccgaatatcaaacatgcagtgaggttcaagctaccggaaaatggagatcatcattctaaaggagagatcagacgtggaggtccttccttcgagttccgaccaggacactaatgatcttaatttgtttaagaacaaaccacttgatatgtctttattacttcctcactttcatttcttttgtgctttttttcttttctggttgattcttcttatgggtatggaacttagtgctgaagctatcaaacttcttattagtctcttggtgtgatgtataaagtcgtctctctacatatcaaaggtactaaataaaatccataatatttctgagt

SEQ ID NO: 145562 - DNA, 1276 bp, Arabidopsis thaliana landsberg
tagctatgacacagcaagagctatagacatagagagagagagaaagatgatgatcagtgaagttaggctaaacccactttctatttatgtataattaggtcaatcacatcaccaatctcctcctccaattctcctcctctccttccaaattctagggttttgtttgtatctcaccccctttctcaattccctagggaaactgtgaatttcatcaaattccattattttttggtcacacccttaaagagatctgagagttctaaagatgatgacagatttatctctcacgagagatgaagatgaagaagaagcaaagcccttagcagaagaagaaggagcgcgtgaagtagcagacagagaacacatgttcgacaaagtggtaacaccaagcgacgtcggaaaactcaacagactcgtgatccctaaacaacacgctgagaggtatttccctttagactcctcaaacaaccaaaacggcacgcttttgaacttccaagacagaaacggcaagatgtggagattccgttactcgtattggaactctagccagagctacgttatgaccaaaggatggagccgtttcgtcaaagagaaaaagctcgatgcaggagacattgtctctttccaacgaggcatcggagatgagtcagaaagatccaaactttacatagattggaggcatagacccgacatgagcctcgttcaagcacatcagtttggtaattttggtttcaatttcaatttcccgaccacttctcaatattccaacagatttcatccattgccagaatataactccgtcccgattcaccggggcttaaacatcggaaatcaccaacgttcctattataacacccagcgtcaagagttcgtagggtatggttatgggaatttagctggaaggtgttactacacgggatcaccgttggatcataggaacattgttggatcagagccgttggttatagactcagtccctgtggttcccgggagattaactccggtgatgttaccgccgcttcctccgcctccttctacggcgggaaagagactaaggctctttggggtgaatatggaatgtggcaatgactataatcaacaagaagagtcatggttggtgccacgtggcgaaattggagcatcttcttcttcttcttcagctctacgactaaatttatcgactgatcatgatgatgataatgatgatggtgatgatggcgatgatgatcaatttgctaagaaagggaagtcttcactttctctcaatttcaatcca

SEQ ID NO: 145563 - DNA, 189 bp, Arabidopsis thaliana landsberg
tctcagatacacagttcgggttttgtctgtaggtttgacgatgtacatacagacaggctttttgctgtgtatgtatttccttctttaacattaatccgtcttcatgttttttacttagggggagagctttgactttgtattgtgtaccgtgtgcaaattgcggaacaaagaataaaactgtttggtatg

SEQ ID NO: 145564 - DNA, 568 bp, Arabidopsis thaliana landsberg
gacattacttatctccggtaacggacaaccactcgtttcccgaaacagcaactcacagactcacaccactccagtctccggcttaactaccaccagagacgattctctcttccgtcggttctatgacttcgattctcaacactgtctccaccatccactcttccagagttacctccgtcgatcgagtcggagtcctctctcttcggaattcggattccgttgagttcactcgccggcgttctggtttctcgacgttgatctacgaatcacccggtagttagcattctgttggatagattgatgaatgttttcttcgattttttttttactgatcttgttgtggatctctcgtagggcggagatttgttgtgcgtgcggcggagactgatactgataaaggtatgattttttagttgtttttattttctctctcttcaaaattctcttttcaaacactgtggcgtttgaatttccgacggcagttaaatctcagacacctgacaaggcaccagccggtggttcaagcattaaccagcttctcggtatcaaaggagcatctcaagaaact

SEQ ID NO: 145565 - DNA, 483 bp, Arabidopsis thaliana landsberg
gagaatcaaaaatcaaaatgtcttctcatactgcaactaagtatgatgttttcctaagtttcagagggcatgacactcgccacaacttcatcagttttctctacaaagaactggttcgaaggagcattcgaaccttcaaagacgacaaagagctggagaatggccagaggttttcgccggagctcaaaagccccatcgaggtgtcaagattcgccgtcgttgttgtctcagagaactatgctgcgtcttcttggtgtctcgatgagctcgtaacgatcatggatttcgaaaaaaagggttccatcaccgtgatgcccatcttctacggcgtggaaccgaatcatgtgaggtggcagaccggactactcgctgaacagtttaagaaacatgcgagtagagaagatcctgagaaagttcttaaatggaggcaagcattgaccaattttgcgcaactctccggcgattgttcagggtgaaatttcg

SEQ ID NO: 145566 - DNA, 83 bp, Arabidopsis thaliana landsberg
caaaactatctttctccttctcattcctttttctctcactctcctccattaaagctctgcactttctcaaagagaatgttcat

SEQ ID NO: 145567 - DNA, 255 bp, Arabidopsis thaliana landsberg
gagtaaaccttttggtttacatgttcccaatgattctactggcttctcttggatctatttaccttcacttgaagaaacaaacgagagtaaaccaatttaataggtaattcaacacttaaactaaccaactgattattctctagttaattaaccgctttttaatatcgatattatatgttttttctgttaactaaaagtagaatggataggaagaagatagacaagtttggtgcattgaaaagaccaatgttagtg

SEQ ID NO: 145568 - DNA, 466 bp, Arabidopsis thaliana landsberg
cggtagaactcagaacgacgacctatctatgaagattgaaacagcatactattctgttggaactcttgtcctttcagattcatcgccacctgctatgtcttctcttcttgttgttagcagagattcaagcgtgcactctcaggctggcagcagttcagggccaagttcaaggagttctcgggctttacgagaagttgtgtcttcccttcctattgaaggccgtatgctttttgtagcagatgtgctcccctctcctgatactgctgctactattcaatcattatattcagaactagaatactgtggtgtcgaagtctccggagaatcttatgaaaaggcatgtggaaaactctgggcgagaagtgatctttcaacccagcatattttgccaaggagaaagattgttgtttttaccaccatgggtatgatggaacttgttttcaataggcctgttgatatcttgaga

SEQ ID NO: 145569 - DNA, 339 bp, Arabidopsis thaliana landsberg
gacaaggactacatgcttagtaatagaacagggtcaacagaaccgtctatctgtgacaggttcagcttttagatatactctgctcgttaaatcctagtatagcatctgcttacaatctgagctcgttcaacacttagttcccgtgtttccagttttagacaatggtggaaaatggttcatccaggtttcagagaagatatggatagaaatgcaagctagatgtcagaaagtatatcgcacatgcttatttaagtaacaccaactctcactgtacaaaactaggtagggagatatgcaaagtagaatttggaagtctgaccttactgctgcttgacccac

SEQ ID NO: 145570 - DNA, 267 bp, Arabidopsis thaliana landsberg
gtagagttttcgaaaccagcgagattaatggcatcttccaccggtctcaccgtcgccggagctctactttccggagattttcgattaccagctatatcgtctctaatacccagaaagacttcttcttcattgtcatgccttagcaacagagatttatcgtctccttataattgctgttggcgactatccagaggcaaaattttgacttctctcagtaactcacggaaatttgctgtgggaaaggaagcagaagatgggtttctatcg

SEQ ID NO: 145571 - DNA, 186 bp, Arabidopsis thaliana landsberg
tattaccagataaagtagagctggctgaggtgagtggtcaagacacctgcagctagagccgccaccaagccaatggcatatccgggaagtgcataccaaatgtatttgtgtcccttggaagattttagatcaaaaatattcaccacatctctagtttttcgatggtcaaagcagaggaccaaagcc

SEQ ID NO: 145572 - DNA, 85 bp, Arabidopsis thaliana landsberg
cacctaaatgaagcacgcaataacggagacgatccggtaatcgacggcgagagaagtcggtcgctgtagtggccggcttaagctc

SEQ ID NO: 145573 - DNA, 244 bp, Arabidopsis thaliana landsberg
cagctaaaaacaagagacacaagcatccaacaaaatgatacgatacacgcaagaaacaaagattcaccacattcacgtcttgtctcatcaaacggtaggggaaagagcatacacgacttcatatgacaagggaactgtaagaactgcgtcatgccactcgaccttcccccaaatctcttcgctgttgcgcctttcaagcgcaatcacagcacacaaaatcatcttgttcttacatccatcatcg

SEQ ID NO: 145574 - DNA, 757 bp, Arabidopsis thaliana landsberg
caagaaagcaaatttttttgtaacgatgcctatcaacagaattgcgattggaacgccgggggaagctagtcgtcccgatgcgattagagcagctttcgcggagtttttctcgatggttatattcgttttcgcgggtcaaggctctggaatggcttatggaaaactaactggagatggtccagccacacctgccggtcttgtggccgcgtctttgtctcatgcgtttgcgttgttcgttgcggtttccgttggagctaacgtttcaggtggtcatgtgaacccggcggttacatttggggcttttattggtggaaacataacgttgttgagagctattctttattggatcgctcaattactcggagcagtcgtagcttgcttgttgctcaaggtaagcactggcgggatggaaacggctgcgttttcgctatcatatggagtgacgccctggaacgcagtctttttcgagattgtgatgacgtttgggttagtttacacggtttacgctactgccgtggatcccaagaaaggtgatattggaatcattgcgcctttggcgattgggttaatcgttggagctaacattctggttggtggtgctttcgacggtgcatcgatgaaccccgcggtttcatttggtccggccgtggttagctggatttggacgaatcattgggtctattgggttggtccttttatcggtgcagccattgcagctattgtttatgatactatctttatcggtagtaatggacat

SEQ ID NO: 145575 - DNA, 454 bp, Arabidopsis thaliana landsberg
atcgatcagcgagtatacctttgcaaagttgttgatgggttaaattctgctgctcttatctcggagaatcgtgtatcttatattctgtctgaaactcacagcagaatgtgattatattgtttgtatgtttgttttgtctttcactcattagagttaacgcgactactgggaatgcaacgcgggacacattgctttgcaactaaactatgaaatgtaaagctttggactgtgggagtcttcttcttataatttttctttgagatttgaccattggtgaagctttttgtgcatgttgttcaaagaatgtgtttgtatatattatgtactaatctcaagcttgaccttgagagattgattatgtataacttcccacatgctccgtctttgtggaggtgattagctactggtttttgttttatttattggtctgaatcacaagaattattatgacatt

SEQ ID NO: 145576 - DNA, 83 bp, Arabidopsis thaliana landsberg
gatcaagaacaaattctcaggcgatgataatagtatccggtacaacgtctagattagtccactttgctcctgatctttttatt

SEQ ID NO: 145577 - DNA, 309 bp, Arabidopsis thaliana landsberg
gtgaacaaatagtacttaacttttaataccaaatactagtttcgtggtttataaataaaacaaatgttaaggttcatcatgtatacaactattcctgctcaaattgacggcatggaaaaagaaattgagaaatagtaccatttatacaaaaatgcaaagtatacaaaatcgtggaaataaatgtggatgatttgtataagggcaagttggttttggttactttcctcgtaagtcggaaaatattcgtaagtcggtagaaggtaatgagatgaagccatgtgtaagatcgtgtagcatatggaagaagtg

SEQ ID NO: 145578 - DNA, 159 bp, Arabidopsis thaliana landsberg
ttttaaaattggatcagtttataaatttggtcaacttcaccactaaattataatgattgttttgggttttatccttatcctctgttgataatatctattatcttcggaatcaaaaatgggaaaatttgccgacgaaacagcggagaaatgagatgtgtt

SEQ ID NO: 145579 - DNA, 1969 bp, Arabidopsis thaliana landsberg
ttcgcttaattctccggcgtatacaagtcgccggcaaaaatgtcgatgtcgaagagctccaagatgcttcagttcataaactacaggatgcgagtaacaatccaacacggaagacagctaatcggaaaattcatggcgttcgatcgccacatgaatcttgttcttggcgactgcgaagagtttcgaaaacttcctccggcgaaaggtaataagaagacgaacgaagaaagagaagagcgtcgtacgcttggtttggttttacttagaggagaagaagtgatttcgatgactgtcgaaggtccaccgccacctgaagaatctcgcgccaaatctggatctgtaaccgctgtggctggtcccggaatcggtcgtgctgctggacgtggagtacctactggtccattggttcaagctcagcctggtttatctggtcctgttcgtggaattggtggacctgctcctggaatgatgcagcctcagatctctagaccaccacagattattcgtcctccgggacaaatgccaccacagcctccttttgctggtcaaggaggtcctcctccaccttatggtatgagaccaccgtatcctggtccaccaccgcctcagtatggtggacagcaaaggccaatgatgattcctccacctggtggtatgatgagaggacctcctccacctcatggtatgcaaggaccgcctccttctcgccctggaatgcctccccccggtggtgctccgatgtttgctccgcctcatcctggcatgccacctgctccgccaaatcaccataatcagcaacattgattaggttagctgtttatcaagttttggaacactacttgattatcctttattatctgctgatggttgcttgtaagtgtagcttggctatgatgtgagatttggttgaaattgaacttattttgatttagcttggacttgtgtagtgactgaagtttataaatcataagttagctgcagtctctactagtctgctgatagtttatttgtgaaacctttaacttacacaaaaactttcttgtaacttgaactgataacttacacagaaattctacttaattagcctttataatttatcagcaatttctagtctgcttggccatgtgtgatttgtgtggaattgaacttgtcttgattagcttgggcatgtggtgtgagtagtagtctgctcatgactgtcttagcttgcacagtttctaggttgttgatgagtgctttgttgtcagttgcttttcttcttatgtttccttaagagtatgatcactttaaaaggtttgttactataaagcattctagaatcatcacattgtgaatcctgtaacttacactcagaaactctcttgcctgttgttctaatgagtttgaaaaacccttattacacttttagaagcatgaataactcatgatgaacttctcagttcacttttaaacgtgtttaatatcttcccaactagtagaacctttatgatccttgtttaaggtttgttcgtgaattttgttttggaaagctgtagatgttgtagggttcattagctatattggaagaacttgtggatacatctttttgcccttgctctctgttggcatatgatattggatgatttttttttttaatatctctgttagaaagatctgctaagtacaattttctcgatctggattgtaggagtcacttcatctacaacgaaagcaacatccacatgattgagttacccctcggctagtcgtagcgtttttctccgtgaagctcagagaattgatgagttcatattggtgatttctcgtggaaaaagcaactgattttagaaatagtgaacttgtaggagttacaaccttgctccatgaacttgaatgtattacttgtaaaagaggctctcaatggttttgactggcaattcggttctcaacatatattaggctatgttgctggttatgtacgtaacaaata

SEQ ID NO: 145580 - DNA, 102 bp, Arabidopsis thaliana landsberg
gttgattcagtctcactcttcctcagtagagctcccatcaatggcttcaatcaacctcttcctctacgccttccttcttcttctctctcacgcttcaggttt

SEQ ID NO: 145581 - DNA, 267 bp, Arabidopsis thaliana landsberg
agatttgagagagtctcctctctcctctctctctatatcgctcctcatgatcgaatttttaatataatttataaaaaatttatgtgataattacagatacacgttatttgtgtgtatattgatagagacaataaccattggaatctgaccatggatctcttttcttcttgagatatttttcatttctttctcctgttctcgtctcccagatctgttcgtcaatcttaccattggaaagcttcaagctttctttttttctctatctgg

SEQ ID NO: 145582 - DNA, 59 bp, Arabidopsis thaliana landsberg
catgttctcgtccatttattgcatgtttaactttcacattgtcagtgctcgtacccgtc

SEQ ID NO: 145583 - DNA, 87 bp, Arabidopsis thaliana landsberg
tcgcaatctcacctccaaatatcacaatgtgtttcccaatagccgcactagcgaaaacactcctttcgttaggcttcacaccgaatg

SEQ ID NO: 145584 - DNA, 494 bp, Arabidopsis thaliana landsberg
tttaagttaaaaacacgttacatagatagaaacttaacattaaattttcctaagaacaaagatttgcattacaaaaaagaaaaaaaaacaagaaacggagaaaggaaaagtttgatattttcaagagtttacacactaatctgcttatcgaagatccaactaaagcaaacctcatgggtcttcttaagcttcttagctctctcgtctgcacgctcttgaaggcgtctaatcctctgagctaacccacacacaaactcctgtgcacgttggccctcacccgtcaatccttctagcttctccaatctccaccgtccaaccaaaaactccaagatgtcagcgtaatcatccgccgtgtaaacctctagccgctgagccacggcggagaaatgttcgaatagcatcgggtctcgaccgtctgtcattagatgagccggcattgtgatcttcttccgcatcatgtcggccacggttgagactgcaccgttagggtcgat

SEQ ID NO: 145585 - DNA, 90 bp, Arabidopsis thaliana landsberg
aaaaaaaaaaaaaaaaaaaaaaaaaaaaaaaaaaaaaaaaaaaaaaaaaagaaaaaaaaaaaaaaaaaaaaaaaaggaaaaaaaaaaaaa

SEQ ID NO: 145586 - DNA, 224 bp, Arabidopsis thaliana landsberg
ggctttgatggtttaccgcgagacaatttcaggtggaacggttcctactacagaagtagtttcacaagttttggggtgcttgcaacttccacatgatgctgctttgcgggataggctgatttcgactttaggcataaacatttcttcacaaaaacaacataacatattcccactctcgatgatttggagagtatgatcctcgtgcattttcctctgcttgaggt

SEQ ID NO: 145587 - DNA, 493 bp, Arabidopsis thaliana landsberg
tacaggatcattcaaatctggtttttttgttattgggataggtgaattcttatggatccatcccccgagggaaccggacatgataattttttatcatccggctcgagcaagaattaaccaaactaaatgaatacatacaaaaaatataatttaatatgtaaaaattaattatccgattccaaagttattgcaactaaagattcaagaaattccattcttacaggtaaatgctcaacacccacgtaagcttaaaaagtttatcatgattaagtgctttctgggtcgtctcataccttataaattcgtccttaatctcaacaattatatcgagatttttcaaatacaaaggatttacttgttactaatggagtctaccctctactcttcattagatcctgtattcactccgatagtatcataaatcgagtcgatgcagagaaaatgaatgcatttacatactattactattaataattattttcttttttttttt

SEQ ID NO: 145588 - DNA, 332 bp, Arabidopsis thaliana landsberg
  unsure (1)..(332): unsure at all n locations
gtataaaccacttaactagaaacttcaattaattaaaaaaggtgcatattacatatctgcttagccaaaatctacacataaattaacaaaaacagaaaatgaaaaaataaaggtaaggaagagagattttttcttcttggcgtctaatgaagacaagatccttaatccattcaagtcttgttcactaaatcctaagtacttttgttgtgttccacatatattggaaccaaaaaccaaaggcatatcttcttcttcaccttccactctttcccacgaaanataaaggctttgcttatttcctcgttaccgagaaataaatagcccaatctccg

SEQ ID NO: 145589 - DNA, 79 bp, Arabidopsis thaliana landsberg
aaaaaaaaaaaaaaaaaaaaaaaaaaaaaaaaaaaaaaaacaaaaaaaaaaaaaaaaaaaaaaaaaaaaaaaaaaaaaa

SEQ ID NO: 145590 - DNA, 363 bp, Arabidopsis thaliana landsberg
agaaacaatctgagtttgaatttacataacacaagaaggaaacaacacctaccagaaacacagccaaacaaaaaaaatccctgaaaccttgtaatagaacacattaaatatccaatctggttcccatttatgagttggggaagggtatgcataacgagaatgtgtgagatagaaagttagaaattggttatatcgaagaaccttaccatgtttctacaaaatctccccatgtctgctgaatccagtgtcttcaccgtccgtgtttgaatccaaaccacaaggagagtcataccatttcgagttttcttgatagaagctatcgacttgtataccagctaaacctacatctgtttctatactacc

SEQ ID NO: 145591 - DNA, 1329 bp, Arabidopsis thaliana landsberg
gcacatactcgacggaaagctcatacataaaatagctcaaaaggttcacgagatggatccattgcagaaaccaaaacaagatcgttacgctcttcgtacatctcctcaatggctaggtcctcaaattgaagtaatccgtcaagctacgaaatcgatagagcgtgaaatcaactccgttaacgataatccgttgatcgatgtttcgaggaacaaggcgattcacggtggtaacttccaaggaacaccaatcggtgtttctatggataacacgagattagcgattgctgcgattgggaagctaatgtttgctcaattctctgagcttgttaatgatttctacaacaatggacttccttcgaatctaactgcttcgagtaatccaagtttggattatggattcaaaggagcagagattgctatggcttcttattgttctgagcttcaatacttggctaatccagtcacaagccatgttcaatcagctgagcaacataatcaagatgtgaactctcttggtttgatctcgtctcgtaaaacatctgaagctgtggatattcttaagctaatgtcaacaacattccttgttgggatatgtcaagctgttgatttgagacatttggaggagaatctgagacaaactgtgaagaacactgtttctcaagttgctaagaaagtgttaaccactggaatcaacggtgagttacatccgtcaaggttctgtgagaaagacttgcttaaggttgttgatcgtgagcaagtgttcacgtatgtggatgatccttgtagcgctacgtacccgttgatgcagagactgagacaagttattgttgatcacgctttgtctaacggtgagactgagaagaatgcagtgacttcgatctttcaaaagattggagcttttgaagaggagcttaaggctgtgcttccaaaggaagttgaagcggctagagcagcttatgggagtggaactgcgccgattcctaaccggattaaggaatgtaggtcgtatccgttgtataggtttgtgagggaagagcttggaacgaagttgttgactggagaaaaggttgtgtctccgggagaggagtttgataaggtcttcactgcaatgtgtgaaggtaaacttattgatccgttgatggattgtctcaaggaatggaacggagctccgattccgatttgctaagagagcattcctctgtttctgttctgtgtttttgtgttttgtttcaattttaattttgctgtgttaatgtttgaattgagtttttgattgtaatgtgaatggtgtcacaccttgtatgatataaatgatataaaaacttacgt

SEQ ID NO: 145592 - DNA, 1270 bp, Arabidopsis thaliana landsberg; identical to SEQ ID NO: 4551

SEQ ID NO: 145593 - DNA, 984 bp, Arabidopsis thaliana landsberg
tctctagtcttgtcttctattatgcaaaaggtcttcttggccatggatacttgtgctttagtaatccatcagtctctgtctcgcatcaaactttctcctcccaaatcttcttcttcttcttcttcttcttcttctgctttctcccctgaatccttaccgatcagacggatcgagctgtgtttccgaggagctatatgtgccgccgtacaaagaaactacgaagaaacgacctcctccgtggaagaggcagaggaagatgatgagtcatcatcatcgtacggagaagtgaacaagatcattggaagccgaacgcgttgggaaggagccatggagtaccttatcgagtggaaggacggccattctccgtcgtgggttccatcgagctacatcgcagcagacgtagtgtcggagtacgagacaccctggtggacggcagctagaaaagccgatgagcaggccctgtcacagctcctggaggaccgagacgtcgatgccgtggacgaaaacggccggacggtctgcttttcgtggcaggtctggggtcggacaagtgcgtaaggcttctggcggagcgtggagcgatctcgacaccgagacatgaggggaggcttgacggcgctgcacatggcggctggttacgtgaggcccggagtggtggaagcgctggtggagctgggagctgatattgaagtggaagacgagagagggttaacggcgttggaactagcgagggagattctgaagacgacgccgaaggggaatccgatgcagttcgggaggagaattgggttagagaaagtgatcaatgtcctggaaggacaagtgttcgagtacgccgaggtggatgagatcgtagagaaacgagggaaaggcaaagacgttgaatatctggtcagatggacggacggtggagattgcgagtgggcgaaaggtgtacacgtggccgaagatgtggctaaggactactaggatgggctggagtac

SEQ ID NO: 145594 - DNA, 66 bp, Arabidopsis thaliana landsberg
atcaccaacaaaatttgatgaatcatgtctctgcttctaaagatgttattattttccttattcttc

SEQ ID NO: 145595 - DNA, 502 bp, Arabidopsis thaliana landsberg
gtgtgattttgtgttttgacttttgatctcgagacaaacaagaaactaaaacaggttcttcttctcttcttttacctttttgtttgctttcgtcctgattcttgtgacatttattgtctgatgtgaaacttgtcctttatctattatgcctcgatttttatttttatttccccctcatatattgaatctagatctggttttgataatcttggaatcagacagtgtttgtatatttcggacaaacaagacgttaaaaagctgccttgtcttacaagaaactagattttgtctcggggtcgatcttatctccaaacagagagaaattaacagagacatgggaggtgcagtgacgaaatctgaaactctgcaaaaagaatgggttccagagacaaagttggaggctaagatcatagaaaccgtgcaacgcatggcatcgaggggcaccacaatgaaatctttcaacagtattgttcttaagttcccaaagatcgatgatggtctt

SEQ ID NO: 145596 - DNA, 80 bp, Arabidopsis thaliana landsberg
aaaaaaaaaaaaaaaaaaaaaaaaaaaaaaaaaaaaaaaaaaaaaaaaaaaaaaaaaaaaaaaaaaaaaataaaaaaaaa

SEQ ID NO: 145597 - DNA, 443 bp, Arabidopsis thaliana landsberg
gtaaaggaaaataatatttattattgccattgaaaaagactcatttgatcgagagagaaaaagaatcatttgaaccaaaagcatctttttctatcttttcaaatgcttacttccttcaaatcctctagctcctcctccgaagatgccaccgctaccaccaccgagaatcctcctcctttgtgcatcgcctcctcctcggccgcaacctgcgcctcacatcacctccgtcgtcttcttttcaccgctgcgaatttcgtctcccagtcaaacttcaccgccgctcaaaacttactctcaatcctctcccttaactcttctcctcacggcgactccaccgagcgacttgtacacctcttcactaaagccttgtccgtacgaatcaaccgtcagcaacaagatcagacggctgaaacggttgccacgtggacgacgaacgaaatgac

SEQ ID NO: 145598 - DNA, 302 bp, Arabidopsis thaliana landsberg
tttcaacaagaaattagatgcttagttttgacttatatattcaattatttttggtgcgtataggcagaagaagaaatgagaaagcaccttgtgctggccaaacctttttcgttggaagatgaaaaagattctgaacacactgcttcgaatgtcatccgcaagatcctcagcctctttaagaccgtacgcccaggatctgatctcaccaattttcaggtgacttttgttgaaataaatctactgttgtgttagaacgactatttgcgtgttttgtttttcctaaccaaacatattgatttgag

SEQ ID NO: 145599 - DNA, 823 bp, Arabidopsis thaliana landsberg
aaaagcttcaatcagtgagctgcgtttttgattctctgcttcatccagatctacatttctctgtttcagcctctattgctctgtttaacaagttctcaacggccggaatcgtcgccgggattctcgccaccggagttattgtgaaacggtgaaaatgggtttttgattttactggttacttcattgttcagtgcagtaagtatttattttccttgtcctgtcttactattggtttatttccttaaatgaaagaaactttattttccccgaatttcttcatcgctaaaaactctcactttctgcaatttcgtctgcttgtttcactcacaagaatttcacatttttttcaaaaataaacactgcttaatgcggattggttgttcacaaaaggaccaaaaaatggtagaaggtaaccgacagtgttagctgaaagaagccagaaactctgtttgtctgtgttcttgaatttagacaatctactaaagtccgtactttttttattagtaaatcctgttatgaccggacccaataaagtagagtaattgttacatgcgcgttccattccaaacagggggcgtgggccacttggtcatttgattctgtatttttacttcggagaaatttggatacaacaaataaagtagagagattgtgtataatgaataaagtttccttttttttgttaatgatttgatcatgcgtctcttctgatttgagtttcttttgtatctgcataagtttggattgatttcactatggaggaagtagcacctaaggttgaggaagaaactgtggaaaccaatgtatatgcagtgaaagagga

SEQ ID NO: 145600 - DNA, 612 bp, Arabidopsis thaliana landsberg
ctaagggcactaaacttggactggaaggtgaatttttgtaacttgagctagaccactaaactaatttctcttgtttccctacatttttttcctgctcgaccatatgctttaacaagaacacgaataaatttattgatgggaatcatattggtcttgtttctttcagtggaaaacttggagtgacttcttcaatctagatggttcaagtcctcagaaagtagaaccattgtttataagcaaggtatgatctctaggtgatacagcttgttctcatcttggcatctttggtatgtgtaactgatttgttaatggaacatgtctatcgacaggtgaatacagttttccagttgactctagtcgctggtgcaatacttcaaccagagtttgggaatccagacacccagacatggatcacttatctaaggtaataggtctttttcgaattaccacacagctggactaatcactacccttaaagttataaacatatgaagtgtgttctctgaaatcttgttattggtctcatgttgttttgtatccagctggttagttgcttcgacgactatggcttcaactgcagcttatggtgtacaatactgaagaagagaccta

SEQ ID NO: 145601 - DNA, 651 bp, Arabidopsis thaliana landsberg; identical to SEQ ID NO: 48944

SEQ ID NO: 145602 - DNA, 344 bp, Arabidopsis thaliana landsberg
attttaagataacactcttatttgagaatttcttgtagaaacccttatatcgaaaaaatttcaaacgcataatctaatttgttaccaatatataaatgaaggacatgacagtatctctctacctcagacgaagcaatgaacccaacaagaagctcatcatttgctatctaacctgaccatctcgagacagtgcagagcatcattcatggcataccccaaaactacgttatttcaatgttcacacaaaaatctatgcaagtgctctgatttctctccagttttagtcagtcaacagctttgattaagtttcagtctcgtcgcctcttcttctcccgccttgactc

SEQ ID NO: 145603 - DNA, 239 bp, Arabidopsis thaliana landsberg
  unsure (1)..(239): unsure at all n locations
gaacggaaattcttaaaatgacaataaagtaagtcattagcaatggtcaaaaganaaacatgcttatacagtattggtctgtaaactacgcacgaagacgtatgaaccgggaaccgtaagcacaacattagtccactcaacgtttccccaaatttcataatcatcgccattaccgttacgtctttcaagagcaatcacctcacaccaaatatgtttatctccaaattgaccaggatgca

SEQ ID NO: 145604 - DNA, 713 bp, Arabidopsis thaliana landsberg
gaaaaacttattaaagttctaccaagtactccttctgattggcaaaacgaggatgcaaattccatgggaaggagttctatgaatgatgagaattcaacgcagcaagatggcacaaccatgagagaaacccagagcatgctattggaaagaatagctagtgaaatgaatcggctcaagttctatatggctcatgcacaggtctccatcatgcatttacttcttctttttttctttttgcaaagtcacaattccttgtccatctcaaaatatagattacattagaaatgctcctctctttcctcgtacaagaagctttgagtatattgcatttaaaagtagtaaattggggatcaaaactagctatggtatagggtttgagatattgctgtgctgctaggagaatttattgcctttgagaagattgctgacaaaaaaataggttacatcagatgctacatagttaaatcttgtgaaatctctggtgttttccaaaaactacagtatacttgttagcctcagaagacaatagaaggtcttatgactgatgctcactactttttatgttatgccattgccagtacagaacctgcctttcattgagaacatggagaagaggattcagagcgctagtgtgttattggatgctagcctaggtcattgcttcattgatgggctaaacaacagcgatacaagtgtcctttacaactgcttac

SEQ ID NO: 145605 - DNA, 694 bp, Arabidopsis thaliana landsberg
cacgtggcagattcacctctttataatcctctctccctcacggtttctacgacattttcacaaagccacaccaactcactcacaaaatctgtagaatcatctttcaacaatggcttccactgctctctccagcgcaatcgtaagcacctctttcctccgccgtcaacagacaccaatcagcctcagatccctcccgtttgccaacacacaatctctcttcggcctcaaatcttccaccgctcgcggcggccgcgtcacggccatggctacctacaaggtcaagttcatcacacctgagggagaacaagaggtcgaatgcgaagaagatgtctacgtcctcgacgctgctgaggaagccggactcgacttgccctactcatgccgtgccggttcttgctcaagttgcgccgggaaagtcgtctctggttctattgaccagtcggaccagagcttcttagacgatgaacagatgagtgagggctatgtcttgacctgtgtggcttatccgacttctgatgtcgtcatcgaaacccacaaagaagaagccattatgtaaaattttaaagctttttgatgaatttcatcaaaagagaaattacttgatgtttaagtcatctctcttgttacttcgctaatgttgccctaatttggctcatccttttataagatcaatcaataataacaaatttcaatg

SEQ ID NO: 145606 - DNA, 104 bp, Arabidopsis thaliana landsberg
ctagtggcttgtcgtgtcatggcttggtccattctcaaattcaactttgaccttttcgagtgtttcactaaatgagttaatgcaacatctatgaacttttcaat

SEQ ID NO: 145607 - DNA, 585 bp, Arabidopsis thaliana landsberg
tgcttgagatgttccaagtagagtacattggaacagacccgtacatcacatgcgaaccgtgtaccgtccatcacagactgacttcaagcgatcgtttcatggttttatcctcggatggattgtatgaatacttcagcaacgaagaggttgttgctcacgtgacttggttcatcgaaaacgttcctgaaggcgatcctgctcaatacctcattgcagagcttctctctcgtgctgccaccaagaacggtacagttttaacaactaatcaatgattggtttagtacggttaagcagccggttaatgtgaaaataaaaccaacatatttggcagggatggagtttcatgatctgttggatattcctcaaggagatagaaggaagtaccatgatgatgtctctgtcatggatgtgtcacttgaaggaaggatttggcgctcgtctggacaatattatccagagagaaaacaaaaattcaatagataaattaaccaaacacaaaaaaaaaaaaattaggttttggcttattgttttcaaacaatctttcaatttcccggaagttcaaaaaaagaaggcctaattctgttt

SEQ ID NO: 145608 - DNA, 54 bp, Arabidopsis thaliana landsberg
aagaaggataacatcaagatccatggtgtctaagctatctagtggatcatatta

SEQ ID NO: 145609 - DNA, 210 bp, Arabidopsis thaliana landsberg
gaagaacaggaagataggatactgcttgagctacatatgcaaatgaagaatttcaagagtgaaatcaaggactacaaagacttatgggagttgtatcaattgtagccacaatagaagaagttgatgtcaaaaggaagttgtttagtactaccacaatacaagagaagacgttgacgtcaagaagaagaagtctagtactaccagagtaag

SEQ ID NO: 145610 - DNA, 410 bp, Arabidopsis thaliana landsberg
caactccatgctctctgtctgcattacgtagcttctctctccagttcatcccaagtcttacctttctctttctctgactcttgctctgagtcctcttcttcatcatcgtctgactccaccagtgactcactctctgaagcctcgtcctctgactcagactcaacctctacatctgatggttcgtatcctttgtctgactcctcagacccgccagattctgaatcgcttccgtccaggttcagaaactcccatcctccatcatctataaagctctgcggatcatctgtgatcgtctttaggatctgtctccagttcagattcagtttgctctcgtagtactttatatctgtggtgtctagccactcctttatcccctctagggagcttgtgggaactgagtcaaccctgag

SEQ ID NO: 145611 - DNA, 832 bp, Arabidopsis thaliana landsberg
ttcccttattattcggagagcctataaacgctctcaccaaacaaaccaaaaccaaaaccaatccaagaaaaaaaagaaacctcaaagaagaagaagaagaagattctctctgtagaggtaaatatgaagcaaatgtcgcatcttgatgatattccttcgacgcctggcaagttcaagccctacttccaccgtacgcggtggcaatcctccgtcgccaagctcgccttttggtctctcgtcttcgttggtttgatcttcatcttcttctaccgatctcccgtttcctccaatcccgccgatccttctcgccgttctcttcgtacctactcctggggtggacccgcttgggagaaacgggtcagatcctccgcccgtctccgtacccgccgcggtttctctgttctcatcaccggagccgccggtttcgtcggtacccatgtctccgccgctctcaaacgccgcggagatggcgttctggggcttgacaacttcaacgattactacgatccatcgctcaagagagcaaggcaagcccttttggagagaagcggagtgtttgttgttgaaggagacatcaatgacgctgctctcttgaagaagctctttgaagttgttccctttacccacgttatgcatttggctgctcaagctggtgtcaggtacgccatggaaaatcctagctcttatgttcacagtaacatcgctggcttcgtcaatctccttgaggtttgcaaatctgccaatccccaacccgccattgtctgggcttcctctagctctgtctacgggctcaacaccaaagtccccttctctgagaaagacagaactgacc

SEQ ID NO: 145612 - DNA, 627 bp, Arabidopsis thaliana landsberg
ctttgcgaaaagtcgtttttttaatcaagtctgaatcacgttttattgatctacactcgcgtgggttctccgtttcgtgcttagatcagagagctccctcccgtgattccgtaagatttctgcgtttctcattacttggtttcatttcaacgtagattctgaattttgtgtgatctagtctacacatttttttttaattctttcctctgctcctaaattccagaattcagacaacggttgcgatatttcttatgtctttttttctatcgttgttcatttcagaagtttcgatataaaaaaggttattgttggattttgagtaacacattgtcactcaattctcatcgttcttcaatcaaattttggattttgagcatcatggatgatggatctatgcatctcgattttatattggacagaaagaatgtttcttgttttgttttgatgatgttttcttatgacaacaatcttcatgtttttgtaggagctctaaggtcggaaatggcggctcatgtttctactggaaacattcataatttctatcttgcggggcacgtttacaggggacaagctttttcatggagttctgcctctactttcatggccaatacattcaaagagccctct

SEQ ID NO: 145613 - DNA, 118 bp, Arabidopsis thaliana landsberg
gcttggtcgatttgtttttttgcttatgtaaccatatgattgattactgttattattatacacaatttacctattatataatttttgttttgtttcaatttttgtatttgatgggatt

SEQ ID NO: 145614 - DNA, 345 bp, Arabidopsis thaliana landsberg
agatttgttttccaaaagcatatctgaaaatgaaggacaactttcctcttctccttcgattataaatattctcttcggttttgcttgtttaacctaaaagcctcagatctaactccaacaccttcaaagtctgcctcctttccaatcttctttcttctgttcgatctctaatctcagaatttgtgtcggtaaggtaaaggtgataatgagtgatgactgatgagggagttttgggacaaattttaagagaaacgcatagaaactgacagaagagagtgagcacacaaaggcactttgcatgttcgatgcatttgcttctcttgcgtgctcactgctctatctgtc

SEQ ID NO: 145615 - DNA, 187 bp, Arabidopsis thaliana landsberg
attccaaaagccatgattggcctcattcttgtcgataaatggggcagacgtcctctcttgatggtgagcatgtctttaaataatttctggctgttcgcagattcaaatctattagtctatattgatttgattactattttgacatagacttcagcgtttgggatgagcatgacttgcatgctacttg

SEQ ID NO: 145616 - DNA, 80 bp, Arabidopsis thaliana landsberg
gttttataactccagttttgtttttgtcaatttctcaattaagtttcatagttgtaacgtcgcgttgaactctaaatttt

SEQ ID NO: 145617 - DNA, 458 bp, Arabidopsis thaliana landsberg
ttctgaaaaatctctctctctctctctcttcatcgtcgccgtcgtcttctccgtctcctcctctctgtctcgctgctacttcttcttcatcttcctgatgaatactcacaaaaccgaagaaggtctgttccaccatcatgatcttgatccgacggctgacatactcgttcaatcaccaccctccattctccaccaccaccacgaccacaattccgaagtcgatcccgcgttttctctcccggaattcatactcttccgctcttctccttccggagattctcccggtctctcctcagacgagcaagacgattcccttaccggaaacccccaaattgctgattcgtcaaattctagggtttcgagtgcaggaagagatgggcttttcatcagccccgatcctcatatctcatctcagttctacacattcaacgcagcttctcactctctcatgtgtcgct

SEQ ID NO: 145618 - DNA, 261 bp, Arabidopsis thaliana landsberg
catcactgttttgagaaaacagaagaaaaaactgatatgcaagaattggtatgctccagaaataacaacttacccgcaattaatcatttcagaagtgtttcaactcctacctggcatggattctgaaggatcttttgtatgaccaccgatagacaaaagctggttatcccatggtatctacataacaaacaaagaaggccagtatgtgatttcaagaggagattactgaaccgaaacctgcccctgatgtttcaaggctag

SEQ ID NO: 145619 - DNA, 335 bp, Arabidopsis thaliana landsberg
atttgttgtgttcccggcgacttctacttttcacctttcttctcggcgtcgtctaatttctagggttcccctgtatttcacgtgtgaatctttggcttctttttttctttcgtttcgtctgttcgaatgcatagttaggtttagacttgagaatgttgcattgttggatccgattcatacttcagattagggtttcagtttcaattcgtgaagttgatgaaattgagtagcttaagatcatctttaagctctcttaactctaaacagttttgtgactgaaattgcagcgtcaagagcaaatccaacatgtcgtcgctgcgtaatgctattccacg

SEQ ID NO: 145620 - DNA, 536 bp, Arabidopsis thaliana landsberg
ggtggttcttagtccgattctcgtaccggcggtaatcacatcgagtttcttggcaacggggttcctagcttctggtagcctcggagcattggggatcgccctcctcatatggctctacaagtaattacttaagttaaagtaactaattaactcttctaatgctttgattgtaccaattgaaatttgttcatacatgcattgaccacatttttattttgtgtgttagttaacattatgtatgtgtgaatgacacttaggaaagaagagtattccagagctactttgcatgcacgaggaggtaggcctgatgggcctaataagctggcagaaagtggcaagcaatcaggaggagataatccgttgaaggaagacaagccgccagaaagagataagctgccgagaaaagacaagccatccaaggaagacaatctgctgaaaggagatcagccggccgaggaggataaattgccggctgaggaagaaaaaccgccacaaaaagataaaccgccacaaaaagataagccggcggagggaca

SEQ ID NO: 145621 - DNA, 147 bp, Arabidopsis thaliana landsberg
ttatagataatatgacccagtggactttattttatagttgagtattgaatactgaatggtttttagttactacacatccatcatacaaatttgatattttgtaatatttaggaacaatttaggtaatgataaggtatatgcgtacgc

SEQ ID NO: 145622 - DNA, 202 bp, Arabidopsis thaliana landsberg
gagcttgttattgctcgtggaactgataattattgtcaagtttctgtctttttaagtacagtacagttataattcttactcgatttgatcgaaattttcatcaagtttctgtcttgcactataaatggtatacaataaagtcttaataatcacttgtttggtgatgttgacagagttaatataatcaactaagttgaatttg

SEQ ID NO: 145623 - DNA, 385 bp, Arabidopsis thaliana landsberg
cctaagatgaaatctctgtagttttttttttgttcctttcttaaatttcgaaagaaagacatttattaaaccaaaataactctttagatcattgcaaggaaaaatgttgaaaagtgcaagtccaatggcattctacgatatcggagagcagcaatactctactttcgggtacattttaagcaaacctgggaacgcaggagcttacgagattgacccttcgatcccaaacatcgacgatgcgatctacggctcagatgagttccgtatgtacgcttacaaaatcaaacggtgtcctcgtactcgtagccacgactggacggagtgtccctacgctcaccgtggcgagaaagccacacgccgtgatcctcgccgttacacttactgt

SEQ ID NO: 145624 - DNA, 164 bp, Arabidopsis thaliana landsberg
gatccctattaattccagagatatctgactctaccccaagggattggctgtagagagggtattgactttaacatgttgattcgataatgcctgcttagttagagatcgctaaagggatttaggtcagtgtctagctttgcttgaggatttctatcacgggagtg

SEQ ID NO: 145625 - DNA, 437 bp, Arabidopsis thaliana landsberg
cagccgaggttaaatccgagatgagagattgtagcatatgtttagagagtttcactaaaggtgacatgctaatatccttaccctgtacccatagtttccattcttcttgcttaaacccttggcttagagcttgtggagattgtccttgttgccgtagagccatagcaaaggaatagaaacttgtaaatagaatctttgcctaaccattaggccatagccatacacatcttctcttcttcttgctatagacatccttaaaacgatcttctgagttttgtcgcccatgagtgttttttttactgtcacatgtttgtaatggtttttgttgtgccattaggcagttcaagcgttgatatcgtatggtgtgaatctttttagttttagtcactgtgatctctcttttaatgtcttgttggttatatgaaagagactttttc

SEQ ID NO: 145626 - DNA, 628 bp, Arabidopsis thaliana landsberg
ccgaaaaatgtggcaacgttacacttgagtacccttttggcttttctccaggttgttggcgtgccgaagatcctagtttcaatctcagttgtgtgaacgagaatctattctataagggccttgaagtggtcgaaatatctcacagcagccagttacgcgtcctatatcctgcatcctacatttgctacaacagcaaaggaaagttcgctaaagggacttactactatagtgatctaggtaatttgactctctccggcaacaacacgattactgtattaggctgtaactcgtacgcttttgtgtactctaatggaactcgaagaaactcagttggatgcatatcagcatgtgatgctctttcccatgaagcaaatggagaatgtaatggtgaaggctgctgccagaaccccgtccctgcagggaacaattggttcatagtcagatcatatcgctttgacaacgacacgtcagtgcaacctatctctgagggtcaatgcatctacgcctttctcgttgaaaatggcaagtttaagtacaatgcttcggacaaatattcttatcagcaaaataggaatgtggggtttcctgtggtcttggattggtctattaggggagagacatgtggcac

SEQ ID NO: 145627 - DNA, 397 bp, Arabidopsis thaliana landsberg
cctgatccagaatatctgagccggaaggtggcgttcaaagacttaaacgagtagtgggccaaagggctctataatgatagttcgccctcagcttttgtccaggattggcattctcaaaggagaaagatctgatcagggaaggattgatcgatcaagatcaggaagaggagaacgaggaacaattaacgaaagaaggggaaagggctaaagcatctgcttccacttccgctgcagaagaagttgggggaggttacaaagcccttatttcaacagactgttaaccactttaatgcctttatccggctttgcaacaaagtgatcttcgatcgcactaaggcgcataagacagtacacttcaccgagattcaccaagtaaccctacggaattgatgttgtg

SEQ ID NO: 145628 - DNA, 934 bp, Arabidopsis thaliana landsberg
caaaacaaaaagaaagaacaatggccaaagctcttagccttacaatctttctctttctcttgatagcttccaatgtccaatccgctcgacttctcgatgaggttcaaactcagccacagttagtcccccaggtaccggaagaggaagatgatagtccacaagccgtaacaacaactccaacaccaattcctctcccaggacccgccacgggaggacccgagccaatcctagagttctttatgcatgacgtgctaggcgggtcacacccatcagcacgtgtggttacagggatagtagcacaaacagaggtgaatggaataccgttttctaaatccagcaacaacattttcccagtagataacgcagtgccgcttgtgaacgcaaacagcatcaacaacttaatcaatccaaacacagctccactcctaacaggacttagtggctctcaagccaacaccgtaatccaaaacagtaacggtaactctcaaggatcccttagctccaacaaccttccctttgtgaccacgggtcagctccctcccattttctgtttccaacagcttatgtttggctctagcaccggggttgacgatgagctcaccgagggccatgagttgggctctgcgatcattgggagagcccaagggttttatctcgctagctctttggatggaactagccagaccctttcgttgacagtgttactccacgaagatcatgatcatcatgacacccttgatgatgccatcagcttctttggggttcaccgaaccgcttctcatgcgtcgcatatcgctgttgtgggtggaactgggagattcgagcatgctaaagggtatgctgtcgtggagactctacacaaccaggaagaccaacatgttactgatggtcatgataccattctcatttcagtgtttatcttacatactacata

SEQ ID NO: 145629 - DNA, 260 bp, Arabidopsis thaliana landsberg
tctgttcaggtaccgacggatcagacggtggttgtggagcaacaggtgagtcggaagccgttggattcgatgatgatgatgatgatgaatttgaactataacacttaagcaacctatctttgtttttggtccaccaatcttctgcttgatgctcatcaaatctttttttactaaatctaactcgtcgaaagatcttgttaccattcatgtctacctcataagtcacataaacaccaggctcaaattgttctttactttct

SEQ ID NO: 145630 - DNA, 441 bp, Arabidopsis thaliana landsberg
caggctactcttcaagggaacaccttcaaactccgagttccgtttccaagacgcgcacaagacagaaagtaagacactctgcattacagttatgttcagggtttctgtctagagttaaaaccactgattctctttctccatcagagtgctccaaaactgattaactcttgaatggtggtggtgtttccagggatgtaaagacattgattgtggaaatgcttcaagctgccaagtccaattagttgctaaaataaagatggaaaagctcttccatctgaatcctgctacaacaagaaaagcttcctccaatacacattttatcttatctatcagttgcaaaaagaacactcatttagtcctgtatatatctcaacaagactagaactagatgtatacatgaaaaaaagttatcaataaagatttctgaagttgtattggcat

SEQ ID NO: 145631 - DNA, 631 bp, Arabidopsis thaliana landsberg
ctcgcctcttctttaatttcctctgaagagaatcctccttacgaaaatgttcaagaaagcaacattgaatctttcacttgctcctttgctacttgtttttcttttccttctctcgtgtgttgttcatggcgtcgatgagaagaagattctcagtgtacataacaacatctggtctcccaagaaatcatacgaagcttcaacttcatgtttttctcgcagtcttggtcagttctattttcatcaaaggctcaccaaccgtagagatactgtttcttttgctttagtttaatatttaatggcgtaatttaaggttaaactcttagttaaagtcattagcttttacactactttatattatcctttttccttgtattgatttgggattagtatagctactttttacaaagagacaagatttgttgatctttatgagaactgatgattctgctttgaaaaacttacgaaaaggaagagaatccactacattggagatgaaacatagagaactttgctcaggaaagactatagatttgggtaagaagatgagaagagccttagttttggataacattcgagttcagtcacttcaactcaaaatcaaagtaatgacctcaagcaccactgaacaatc

SEQ ID NO: 145632 - DNA, 363 bp, Arabidopsis thaliana landsberg
gtaattgtccggggaatttactgaatccaccatactggacacaaaaatgcacaaacaatggcggcgttaagcagattgttatcatcagtaaccgatcatgaatcgtagatgtaaacacatgaatgaagacaatgtaccaaactatcctaatggctctataggctgctactagtaatattgctaaataaatattagcttagttgcaggtttgcctatctactcagttactttacaaatttagaaattaatatcagctgagatatgagatgtagagaatagttaccatggactaacaactcattaaaaatttgcgcagagccattttgtcgatcaatgcatcgcctcctataagtttaaggacag

SEQ ID NO: 145633 - DNA, 379 bp, Arabidopsis thaliana landsberg
attgaagatcttgattccgatttcgagatcagggttttgatttttgaatgcttcaataggtttctcgaagatcttagcgttgattggggttgtgagaagggttgacttggctcctctcctcgagaaaagcttggccatgtccaaaattggaatcatgtggccttgagccatgaaggggaagaacaaaatatgaattctctcagagacttctctgttcatttttggttgaagaaacaaaattctaggttttacaggatgaagaagaaaatcaaaagaaaacagaacaaaaatacaaaaaacaaattctgcagatctataaactgaaatgtgttatgtgatcagacaaaacaacgagggtttcttgtctggattggattta

SEQ ID NO: 145634 - DNA, 192 bp, Arabidopsis thaliana landsberg
cttccagatcgcgagttctactaaacagagggtaacatgtatatagtccggtccgttgaatgttatgtatatgtttatgtagtcacttaaagtgggtatggtcttgttataattatggtagtagtttgtgtcgcgttctagacttgtaattgaagaaacctcaactaaaagaccttggatgctgtttgaatg

SEQ ID NO: 145635 - DNA, 69 bp, Arabidopsis thaliana landsberg
gaagaattgtcatcttcgcaaaagcttcgagagtagtgcaatcgaaacaagtcatggatctttcgcctg

SEQ ID NO: 145636 - DNA, 287 bp, Arabidopsis thaliana landsberg
ttttcagttaatgaaaaaccttgagaatgatcattaccctcatttttttgatggatgaagaaggatgggttcccacaaaaattatagctggcttcaaaagggtaaaattagtaacatgagcttgacttgctttctttttcattaatctattctgtcatctgtgtttttacacaagtgtgttgttttttaagttttctcttactcttgaattgcaggttaaagcaatgactatggatgttgattttatagtctatgcgttggggttttctaattctgttgaagtgcag

SEQ ID NO: 145637 - DNA, 148 bp, Arabidopsis thaliana landsberg
gagtcacagcatattgataccatttcagcggattagaagatgatgacggggatgatgaaattgaaaacaatgagaacgatggttctgaggtgcatgatgatggagagttgagttttgaatatagagttaatgacaaggaccaagatgc

SEQ ID NO: 145638 - DNA, 299 bp, Arabidopsis thaliana landsberg
ccgctcaccgatatggcctctacgcgcttcaatggatcgtggaagttaatgggaagaagactcctgacctaaacgcattcgcagatgctaccaaggttttgtctctttctttacagaagtcacactttcaattagtttggacgtgaagaagagttatgcagcaaccattaggattgcttttactctgatccaaattttgatcttagattgtttcttttcgattttggttgcaacaggagctagaacacgggcagtttgtgcgtattaggactgttcatctaaacggcaagccacgagtc

SEQ ID NO: 145639 - DNA, 54 bp, Arabidopsis thaliana landsberg
cttgtcaagcaaatccaagctgagcaaagcttcagaggggccattctcggagtt

SEQ ID NO: 145640 - DNA, 181 bp, Arabidopsis thaliana landsberg
aaaaaagggaaggcgaatcgtagaggggaaattgttcttttgccgctctcggacgaatcgtctggtctgcttctttttccttcttcttatagtctttgctttttggccttaagaaaatgattatatcttttgataaagtttccatttttggtgatataatacaaatagtgtattagtagtt

SEQ ID NO: 145641 - DNA, 705 bp, Arabidopsis thaliana landsberg
ttgtgactgaacataaactcttcttctctttctctgcctctctctttcttctctctctctcaggcacacgatccacacacacacaaagactcaaaacaaagtcaagaaccctaatatcttaagaacgtcctgacataaccataggatcaaagatggagggagaaaccgcagccaaagcagcggcaagttcctcctcatccccgagccggtacgagtctcaaaagaggcgagactggaacactttccttcagtatctaaggaaccacaagccacctctgaatctgtctcgttgtagtggcgcacacgtccttgagttccttaagtacctcgaccagtttggtaagaccaaagtccatgccacggcttgtcccttcttcggacaacctaacccaccgtctcagtgcacttgccctctcaagcaagcttggggaagtctcgatgctctcatcggccgtctaagggctgctttcgaggaaatcggcggtggtcttcctgagtcaaaccctttcgctgccaaggctgttaggatctatcttaaagaagtccgtcaaacacaggctaaggctcgagggattccttacgacaagaagaaaagaaaacgttcgcatacagacacggcaactccaatcgccggtgacggagacgatgccgaaggaagtggtggtgctgctttggtcgttacggctgcaactacgggatagtgga

SEQ ID NO: 145642 - DNA, 438 bp, Arabidopsis thaliana landsberg
ttagtttggtagagaaatggatcaacaaggacaatcatcagctatgaactatggttcaaacccatatcaaaccaacgccatgaccactacaccaaccggttcagaccatccagcttaccatcagatccaccagcaacaacaacaacagctcactcaacagcttcaatctttctgggagactcaattcaaagagattgagaaaaccactgatttcaagaaccatagccttccattggcaagaatcaagaaaatcatgaaagctgatgaagatgtgcgtatgatctcggccgaggcgcctgttgtgttcgccagggcctgcgagatgtttattctggagcttacgttaaggtcttggaaccatactgaggagaacaagagaaggacgttgcagaagaatgatatcgcggctgcggtgactagaactgatatttttgattt

SEQ ID NO: 145643 - DNA, 146 bp, Arabidopsis thaliana landsberg
gcgagtgcaattcagaaatcactctgggtgataaaaaacggtgtcgtatggttctttagtctcatcactttcctaaagagcagtgaagcaaaatggcgaattggatctcgtcgaagctcaaagccgccgaaacaattcttcaacag

SEQ ID NO: 145644 - DNA, 545 bp, Arabidopsis thaliana landsberg
acacaacagaacatataagacctagagtctctctgtttcgcttttcataaatcttgaagaataaatggaaaaagcttcaaacagcaacaagtccacgaaattctcgaaaatgcttcaaagagcgatgtcaattggtcacagtgcggcgccgtttagtccacggagagattttcatcagcaccgtacgacttcgacggcgaacagaggaatcttcttctccagtccgttggttcctacggctgctagagttaggagaaatacaaaatacgaagccgtttttgccgaacccacttcgcctaaagtctcctgcatcggtcaggtcaaactcgctagacctaaatgtccggagaagaagaacaaagcacctaagaatctcaaaacggcatcgtctttatcgtcttgtgttattaaagaagaagacaatggaagcttttcgaaactaaagcgtatcttctcaatgagaagttatccgtcgagaaaatccaactccactgccttcgcagccgccgcagcgagagaacatccaatcgcggaggttgatgcgg

SEQ ID NO: 145645 - DNA, 112 bp, Arabidopsis thaliana landsberg
gtgttatcgttgactttgtccaaaagtagtggcgttgctaattttttgtgctctttctagaaatatttttgacgctttgaaagtcttacactaaaagccaaaaacattccca

SEQ ID NO: 145646 - DNA, 224 bp, Arabidopsis thaliana landsberg
aagtccatgcttttcgatcattgatcagagagcttccaaaaaatatttgcaagaaaatggcaatggctccagtaataaagctggtcttaggttcagttgcttttgccattttctggatattagcagtgtttccctctgtaccattcctaccaattggtcgaaccgccggttctctgttcggtgcaatgctaatggttatcttccaagtgataaccccggaacaa

SEQ ID NO: 145647 - DNA, 831 bp, Arabidopsis thaliana landsberg
gatcgatcctaggcttacctcaaacctcagtctccgttgactactgagactcgtcgacctctgatccgcttcttccactatacggatctacttccgatctgtaagaagcttaaatcttcggttgattttggaatccatccgtcgtagatgtgtaattgtattgatttggatgagtttatctgtttttttgagttttcttatgcagtgatgatggccggaggtaacgtacggtttctggttttgatactcgccgtagcaatttgcggtgctgcttctgttttccagccgatctcagactctcaccgatctgcggctctggatgtcttcgtaccagtcgatggatcatacaaaaggttggtttctctatcttaagtcggcattgctttgatgtaggggttttaaccacatttcaccgattacatattggttgctcgttaatgttcatgaatggtttttgtacggactaatctgatttttattacaatcagcttggaggaggcatatgaagcattaaagactttggagattcttggaattgataaaaagtctgatcttagctcaaagacttgtgagaatgtggttaaagttcttcagtcgtcttcttctactcttaaggatgcattttatgcgttaaacgttaatgggattctaaaatgtaaaattggtgaagctggtcctaaggtaaacaattgtctcctctcagtatcataattttaactattaagcggctaaaataaccttatcttttcctcttttgaaggacattgtttctcaacttcaagctggtgttaaagatgcgaagctattgcgtgatttccatttactgtcaag

SEQ ID NO: 145648 - DNA, 636 bp, Arabidopsis thaliana landsberg
caactaaataaatttgaacgagcagaatttgtgaattatacttcagaacctgatgattaaacatatcaagaacatagtaacactaatttacaaagacagtaaccacccaccaacattatgcacaccaaaaaggggtattaccgtgattaggacattttctgtttacgacataaacgaccaaatagatccaccgaattttaaagccgttatataaactaagttccatacttatatatagatagatagatgaaagtagcctaaagagaagccaagagcttctaagagactcaaaaacctcactcaaatcttcatattaatacttacagatttttttgtgaagttcagtagttgtctcttcacgcagtggacagaacttccagctctgcccaccagagcggtgaaagttttgggatagtgtcgtctggtgataatccagtgatctctcgtaatctccctgtgacttccttcattatcggtctctgtttcgcgtctgctcttatgcagcttttgatcacttcacctatattctcaatcttctcgtcaaagctttcaattgtcggatccaccatctcccttaatgtctttcctctcaagaagacagccaatccggtatctatcgagtcgccttttttaacc

SEQ ID NO: 145649 - DNA, 391 bp, Arabidopsis thaliana landsberg
cttacgccactatagcattggaaaagaaagaaagagagagaacaaagcttcttcatcaatggagaagcaaggatgtgagatcgaagctttagatattgattacaacatctttgtaaggaagattaatgttaatccctttggaatctttaggcggaaaccgcggccggaagctgaccagccggtaaagacagaggaagagtcattgaagctagaggatgaaaccggtaacaaagtcaagcatgtactaaaaggagtgacttgcagagccaaaccatgggagattcttgctattgttggcccaagtggtgcagggaagtcgtctttgcttgaaattctagctgctagactcatccctcaaaccgggtcggtttatgtcaacaagagaccggtg

SEQ ID NO: 145650 - DNA, 459 bp, Arabidopsis thaliana landsberg
gctcgaaatcatctcctcgtgaacactcaggtatgaatacaaatcttttaatggaatcatgtcactgagtgtttagctgattgttgtgattcattttcatagtctactggaaattgcacgtaaagtagtttgtagctgaatatcttgtgccctgcaagagttatcccgtatttcaaggaataggacttttattttttaagcttttgagattctaagttaaaacactattgatgcagctggtacaaatggctttggaacaaatggtcaggtattgattgaacacagtcccatttttctttatcttgtgtagtttgtatcattgtggttcctaagaaatctaattcaatacctactcttttagacaaatgagaagtcattgcagcgttggcttgatcatgagttggaagtcatggtaaatgtgcatgaagtacgtcatgagtatgagaaacaaagccacgt

SEQ ID NO: 145651 - DNA, 545 bp, Arabidopsis thaliana landsberg
tttaataccaaaataatgacttatcaatttagtaatgtaatcacaatcgtgaagagaaacacaatatgttgaaagttgaataaaatctcaaatcataaagaaaatagtgtcttctagattcaataatgttcactaatttctgtttacttgttactacaccatttctttggcctcgccgtgaaaataaccaatatgttaaataaaatctcaaatcgtcaagaaatacttggactggtcagaaaaaatgagagtgatataactcatgacagtaagctttgcttggcggactctcttgtcaaaatgaaatcaactgcttcctcgacggtgtcaacgacctgaagaagttaaacagtttcacatgaacataaactcacgggaataataataatcttcttctcaaggctaagtgatgatgttgatgcttaccagatcagcaggaaactcggcatggttatcttttcctttgaatactccggttctcgttaatattgaaaaccaaggagtcccagcctgacacacagatttacttttaatagactactaat

SEQ ID NO: 145652 - DNA, 175 bp, Arabidopsis thaliana landsberg
tagactcgattcgtgcgactcgggaagactaggctcgtttaaaggttcacgcttttgatatttcgagctcctagagacctagactctagtcctgaggctgattggtaaaggaaattggaaaagcttggattgaaaactatggaagcgaagaaagtacagaagaggaagaagagac

SEQ ID NO: 145653 - DNA, 215 bp, Arabidopsis thaliana landsberg
ccatcgcgaaaaaaaaaatcagtgagagagatggcgaggtcgagaagaaagtacaggaactgtagggctaaagttcgcgttgctcttcctaagaagaaccctaatatctttaaaccagctttcaacttccctcccaacgtccgcgctctcatgggagacgatgtccctgaatgggacgatcaagctagcgttatccagaactacaaatcctttgg

SEQ ID NO: 145654 - DNA, 1008 bp, Arabidopsis thaliana landsberg
agataagatttttacagattctgcctcgatcaacagactctaatcagcagcaaatgtggagcgtcaccggagcattgactgtggcggtgccgcctaccgccgccgcttgccgtacgaaaccctttctcatctcctcttcctttcccaagcagacaaagaaactccatctttcttcgccttctctgtctctaccatcatcacatttctcctcctctttcaaaaccgcagctacctccatcgagcaacagtcttctgttaacaaggtatctcttatctatctctctctctcttttcctcttgaccaatcaaaccaaacagcttacgttttctggatgattgcagggagagagcaccaagtaccatttcctggtagcaaacgctaaattcatgcttgacgaagaggagcacttccaggagcaattgtttgaacgtctccgttacttcggtgagcgtgaattagtgcaagacttctggcttgtcattgagcctaaattccttgacaatttccccaaaattactcaaagacttcgtcgtcctgctgttgctcttgtttccaccaatggcacctggatcacgttagaaccctaatcccaatctctctcttttcaaaattacgttcctcactccctccttatctaacgcatttgtgttttgcaatttgttgttttatggcaggtttatgaagttaagattggatcgtgttctgtatgattcctttgaagctacctctcttgatgaagctttggcctccaatcctaccactcttgagttcgataagcctaaaaattgggtggcgccataccccaagtatgaacctggatggtgggataccttcttgcctaaagtaacccaagaatctgcagtatagaactttgctttttgtcttgtttttgcattctccaatctcagctttgtcttagtgcttcaaagttttgtactactgagctcattatccaagtctatatctttcctagtgtagcttctattactcaaagttgcctgtttgat

SEQ ID NO: 145655 - DNA, 107 bp, Arabidopsis thaliana landsberg
ggactctcttagctaataatactactcctaaggcattttaccattgttccaaaaacaaaacttgaaaagttatgagcttatggagtaaacactcacggctttggaga

SEQ ID NO: 145656 - DNA, 505 bp, Arabidopsis thaliana landsberg
aggaacctagataacgaaattttgaaggttactgttttttctctttggggtcaaaattttaacaaaaaggaggggaaatttgtgtctgaaaaatgtggtgtgcttgctatcatcagccattacctgccagttccgtcgtgttgaatcagcaggcgaagcaagaaaagagtctgagaagaaaacaagtcttcttcttcttatcctcatcatctccttcaagcttaagcacctaacatcaatggccaatcagtaattatcctaaaaatgggttcagactaaaaccaaaagcgagtgtgttgcctccttctgagtctggtgatatcgctacattcctctttgttaggtatgtctctaatctccatttctattaactctgttaacgtaagaaaagaacaatttgcagattttagctatttattattgggaaataaaagtagttatttgcgttgatttattgtacgtgttgcagtggagcaatgatctccatgtatttggtaaccaattt

SEQ ID NO: 145657 - DNA, 832 bp, Arabidopsis thaliana landsberg
aataaggatttcccgggaaaggcacaagaagtgaattgccaccacctggaagtgttgaagtagtgtgtgcaaaggtgtgcacactacttcacgctatatccattttaatgtgcagtcttaggattattagatctaggaccatgttgttacacattgtcttgtagtagaacgctagaacataaacttcctttgaggataaaggaattgctaacacatgtatattctcggtggctaagctttggagtaatagccacacttgagctaacttagattaagatcatttttaagattcaaaatttagattgctcatcatatcttgaaccaaccccactaatggattgtggggttcttgcatttgcatgtatttttgcctcttgggagatattttggttccctttaggttcttctcataacaatcaaccaaaccagttgaccaaccatggttaggaatttcaggtgagaggtattcatcacctctttatctctcttttttactcttctttcctctgtttcttcaagactaaaaactctcttttatgtaatttgttgttatatcttgtaagctgtgtgtttctgattctatgtaagaaaactaaaacctttcattttccatcctcggtggttggagaatgaaactgtgattgcaatattttactttgatctgatatataatcctcttgtatgagattatgacaatgtctcttactatatgaatccctactttcattatcttgatgccaagaggccttactacaatcattcagcaacagactggtttttatgtacaatcataagagcaaaatcatcatattataaacaaaccaacgtagga

SEQ ID NO: 145658 - DNA, 295 bp, Arabidopsis thaliana landsberg
gatcaaacatcgaaatcatgtgcctcttcttggttattgcaaagttggaagacgagcggcttcttgtgtatgagtttatgaagtatggaagtttagaagatgttttgcacgaccccaagaaagctggggtgaaactaaactggtccacacggcggaagattgcgataggatcagctagagggcttgctttccttcaccacaactgcagtccgcatatcatccacagagacatgaaatccagtaatgtgttgcttgatgagaatttggaagctcgggtttcagattttggcatggc

SEQ ID NO: 145659 - DNA, 659 bp, Arabidopsis thaliana landsberg
gagtgaaagatggtgatgactcatcaaaatggtgtggattgaaatcacaacactactaatttctctccttggcttcattctactctctctggtaaaaatttctctttttgggttccaagaatttttatatatttacttatgatttgattcttctttcgaattcgaagtgttgattttggtatatgtgtgtctattgatttcaaaggtaagctattgcgtttttgcttgatgaattttagtcacaaagctttgttgttgttggagaagatgctcttctcttggtatcttctcttggtatcttatcggtatttagtttcatcaaggtttgacacgtttattttggttcttttaatgtcttaatccaagtgttgatattggtgtatgggtctttggtcctctcaaaggtctttggttatcaagatacttgttgtaattgggttataatagtcgtagatgattctcttttggtatcttatctttctgagactaagtaatgatacacaattatttaacttcattgaggttttgacatggtgaactttgattgtgttattgaagaattggatgaaaagacaaaggaaatgctgagagtgattgatgaggatgctgattcttttgcggcacgagctgagatgtattacaagaaaaggcccgagctt

SEQ ID NO: 145660 - DNA, 341 bp, Arabidopsis thaliana landsberg
ggagatacaagccgggtcagggatagattcacagtcaacgatcggatcaatagaggatggagggttcagtacaatagagatggttgatatgagtataaaagaagttcctgaaggaaaattatgagagttagaaacagagccaaagcagattctttgaacatcaaaatcatctaagggtcagtccgattttccttgggtctattttttttgtattttctactatatgctaagtgtatgtatctatgttatttatacataagacggatgttttttttttcgggctcggtcgaattgggggtggtggagaatagaactaagtaataactttgttaagaatatgt

SEQ ID NO: 145661 - DNA, 166 bp, Arabidopsis thaliana landsberg
aaaaacactcttattaactccatatcttccctttttttgttggttcgtcttttaggaagttctttttttttagctgttgagtcatttgtttgtactattcgcacatttttgtgttcttgaaggtgaagaactctattgaggttctttggtaaagttagattacagt

SEQ ID NO: 145662 - DNA, 337 bp, Arabidopsis thaliana landsberg
gaccaggtaatggatcgaaaaccgtaccagtaggagaaggagacggacccccatcgtctgatggaagctctatcaagttctcatttcctcttattgccttcttctccgcggtttcctacatggcaatcttctgagttactattttcccatacgcttttgtgccactcagattgcattctttatttgtccctatttattcacatttcgttgtgattttgtgtgatgtattttatgctctgtaaatccctactctccaggtgatattgctttgttgtaccaacggagagcattttggatctctttaccttttataataaacattactttccagaacaca

SEQ ID NO: 145663 - DNA, 324 bp, Arabidopsis thaliana landsberg
atgaatgtgtgcaaatcaagcaaaagtaacttgatttgttgggcttctttgttatacgttctccaaggtggttcaactaatattccaacattttttatattacatctttggtgaaccaatgttatcagaagggagcatgaaagctctttgtacttgttttgatcagtactcagtaggtattaatcaaatttgcatgatttgtggaagacaagtggtcagtggtggatatgttcttgttgagtcacaattaggttgaaaattaagggtgtaaagttagatttcggtttgagacctcgtctcaaccggtttgaacccaaattgggc

SEQ ID NO: 145664 - DNA, 365 bp, Arabidopsis thaliana landsberg
tttgcacttggcaatgttacagcgtttatgtttacatctaggattgtcttgtttgcttaccttatatgaaaagtcatctcgttcatatggattttttgcattctacattttagaaaagcaccgtttgccacttcaggtatgtaacaatgtgcacagctacaaatctttgcactgaacagatttggaataaagtttgagttaaagtgaatatatgacttggttaatcctacttgggccatcttgtggcctcttgttcatatcaagtaaaatgccatgacaacaacgttaatggctaagttagcattgcagcatctcctctgacttctgcagataccaggagattttttgtctcatcattccaaaat

SEQ ID NO: 145665 - DNA, 430 bp, Arabidopsis thaliana landsberg
tcttcagaataatgaaatggacttttaacattcattactagaatcttatccgatttttctttacaacaaaaaaatgaaaaaatataggtatgaatatgatccacatcaaattcggatccgaaacgaaagaagttcccgggtcattggagctccgtgttacaaaaaatctccagatttctccatgactccaaggaaaatctcacagttcgctctaaaaaaaaaatatgtttgggaattcaaaaatcccaaagaatcaaagattcatctaataaactctctcctccgtaatcttcgatgggtaaaatctctgtaaatcgatcaccaccggagaagccagagaagtcgtcggagaaggaatcaaacccgaaattcatcggaagcaaatccaaaaacgaaaaatcataatccaccgtcgatgtagcaacagatg

SEQ ID NO: 145666 - DNA, 334 bp, Arabidopsis thaliana landsberg
agattccactggcgtgtgctctcctcacttcactcgtccttgaaacttgaggtactgattctatctctcatccacatcttagttcatgttcgagtttctctggtctcttactctttcacctagaaatttgtttggtctcccaacaacataaacgcatgtatacattttcatgtgtctttgtaaggatattgattcatttttttgggcaaatagataatcaattcaatgctatgttttgtctgaaatgtgcagcttcaattacaaagaatggctgcttcaagtgctgtcaccgcaaactacgtcctcaagccacctccattcgcactggtacttt

SEQ ID NO: 145667 - DNA, 255 bp, Arabidopsis thaliana landsberg
tactctctctctctctgcaatgtcacaacctctcaccaccagacccaccgttaccggaatatctataatccctttccgacaaccgccgcctctctgttctttcctcttcgtcatcgttcttttcgtcgccactttctacactctccatcatccagacgccgttactcctcctcttctattttctcgaaatgcctataatgcccttcgtctccgccgcctcttcctctcctctgcttctaacgccaccatcttctc

SEQ ID NO: 145668 - DNA, 268 bp, Arabidopsis thaliana landsberg
acatgaggtgaaaagtatacgtctctatacatacgtctttacatatggatgctgccaaagaagaaggaaaagatatacatatgtcatgaaatatctcagtatatgtttgcgtttatgagattcttgtgttggcagttataattccttgttgtacaaattggtgaatataaaagatttgattgattcaagtgttcgagcaataagagtgattccaccaaagctttgtcagtttgttgatcaatagaaaaaaaaaatagaaaaaaaagga

SEQ ID NO: 145669 - DNA, 218 bp, Arabidopsis thaliana landsberg
gtgtgttgtcggttacggtgccgaaagttcaggagagtaagccggaggtcaagtccattgatatctctggttaagaggaactctgaagttggaaagcttacgacagtaatatgtgatagtgtgaaataaatggtgcgactttcctttcttctttttcttgtaatcaccaatctcgttgtatcaatataagtaatcgtaataaaagagtgttttgatcc

SEQ ID NO: 145670 - DNA, 232 bp, Arabidopsis thaliana landsberg
aacgacctgaggtcttcatacttttcggtaaaggactttcctttatccaaggtgatgattggattcgccatagacgaatcttgaaccctgctttctccatggatcggctcaaggtcttttactcttaactatatactttttctgtttgatttgaaaagaactaatatattgcttgcttaaaaatagttaggccatgacacaaccgatgggagattgcccctttcggatattt

SEQ ID NO: 145671 - DNA, 1037 bp, Arabidopsis thaliana landsberg
ctgaaacttgcattgaagggttataaacgttgtctggaaattggtgacaagtatgatgttcgagtggtacgttaatctatatttctgtgagatttgtgtataatgtaagatgtgaaacagtgtctggaattgatcctttatgacatgtcatgaagtgttaagttggcttttagagtcaaatatagaattccttaagaaactggttttaattgtaaggttacaacatctaatgaatctgcagatctatgtgttgctattgtgacttcatctctctctacaactaattagagttgggtttcattatattccttcgcatctatcaaggagtaactatggatatattagtggtcttcaatagtccaacctttcttcatttttcctgttttgggttgcggcggtttctaactgcttttcaacatttctcagtcgtgtttgtgtttgtatacttattggtcatatcaatctttctttggtttttttgggtacgtgatgaagtatatttgataatagcaccacatagattcatttaattccatgtgaatggtcgacctgtacttaggagtttaaagtttgtgactagcgcatacttatatatgccaggttatggtagagtgatctttattttcatataagttatacactttttatttgggaaattttgtcttacattatctcagaaagatatttaacgttttctctggccttttaaaaacatgtttgagattttagcagaaacgtggtgtattccattatattattaaattacttacggaacactgtttggaactaattcttctttctacaggtatttcggcaagtatccatgtggttcagtcttgcctcccagaaaaatgttattgataacatgttgagcaccattaaagaggtacttgactaatggtatcagattctatctgctatcgagaaggaattctttgattttccctccatttttcttgtttagtttataagcaatcttcatctccctaaacgttcttgcaggtccagtcctacaaatttataccccttgtttatca

SEQ ID NO: 145672 - DNA, 390 bp, Arabidopsis thaliana landsberg
gtttgtttgtacacactgagtgaaaaccagagcgattcatgtagttgtgacttgtgacataacaaaaagagaagaaaagataatccttcattagaaaataaagatccaatcagagtcaaagagatgagtttaagaaacattctacagtaagaagtccgacacccttaaaagactaaaccagatagaaacctaaaactgactccaataacaacttcaacaccataagaagctgggaagcgctatgtagctcaatcaattgtaactttccttgatggcttgggggtcctgtcagataatatcccactaggaaccgtctcttccatcacctttgggactgtgaaattgaaatctccaagcagtgcatacttgtaatcctgattggcatcgatg

SEQ ID NO: 145673 - DNA, 251 bp, Arabidopsis thaliana landsberg
caactctacagcctccaattctttgagttctctcttgtcttaagaccgatcactctgacttcacattccagtcttgaataccctagatatatactgtggaatgtgtatcctattcaattttaacattgtttgctattttatataatgtaattcctgttcatcttcgcaacttggctacttttagctacgtggaaatattatgaaactaacattttatacaattgtgtatgtcctcttcacgtcatttaaag

SEQ ID NO: 145674 - DNA, 1515 bp, Arabidopsis thaliana landsberg
tggggagaagcatattttcctttttcactaagaagaaaaaaatggcgatggcgagaagcatctcttacatcacctctactcagcttctccctcttcatcgtcgtcccaacatcgccatcatcgatgtcaggtataacataatcgatttatttccgtcgattttagtcactaatctgatcctttaccaaattttagttcgaatcaatcccgattattgttcttaggtttgattttgctctactatgtaatactgatatgcgttttaagagattactttacttttgaactctggggatcaattaattatgaacatgttttctaaaactggatattttgtagaatctctgtcgaaaaacaactattagggacctcatgagcttggaacaaaggttttgtggttagatgggctgagaaagaaacagactttttgtaatacttatataggttcttctgatacatagttatggcttaaacaaatttagactttttatgaacctattgtatagctcacattggaggaattgtatgtttttaagggatgaagagaggaattatgacgggcatatagctggatcgctacactatgcgagtggctcgtttgatgacaagatctcacatcttgttcaaaatgtcaaggacaaagacacacttgtcttccattgtgccttgagccaggtgtgtgttttacactcttttcacttccccataagatcttcttttcctcttttttgagaaacaacacataggttagataagcggcatcaattggctattcgtagaaggagatgtacatctctatgttatacatagttgattcatgtttcataggttagataagtggcatcaattgggttttcttagaagatttatatctcttatggtctacaataggtccttcatgtgtcaaaaagtggattcgaggtcgcaaaatccaagtgttttccgataagtttgcctactagtccatatattcttatgtatgtcatggagtaggaacttattttatattcttaaaagaaagaacaacgattagcttagctccccaaatcatcaagctcagtcttttagcaacctttgatttgaggcagttctcatttctttgttcctaacataaatcagtacttcgttgcactcaacatgaagtgattgctaaagccttgaaaccaattcttcctgcaggttcgtggccctacttgtgcgagaaggctcgtgaattatcttgatgagaagaaagaagatactggaatcaaaaacatcatgatcttggaacgcggctttaacggttgggaagcttctggaaaaccggtctgccgctgtgcagaggttccttgcaagggcgattgcgcctaaaccctactaaaccatattgggacctaattgatgttccacattgtcatgtactaaagttgaatgaagattatcataaataatctcttatcagtatgtttggtttacatggagcacaaacaccaaacttgcaacaacaatactaaaagggcttttatggtattgcac

SEQ ID NO: 145675 - DNA, 553 bp, Arabidopsis thaliana landsberg; identical to SEQ ID NO: 50962

SEQ ID NO: 145676 - DNA, 379 bp, Arabidopsis thaliana landsberg
ggtagaaacaacaaaacccggtttactctcggttcagctctttccgcttcatggaggaacagcaaaacccgaaaaaagccggtctactttcggttcacctctttttgctacctggagattttggtgaacactagtatgagaactcgtggccacgaagagagatgtatttcttggcccagattgcaatatcttctgcacaagcctgagcttgcggagtcctaagaagcatgtcgagggttgcaaactcgtgaaccgcgtctttgtactctagcacgggagcatctacgttgacctttcttagctcttctgagtaagcaatggctcggtctctcatccagtcatgctctgcgacaatggttagtgtaggtggcatgaactt

SEQ ID NO: 145677 - DNA, 257 bp, Arabidopsis thaliana landsberg
gtacatttttttttgtatttcaggaaactccgatggcggatctcttcggtggtgaccacggcggcgagcttatggaagcacttcaacctttttacaaaagtgcttccacgtctgcttcaaatcctgcgttagcgtcctcaaacgatgcgtttgcgtctgccccaaacgacccattttcttcttcttcttactataatcctcatgcatctttattcccttcacattccacaacctcttacccggatatttatcctgga

SEQ ID NO: 145678 - DNA, 339 bp, Arabidopsis thaliana landsberg
tatagattcataaaaacttttcttcagattcacaatctcatcacaacccttcaaaaagagaaaagatctaaagaataaacaagagccctaatatcaaatcacaaccaaaaaaaccaaagaaagctaattaaagttttctctctagctattcctcttcttttcttgttcttgaaaactagggtttacttcaccaaaagataagatctttccccagaaaaagcaatacccaagtcatgtttctgtgtgtctgtatatagataaaacattacataccctaataaggttacacaaatagctataaaagagggaaaataagatagggattttttgggtgaggaa

SEQ ID NO: 145679 - DNA, 492 bp, Arabidopsis thaliana landsberg
acactggccaaacaagccttattccaagccttgtcacttgaccaaccatcttcattgatccctcccgatcctgactcaccaaaacctcatcatcattctaccaccacttatgcctcaagcacagataacatctctaaattactccagaactggacaagctcatcatcgtcaaagcctaacactgtatcaggctccaacaaccggagctcaagccccggtgaaggaggactttttgatcatcactctttgttctcatcgaattcagaatctggatcagttgatgagaagctgaatttgatgtccgagacaagcatgttcaaaggtgagagcaagccagacatagacatggaagctacacctactactactactactgatgatcaaggctcgttgtcattgatcgagaaatggttgtttgatgatcaaggcttggttcagtgtgatgatagtcaagaagatctcatcgacgtgtctttagaggagttaaaataa

SEQ ID NO: 145680 - DNA, 235 bp, Arabidopsis thaliana landsberg
  unsure (1)..(235): unsure at all n locations
agatgagaagaaagttgttacgcctttaagggaaatgacgcccgaaaggattttcggaaagatgggtcatcttcaacggttacttgataggtttttgtcattgagacctactggtttagctaagaacagtaggatgatattgatcgcgttgtatcccgttgtgagggagagttttaagctgtatgctgatatttgtgaggttttggctgttttgttggataagtttttcganatg

SEQ ID NO: 145681 - DNA, 49 bp, Arabidopsis thaliana landsberg
gaattgaattggtacttggaactcgtgttaagtccgttgatgtgaggag

SEQ ID NO: 145682 - DNA, 533 bp, Arabidopsis thaliana landsberg
actggcggtagtagtgacaagacaatgaatagcaatagcagtaccaacgaagaaagtttagtcaacggtgaagctacaatcagctagtggaatgcaaacaagatcactgttcatatctgtgtgtcgtgagactcattacgaaaggaggagagtttcttccaacggaaccacaggtgcgacttgagaaatcttgaaaacttgagacaagacaagttgcaaatgtcttttcttgattttttttctaatgttttgtaattatgtttcttggcagtttcttgaagctgtgcatatatgttggcaagtctggtgtggaggaggataacatttttgaagacgtcatatgttgggagattctcagacatttcatcagttctttctgttgtcttctctcttgcaaactcattagtccgtttaggttacttgatatattaatgtttttgactaaattttatttgggatagatgatttttcttcagcttgtcaaagtttcccaatttttgttatgttccaagttattagatggacttggcaac

SEQ ID NO: 145683 - DNA, 406 bp, Arabidopsis thaliana landsberg
atgcagaatggattctcaaatcaaacacgccgtggtcgtgaaggtcatgggtaggactggttctcgtggtcaggtcactcaggttagagtcaaattcactgattcagaccgtttcatcatgaggaacgtgaaaggacccgtcagagaaggagatgtcctcactctcctcgagtccgagagagaagctagaagactccgttgattccaccatatcccaattctctttcaaaagtcttaccaagatttacattttgatggtctcttgtttcttggcattgtagtcaagttctcttttctttttctactgctttgttttaattacttgaggttttgttaagacaatggttgaaatctaggaatgaatcttttatgacgcaatgaaaatgtgccatcagtaatttcaatc

SEQ ID NO: 145684 - DNA, 88 bp, Arabidopsis thaliana landsberg
gtgagcgtcccagagtcctccaactaatagcctatcaatggattatcagacggcagattctgaaagtgtgttgaagagacccagacct

SEQ ID NO: 145685 - DNA, 235 bp, Arabidopsis thaliana landsberg
atatctctgtacaccaaagaaccctaaataacttctcatttctttaagaaacctaatcttccagatggatatgtcattcccattagataactccatccatgtcctgcatcacccccacgaaagacaacattggaggatctgttcattaggtttcttctagtgaattgccattattctcatgtaatagctgaagacattcatatggattagcatagaagtagtcttcttctttcgg

SEQ ID NO: 145686 - DNA, 433 bp, Arabidopsis thaliana landsberg
ttttggtgctaagcttaatatattcctcaatatataaagaatatatatggaggggtgttgttcactatttccttatcaacaagtatctcgctataacacaagctaaattcgagtcaaatctccaaagcgtcactggctccttcattcccatcggtttcctacatgcttccttagccctgcttgttcactgatgatattcccagctctcacttgtccactgatattgttcccagctgcagctctcacttgcccactgatgatgttcccagcagaagctctcacttgtccactgatgttagctttcacttttccactgatgttgttcccagctgcaagtctcacttgcccagctccaactcttgtaaagaataaaactttgtgtagctgtagtacgattttcaacaagtccatagtagttgaaatctccttcttc

SEQ ID NO: 145687 - DNA, 288 bp, Arabidopsis thaliana landsberg
ctgggtcttgaaagttttacacttttagggttttttacttttaaagtttctctcttttctaatggattctctgggtaattgatcgattagggtttaagattttagcggtggggaaagctgtttggttctagaattctatcttgattaacgtcacttgcagctttctcacaggttttggaattgtactaggttttgattgataatcatagattggtagtgatttgggagtttcttgattgtgtaatcatggcggaggctattggtgctgtatctttggtgggtcatcga

SEQ ID NO: 145688 - DNA, 326 bp, Arabidopsis thaliana landsberg
attgaaaaattatgagggtactactgaataattggaagtcataggtgatacaagaagaaatggtacagcaagaaaacataatggtcatattagtcatgacaaaaaacacttgggtttaagctttttgttatgacttgcaaggacactcaacaatagccacgcgaaagaaaaataatccaaaagaaaaaaaaaagagttgaagagagaatctgagacaagaagagctaatacacatccacttcaataattcattcaccattgtcaaacggttacagctttctacaacttcagctcgatcacgacttacacatcatgcttcactgcaa

SEQ ID NO: 145689 - DNA, 768 bp, Arabidopsis thaliana landsberg
cttctccatcaaaattcaccaaaacatggaagctctaattcaccacttcactctcctctccgatcaagctcttgtcgacaaaacattcgacccttcaagaatcgaggacctcatgcgtctctttgaagtcgattcatacaaagcttgggcagctctcgaatccgaacagcaacaagaactcgaagaagctgaagaatctctccgtgaagctgaacttgaacttgaatcggtaacattttcgtcttttcttgtatggaattttcatagatctggagagatctgatttttatggtttcttcagggatatggagtgggggatggaggagtataggcggacgttggaggagatggagaggatggaggcggcggagctgaaagagcttgaggagaaagcggagactgctcggagaacgggaatttaatggagaaagcgcggcaattgccgcgaaacgacatattgcggcggcgatgggatcagccgccgcgtctatgagatcagcttggaagactgcagctggaaataaggttcatccatcttgatcgatgatgatgatgatgaatatgataagatgacgatgattgtcaaagtattggtccccatgttataggattagtaggtcaagaacattttaatgaataattatttcctttgataaacatatgggttactacttactattgccgaagaattatgaattataggtagtttctagtttatgtatctgtaatttgtaatcaatatatatttatgggattataggaagtcgt

SEQ ID NO: 145690 - DNA, 577 bp, Arabidopsis thaliana landsberg
tgaggatgctcttgtgaatttgagtattgagaagcaaacggatggaacattgagtggttacataaggataaggagcaagacgcaagggattgctctaagtcttggagacaaaatcaccctcaaacaaaagggtggtagctgaggttagctaatcttttggaaacattttctatctctcaatgcaatccataaatgtttgaatccttaaacttttaattggtctaattttcattaccataacgatgatttctcacaggcttggaatgatagcgtgcaaggtaaaaggtaaaaggtttaggctacgtttctctcttgagcaatttttcgttggttgattctgtttactacatggagagaagagtcgtttaaaggatatgtaaagagtaatttgttattattcttcctaagccggtatattttccggtatggtaccgatggattcttcctcaaccggctgtctttttacagtactagacgattttgttttatttgtaatactttttcttctataatcttgtttatcgaggagactgaactgttgaacgcgttatcaatagtagatttcaaagttacatgg

SEQ ID NO: 145691 - DNA, 451 bp, Arabidopsis thaliana landsberg
gtgaggcttctacatgaaaatatggatttggcgagtgatattcacagaaagcatcaaagccctatagagtcaaaggtgaatcctccttcgtcaggttgctgttgtgtgagtagtcagaaggacataccatcaagaatattaaacttcaataaggtttttcactattatctgacttcccctattttcctgtttgatctatactggactctgcccacaatctatacttgtcttgcacatttggtttcttgctccactcctgagtgctgaacactaacttttgtgtgtttatggtatatttggttggcacattgtgacaaatattaccggagtctgcgcacaatattgtgtctgtttcttggtttatttgcacagtttcccttatttaatgtttgccatttattaagtttacaaaatcctgaagcaggattagattgtaaagagagaatacagg

SEQ ID NO: 145692 - DNA, 73 bp, Arabidopsis thaliana landsberg
tgcttagttagagatcgctaaagggatttaggtcagtgtctagctttgcttgaggatttctatcacgggagtg

SEQ ID NO: 145693 - DNA, 801 bp, Arabidopsis thaliana landsberg
tgattgttgtgaatgagatggttatgagaggattgagaatgggtgatgaattgagacaattctatgaaggaaatgtgagatactatgatgatgatgaagatagcttagtacaatcagagagagagtgttacattgagcagaagcttaattgattgcagctcaagcttaaagatttgtattgtggtgcagagaaacagagcttaattggatccataagctcttgtttgatagggtttaaatcatggaacaagaagatgtgaatgtgaatatatcgaaactctgcatttgttgtatctgctttgtttgtggcattgttggattcagtttgaagcatacatgagctactttagtctaaagttatcgtcgggttttcttgagatgttgaattgagcagagggaatgaaggaagctcttcacagtagaaattattacctttgtgctgtttttaataatcaaatgaaaacgtgctctcacaaaaccaaaagacacatttaacatcttaaaccatgttacttaactaatatacctcttgagatttgaaatgattggatcatataatcataggatacgtatcaccgtaccatgccatgttatttccactaatgttggaataattgatttatgacttgacccacttatgcattaaagggttcatcgtcagctacatgccagctctttgcactctatgtatgagtcattttcggtccttttcgtattctttatacccttaccgggttccaaaaagaaaaatccaatataagaaagctccatttattaaagaaacttaaaagtaatgtacta

SEQ ID NO: 145694 - DNA, 173 bp, Arabidopsis thaliana landsberg
gaatctaccattaacgacccaacctttgaatacattgaagttgtttgttgaggctactattcagtacatcaagcgatccatatcgtatctattggctcatggaggttggtttatactgataaccactttgttagtggtatctggtggtttgcttgttactgttgatggacctc

SEQ ID NO: 145695 - DNA, 410 bp, Arabidopsis thaliana landsberg
ccacaaccccatcctaggcctaagcttgtctttggcctttgagaatttcgagaccaacactagagtacactttataacctctcaagttcctggttataaacttaaatttccaggatttgggacacttaagtaactcagtcacttcgcacataccattcaagcggatataatctggatttattggcttctcatagtcccaaccatgcatctctaactcaatccctgtctttttgatataggaaactaggcattgatatatggttagatacatggcaatacatgagtggagacagtagctgtgagacgtggcaagagaagattggtcgatgggagtgttagaggaagaatcgagatgcagagatatatagctaatgaggatcatttgcagaagaatatgaagattttggatt

SEQ ID NO: 145696 - DNA, 145 bp, Arabidopsis thaliana landsberg
ccctgccggaatgtacgttgatgaggatggtcagctctcatggttcaatgcaggagtcagagtcggagttgggataggccttgggatgtgtcttggtgtaggcattggagttggattactcatgcgttcgtatcaagcaacaact

SEQ ID NO: 145697 - DNA, 56 bp, Arabidopsis thaliana landsberg
gcgattttaaggatcgatctaataaaattaccttccgattcttcatctcaggatcc

SEQ ID NO: 145698 - DNA, 164 bp, Arabidopsis thaliana landsberg
tactcacttccactcagccgtcacagctcagaaactccgtcgattcaactccttaatcctcctcctccgtctcgcttctttctccttctctctcgcttccgccgtctttatgctcaccaattcccgcggctccgcttctcctcactggtacgatttcgacgctt

SEQ ID NO: 145699 - DNA, 166 bp, Arabidopsis thaliana landsberg
gattaaaaaccttttctgaaattgatgaagtgtgtattgttacaataattctagctggtatgacttaatcatggttacatttctatttctatgtaaaaaaatctgttatgcatcaatgtgtcatgtaacacttctcttgaggcaaatataaattatttgaattttt

SEQ ID NO: 145700 - DNA, 137 bp, Arabidopsis thaliana landsberg
cgaggtctaaaccggtgggctcgtgggtcgtacctgtctctgacggcagggacgcactcacggttgataaccgaaagccatgaacaggaccgcttccctcttcttgaactagacccatagctatgagacaaaagatg

SEQ ID NO: 145701 - DNA, 232 bp, Arabidopsis thaliana landsberg
tctcaaatcgtctaattctctctctatctctctctctatctctacgcttctaaattttattatttcttaagttaaagaaacagagattaaaaaataaaaagccttctcgggttgtttaaaaatactgtttcaccgcagtaattaatttaaaaattacctgtcggtgacgtggcatgcacttaaaaagaaacagccatgaatacaaaaacgatgcgtctttccccacgccgag

SEQ ID NO: 145702 - DNA, 447 bp, Arabidopsis thaliana landsberg
tttctctagttattacaaaggctcttcttttcttttctatttgatcatgaattctatgttcagtgccttcgactctctcttcgcagaggtcatgggaaagaaccttatggcttcttcgtttactgctactaccgcaacaaccaaacctgccgccgcgccgcaaacacaaacgcaggagaaggcaaacgcaagtagcaagaagataggtttggtgcagaagactccgaggtttgctttggagcttgatggtcttcactgcttcgaaacaatagtccgttcttgatttgattcgttcttggttcttggcttcaagatcagaaacttagaatctgagtttcttatatttttatttattttattaattcattataacatgtgattgtgaatacgttttggaattttgatattgatcgatttgatctaattatatatttcttggattctccg

SEQ ID NO: 145703 - DNA, 609 bp, Arabidopsis thaliana landsberg
tgtgacgcacaatggactagtagtatcgtgataagtacatctaccacacgaaacgaaacgaaaccagaaagacatgttcctaaattaccaaacaaccccttcgtctcttacatacaccatttctcgatgatcaagaagcaaattcatgaatccgtaagccacacaataataatattaataatcattcactaatatataaattaaaagatgaaaaaaaaacgtaaaaaaaaaaattgaggttcagattttgatttgaggagaggaataatctctctgatcttcttttacaacacatcaccaaatcaaatccatgtctctccgaccaatctctcttccgatcggagcttttgaaccaccacaagtttttcaacggttgagatcgaatttttaattttttaaactttgaccattttcgcagccttgaccaccggattttctctagcgatcgcctcacgaccagcggttttgtagtcgtagctacaatcatgacgatcggagtaacggtgctctgagcagaaaagctcaccgcatcggcacctgaatccggtcaacccaactttcttccgacaaccagaacatcggtttacgatctgttgatctctcttcttc

SEQ ID NO: 145704 - DNA, 173 bp, Arabidopsis thaliana landsberg
tcatatacaaaaaaaaaatacaaataaattaataatgggatcatttgatttcagtatacacatgggaccatgttctttaaaagaaatttatcttctcttcactccatggaaacagagaaaacactctcaaacacacaaacaaacaaattctgcagatgaatttgaatatacca

SEQ ID NO: 145705 - DNA, 117 bp, Arabidopsis thaliana landsberg
cctaaacctgtgctacaaatttgttgatggcagagaacctttgagactagaacttgaacccattgttcagatctcttttcgtgctaatctcctagtttattgaagataaattgattc

SEQ ID NO: 145706 - DNA, 115 bp, Arabidopsis thaliana landsberg
gctcttgacatcgccggctatgaagcagaagccggcggtgataacttctcctcgccgtggttcttctccttctcgtcgtcttctagtttcttgtgttaccacaaaccctgctagg

SEQ ID NO: 145707 - DNA, 412 bp, Arabidopsis thaliana landsberg
tctcccaacgttaataacaaatcacaacccattccacttcatggaatcatctctccaactcaacggcatctccctcactcccaacctcatccaccaaaccctcctccgtctccgtcacaattccaaaattgccctctccttcttccaatatctacgctccttaccctctccttcaacaacaccaacctctttcaatctcatcatcgatatcctcggccgtgttcgtcaattcgacgtcgttagacaacttatagtcgaaatggatcaaacttctcctgagaccttcttaatcctcgttaaacggttaatcgccgccgggcttactcgacaagcggttcgtgctttcgacgatgcgccttgttttctcgagaatcgtcgtttccgtttagtcgaattcgggtttttactcgat

SEQ ID NO: 145708 - DNA, 621 bp, Arabidopsis thaliana landsberg
agaaacagctctttgtctctctcgactgatctaacaatccctaatctgtgttctaaattcctggacgagatttgacaaagtccgtatagcttaacctggtttaatttcaagtgacagatatgccccttattcatcggaaaaagccgacggagaaaccatcgacgccgccatctgaagaggtggtgcacgatgaggattcgcaaaagaaaccacacgaatcttccaaatcccaccataagaaatcgaacggaggagggaagtggtcgtgcatcgattcttgttgttggttcattgggtgtgtgtgtgtaacctggtggtttcttctcttcctttacaacgcaatgcctgcgagcttccctcagtatgtaacggagcgaatcacgggtcctttgcctgacccgcccggtgttaagctcaaaaaagaaggtcttaaggcgaaacatcctgttgtcttcattcctgggattgtcaccggtgggctcgagctttgggaaggcaaacaatgcgctgatggtttatttagaaaacgtttgtggggtggaacttttggtgaagtctacaaaaggtgagctcaacaattctcactcttcctttatattgggatttggattggatctgatg

SEQ ID NO: 145709 - DNA, 55 bp, Arabidopsis thaliana landsberg
taaagggatttaggtcagtgtctagctttgcatgaggatttctatcacgggagtg

SEQ ID NO: 145710 - DNA, 485 bp, Arabidopsis thaliana landsberg
tttatcgtaatcaaaatgttatggccttgtcaattacataatcataataaaattgcattatagatgaagaaactgaagctacaaattacataagacaaaagaaaaaaaggattccttaaaatgaaaactgtggcatggtcgagcctgacaaaaaaccgcaagctggaccgacacagagagactaatacaaaccataatacaaatattaacatacgaaatttaacactaatccatatttaattaattactcttgggccagtcatgcaatttcacaaaaactccattgcaagcggctgaatttcctattttgcccctaagctagaatcgaatcccaatcgatctcgtacgacggatacttctccaacgagaacgtctcgttccactgcggcggctcctccgggtcagcgaacgtcaagtccgacaacggcgaagatccagcggtggactcttcaaactccgtcaccggtggagatcaccgatcgaga

SEQ ID NO: 145711 - DNA, 163 bp, Arabidopsis thaliana landsberg
ctccagtttcatagtcactaacctaaaagaattaatggaggaaactcggaggaggtttgtcatatcctctgttctaagtgtttctttgatctacttatgtctttcgacatgtcacgtttccgccttcgacttcggtagaaggcagctccgggttaatactgat

SEQ ID NO: 145712 - DNA, 970 bp, Arabidopsis thaliana landsberg
caatcatttcagccaccattagagccctcttgagagattacagcaacgggtatgcgattgaagaaagagatggtgctctgtaccttggttggatggaccgaatcttggtctcatcttgtgcatggaagtgaaagaataaacgtctccaagaatgtaatgcaaaagacagaactggaagtaatagatagttttgtctcataaccattaataaggttgaatcaaatcatatacatcccatgctacaactattacacaggctccatcaacaaagaagggctcttgttgtgttaccttctcttcctgtaactcttatttgaaccaaatggaagtggttacataaaggtattaaagcatactattccattaaacactaatctaaatctggtcccgcctgaacaacaactgtacagtctataaccatatcgcctgtactaatctatgttaaaacagccatataaattaccactcggtacaacactgaatgcttagctttgggcaggctctgtcttgggtttttgttcctcgctctccagggttcctactgccttctcttgacaaacagtggttttatcatctgactttgcttccggcttggcgtgattggctgcgtgatctttgtttgcatctgatctctcttttatttcctccttcagcttctcatccaaaactggaccttgatcaagacttttctcaaagccattagtcttcgttttctttcttaagtgatcttcgacatgctggtcttttgtaatggattgaagagttgagctctgtggagtcttgttggcatctccttctttatcatcaacttccgagtccagcatgttattatgagtaacaactcttcctgtaggcatatcgtggtcgtgttttccctcgtaagttgttataagcaactttgtgtcatgagatgacctctctacgtgtttcttgacggggcatccagggcttgaacatctatagtagctcc

SEQ ID NO: 145713 - DNA, 360 bp, Arabidopsis thaliana landsberg
cgaaacgaaacgaattatggatttgaagaaagcatctttgtttttattccttcttctctgtctccacctgcaactgcaacaccactttgctcacgcggtctcgcgatcttcaacaagtttagccttcgttgatccaaaccatgatgatctcccgtttcaagaagtagaattgaagccagacggtgacgtaatcgaagccaatttaccgaaattaacagtcgttgttaagaaaggcggcggaggaggaggcagaggtggaggcggcttcggcggaggaggacgcagtttcggcggaggagggagttctagcagaggcggtggaggaagttctagcagaggcggaggagggagttctagcag

SEQ ID NO: 145714 - DNA, 146 bp, Arabidopsis thaliana landsberg
ggttctgtttctggaaatttcacttttttcacttttttgggatcacatttagcttttttggttcctttattttgtaacgccatttatgcgttaaacttgtgtgaagtgtttgtttggtctgagcaggagatggtgagaatctcact

SEQ ID NO: 145715 - DNA, 325 bp, Arabidopsis thaliana landsberg
cagtgttcagacacttcgtcaaaccgaaccaccaaagatccatggaggattacatgtttcagttattccaccagctgatgatgtgaaaactgatatttcacaatcaagtaggataacgggggacaacactcacaaggattataatagtcctaccgcaaagcgaaggtattgatgattgatatgtcggtttgtttttcatggttctggaggaagacttcaccattggtgttccttgttttttcttcttatgttgatgtcacaaatcaaggaagaaaggagggaacattgagctgagtccagtggagaggtcaaccaatgattcacg

SEQ ID NO: 145716 - DNA, 331 bp, Arabidopsis thaliana landsberg
tgcagattcccacaaaccaaataagaaagatcaattttgatgtagaattttgcttctttttcagaagaaaagtctcagcttcactgattcgaccgttgattcaatttctatggcagttcataattttcagaacgttattacaatcttaagcttttagttaatacttaacactacgttgatctgctttgattttgatataagttttggttccaattagatttcgtgtagttttcttcacccacccactactatcagactatcagaatctgaaagtaacccactttaaaaattgacgacacacgcaaccaaacacaaagcgccaaaaaataag

SEQ ID NO: 145717 - DNA, 185 bp, Arabidopsis thaliana landsberg
tcatcacacagctcttgaaaaccatcttaaagcaactcaaagctcaaatcgaaatttctagtttctctttatcatccacgctaagtgttcaatcgaatcaagattaagtatggcagaagagtacaagaacaccgttccagagcacgagacctctaaggttgcaacagaggaatcatcggcgccag

SEQ ID NO: 145718 - DNA, 212 bp, Arabidopsis thaliana landsberg
tttttacaaaaatatcaccggaatagaaattaaaaacaaagattctttaatcaatatcggtctatattaatcatttttataattggattaatattttcttaattgttagcactatcagatgagttctaactgatttttgcatgaaagactcggttcatgtgcagatcacgctttgcttattttgtaattcacttcactgattttgtaaaaat

SEQ ID NO: 145719 - DNA, 481 bp, Arabidopsis thaliana landsberg
ctgaaacaaagaaaataataatccaatctacttttatttttgcgtacatctctctccatcttccattaaactcttaccctttcttcatcacttgctcttgaaattttctctcccaaaaaaggtcaaattccccacttgattccacttcccctttcatgggtttgcgtttgaattgtgtttaaagactttatatttgatcatcagattcaaattcttcatcaagatcgttgttttctctgaaagttgttgcctttttgctatggaggtattagggttctacagtgtatgaattggattcttcagctgttgttgttgatgggttcagttttctttcttgattgagtttgaatttgacatcaaagttttgttttttgctttgtgtgtattcagggatggtgttgggtctcgctgagccattaaagttgttgtctttgttatggatgaattagggattaggattttgagctgttgttgttgttga

SEQ ID NO: 145720 - DNA, 651 bp, Arabidopsis thaliana landsberg
accctcctctctccgcccgcactaggtctatcatctcctcttcttctccgatctgatcctcatactttcaatttgttagaatcgcgtgatttcgaagtagtttttgtataacctaatctaatcaaatagatcgattctgatttataggttaaattgtaattgtgcgattgtgagaaattgttgttgttgttgatgcaggatgttggaatcatcatataatttgttgtttgggaagcttgcattgagatgtctatttgaggattactttgaagaagctaatcgattcacgggcaagtttttgttgaagcctactgatgatcctcatgtggatttggttgcatctgtatccaattttgaaatctcttttgtgttatttagtttctatatagtgatgattcgagaagtttctctaaatggatgtattagggatatgtagaaaatcagaattttccttaatagtctaaaggtttcgggtgctgtagatggtagagtggaaggagattttgttgggaatgcggagtttcgctggcaaaggtatagattctttagtttttaatctgaaagattacaagtagttgttggagaattggaatactgattagtttgtttttgataaatatgcagtgatgttgatgatcctcatacttttgt

SEQ ID NO: 145721 - DNA, 187 bp, Arabidopsis thaliana landsberg
taattttttattatttattattattatttattattaatataataaataaagtaaaatatgatactctataaaaatttgctcatttttatagaaaaaaacgagtaatataagccctctttcttatttaaagaaggcttatattgctcgttttttactaaactagatctagactaacactaacgaatta

SEQ ID NO: 145722 - DNA, 266 bp, Arabidopsis thaliana landsberg
aaatcgagcgacggcggcggagacgacggagatgaacagaatgagatgggtcggagagggagacatctgggacctcgatatgtcaactccggtgacgctcgagggcaccgcacgagctattcctgacgatcctcttcctctaggtctctctagaggcactcgtctatctcgccctaagcaagttgagttcttccaccgcttcatggcctcacctctcatcccttccttcgtccctatccgcccaacaccggagatggaagcggtgg

SEQ ID NO: 145723 - DNA, 100 bp, Arabidopsis thaliana landsberg
tgtgtacaaatcaaccaaaagaatgaaaccaccactactatattattttaatctattgtgtcctgatattagtgagaataatagctgatattttgattga

SEQ ID NO: 145724 - DNA, 712 bp, Arabidopsis thaliana landsberg
ttcgttaaaatattctctatttcttcgaaagtcttacactttgcacaacatttcagtggaaaagtaaaaaagacaaaaaacacaagtgaatttaatatcaccaaaaagtattacatggtcaaaagagaaaattaaaaatcaaacgaggacctctttgtgaatatgcacacttaaataataaaattaggaaataatcaaacattcgttaattacggaatctacccatcccggcgaaaacgccgatcaaatcttgcctgtaaggtaagtaagactttcttctcttatccacatcaggcttatacgccgccgttttattcctccctttcactaccagagagccgtttccactcgtcgaaatcgaagatccctcgccgccgccgtcgctgtggcttctccttagaagatccttgaaactgcaccgtttagttgcgctcacggtcgaaacggctccgtcgctgtggcttctcctcagaaattcctttatacgacaccgtctcgaagatcctttactcttcaagctatcgtctctagccggggatctgatcggactccagaaacagtagaatttgctcggagaaatgttttccgaatcgtcagaatccgacgatgaaattgattccgacggcgaagttagagatggaggatcaacactccatccaccgtagaaaagattcttcgaggtgactcgatcgtctgccacgtcatcgtcgtc

SEQ ID NO: 145725 - DNA, 438 bp, Arabidopsis thaliana landsberg
atcaattactctactctcgtttctctctctctctcagtctagaagaaccataattacggattttgaaatttggggattctatgagattcttcttcctctttggttaaaaacctggagattatcgttttccaattctagccttttcttctccccttaatatcttctctctgattctcttccgtttcgttttctctattccccgagatcttttggttaaaggaagataaagtttgaaacttttttattgtttcactaggcttgcgttaatggcgacagttgtgtgatggtccagagttagcaagttttacttactcgtttggttaaaaggacagagagtagagggaaaaaggctttgttactgttttttttcgtctgcacattactatggagtttcacggaaccagtcaaaatcacgatagctctgaaacagagaagaag

SEQ ID NO: 145726 - DNA, 441 bp, Arabidopsis thaliana landsberg
atgttaaagagaaaaaaagtaacccaaagagagtttggttgcaaatgcttgtatgataatttaccttcatgaacaattcctggagctgccactgctattattattattgatgtcttcgatcatcattcctttcaaactcttggccaaccaaatagcggtctctcgaggcgaaactttgttcttcccaaacggctgcaacacaatggctagctcttcgagcctgctctgttccagcaaatccgcagatagttccaatagaccttcaagcgcttctgctctctgtctgaacgacttgatgtccaacgtctctttaacaggtggagtcggagttgtttcctcttcaggcacgaatgagttagttctggtctcagctggtgaagaatccgagcagcagttaaagctctttgtttctgagtaattggtgatggggtctggttcttt

SEQ ID NO: 145727 - DNA, 322 bp, Arabidopsis thaliana landsberg
ccttgcttgccgcctccacaatatacttctccgctttgtctacatattgaaatggaacgttttcgataaattttacatatcaaaaaataaaaataaaaataggtcagaggatgaattaatggattggttacctatagtggcaggagtatcgttatagacggtggaggattggacgattgtaactcgcacggtggtggatggggcaacgccgttaaaaggagttgcgttttggacagttgacatatctttagtactagacatatcaactcgagtctttgatttatactttggttcatgacactcagagacttgagagaagcaa

SEQ ID NO: 145728 - DNA, 154 bp, Arabidopsis thaliana landsberg
cgcttcgattcaaagacaggttttttcttttgttccctgagagatcgaatcgaagaaatcgaaatttttgtacttcgataaaaatctgtagtctctatagaaatcggagaagatggacaacaaaaacgtcgtcgtttgcgacaacggcaccggt

SEQ ID NO: 145729 - DNA, 71 bp, Arabidopsis thaliana landsberg
aaatttgagtaccaagagagcgctttttcatcctaaagagatcttcaaatttagatttcaacacataaaag

SEQ ID NO: 145730 - DNA, 102 bp, Arabidopsis thaliana landsberg
acgtaaaaacataagaaaaacagagtaaataaagtaatgcgccgattgtcgacggagagtatgagatgagaagagaaattgatattgatattgttgttgatt

SEQ ID NO: 145731 - DNA, 277 bp, Arabidopsis thaliana landsberg; identical to SEQ ID NO: 50638

SEQ ID NO: 145732 - DNA, 245 bp, Arabidopsis thaliana landsberg
tgaggaacacaatccgtgatgagaagattggcgagaagcttgctggagatgacaagaagaagattgaagactcaattgaagcagccattgaatggctagaagcgaatcagctagcagagtgtgatgaatttgaggacaagatgaaagagctcgagagtatttgcaacccgatcatagcaaagatgtaccaaggcggtgaagctggtggtccagctgcaggaggaatggacgaggatgttcctcct

SEQ ID NO: 145733 - DNA, 247 bp, Arabidopsis thaliana landsberg
aaacatgtatgacagacatctttcttcgtataaaccacccttcataacaccaacacacaaatacacacataaagaaagcatataagcagcagctttccctcctcatcttaagctttgagcatccgtagataatcatcgatgattgacatcgcagatgatcggtagcccgagccaaacaggttataatggttcaagtaatgatagagcaaatacagatccctcctcttctcatatcccgcttgttttg

SEQ ID NO: 145734 - DNA, 179 bp, Arabidopsis thaliana landsberg
gtgatggaattcaacgaaacaccgtgatcatcgaccattgatccgtgtcctgtatctgaactgaaaccggggaagatgacaaggcaatgcaaggaatataatttgtaaatttggctttgttggtttgtgaatattttcatttacaatggtaaatatatgaagcagaaaaggagaaactg

SEQ ID NO: 145735 - DNA, 567 bp, Arabidopsis thaliana landsberg
cgtaaacccaagaatgacaccgcgaatcaagttaggccattgccagagctggtagccgagccaaccgatgcacgttccatgtcatttgtgggcacacacgagtacttggccccagagatcatcaaaggcgaagggcatggcagtgcagtggattggtggacttttgggatattcctttacgagcttctctttgggagaacgcccttcaagggctcaggaaaccgacaaacactgttcaatgtggtgggtcagcctctgcggttcccagaaacgcctgtggtgagttttgcagcgagagacctcatccggggcttgctcatgaaggagccacagcagcggctggggttcaaacggggagctactgaggttaagcagcaccctttcttcgaaggtgtgaactgggcattgattcggtgtgcgactcccccggaaataccaaagccggttgagctggaaaagggacctgtgggtgttgcagaggcaccatcaagccagaagacagcagctggtttggttctgaatgctcagaaagggtctgataactatttggaatttgatttcttctag

SEQ ID NO: 145736 - DNA, 829 bp, Arabidopsis thaliana landsberg
aaatgagcgcgacgcagacgcagacgcatggaccgcactcgctggccttcagggtgatgcgactctgcaaaccgtctttccacgtcgatcctcccctccgcattgaccctttcgatcttctcgccggcgaggatttctccgacgatccctcttccgcctccttgttccgccgccacgtatcttctgccgacgctgtcgactccgatctcagctaccgaaatagattcctcctcaaccatcctaccgatccaatcggtctctctggtcttctgcttcttcctcagtccttcgggttctctctctctctctttcgtttctcctgcagatttttgccctatatatatatatatattgctgtctgattctgattgtttatttggttgcgcagagcgatctatctcggagaaacattctgtagctatatcagcgtcaacaatagttccacttcagaagttcgggatgttaccattaaggttcctcacctgcttccaacattttgttttccttgaaatctgaaatctatctactaatcgatggattatcactaagattcgtcacctgcgtacttcatatatatgtatatatctttcgttttttctttgggtcttgctcttatttcactcgttcacttcaatctctgctgtggaatacttctaagaagtttttgttgtctgcttcgtcttggaccttgaattgcaaacgtcagaaccaaaacgatgctaagctatgtatctcccatgtattattattgtaggcagaaattcagacagagaggcagaggattctacttctggatacatccaagtcacctgttgaatcgatacggaca

SEQ ID NO: 145737 - DNA, 808 bp, Arabidopsis thaliana landsberg
  unsure (1)..(808): unsure at all n locations
atttcacggaaaatagaagcgtcgagttcctcctctccctcaggttgtcaatggccgctaggttacttgcttggagacgcgctttgtctcttttcagcaaccaacaacatcgttttcctttgtctcaaggtttcatctctctccttctcaactttgtcatctttaagaaaaattaaagagttattgaaaatcgggcactagagttaaactggtctcttaatctgtgtaatttatacttgccttgatgtttcttttgatgaatttggttgagattcatgtaaatttgtggtttttatgtttgaatttacactagaagaggattttggggagattttggttttagggttgtttttgtagcttttagagatttggggcattagtgatgatgagtactcgtattctcatgtgtatatcatctaatatcgtctttgctctgttacattttggagttagagaagtgcttctacgaaacctgaagttatgaatgctcacataagtgctttgtcttcaacatatctctatgcattaagcagtagctgtgaacattggcatttcagctagacgctggttaagttttcaagtttggttatatatttcctgactaagatgtgttagcattagtctacggtttgatgcaaacattatcctaggaggttcctatgatgtcctgatatggtacagactgttttagcttcgtgcaactacaactactgttaaattgctctttcttgattatctttctttttttgaaaatagtctcaacagagcagttgtcgctatcaaactcactcttcagcagangtcatgt

SEQ ID NO: 145738 - DNA, 187 bp, Arabidopsis thaliana landsberg
tcacctttactttcacaaaatatgtataagatttgggaatttgctaaaacaacacgaccaaatcaactcattcacgcttctagggtcgtgtagtaacagaagcaacacacaaactgactcttgtttcacacacaacaggttaaaagaccttctgacagaatataatgtctggtttactaagctgaga

SEQ ID NO: 145739 - DNA, 426 bp, Arabidopsis thaliana landsberg
tctccgccgccgatattctcacgccggtatgattcgaacaacattcgcgaccgccatcgctcatttccacacgcattctcatggaggagctcaagctcgtcctctacagaacaacacacgagaagtaatccattgtcctgaagcttggttagtcaaaatcgtatctactttgttcgtgtacagagttccagattcagatctctgtttctgttacttaagcaagaatctaaatccgtttatctcctttgaggttgtgaagaaattggataacaatcctcacatagggtttcgattttgggagtttagtagattcaaattgaacattcgtcattcgttttggacttataatttgctaacgagatctctttgtaaagccggtttgcacgatttagccggtcagatgtttgagtgtatgaagagcgatgg

SEQ ID NO: 145740 - DNA, 275 bp, Arabidopsis thaliana landsberg
gttttcttctagtatgaggtttggatttggatcccttaacatgatctactccttttcaaattcagtcttgattattgtgtgttcaagtccttttcatatgctttgacatctttctaatcatttgtacaccaaaaggcttgagttttcatgcgtatggattgtttggagactgaaatgagaggttagtgaaagatgtaggtaataagagtacacatggatagggttttgtcaagtgtaatgggtaagttacagagaggctcaggtcatatcctcag

SEQ ID NO: 145741 - DNA, 762 bp, Arabidopsis thaliana landsberg
taaagataataatacatttcttggaattagtttaactttcacaagtttacaatcaaattttttaaaaggtttaaataaaattacacatcctactgaatcatgtttctgaacgattttatacaatacatgaactagtgagacaatgagttcttcagtggcgttgtggcgtgtggaattcccaaccatcagagcatccaagctcacatccatcgaagcacaacgtgagccacggcctctgtccacaaatcatagctgtaaccgtctcttttcgacccgcgaatcgtgtttgtcccattccgagccaatgcagacccgcaaaagacggcttgcttaaccatctcagtgctccagtagttaagctcacacagttatggacattgagcttcctcaattgtttgcttcctccctctgcttgtctttcccatgtagccagggactctatcgaagaatctgttacgtgaaagcaactcctgatactcagctctgttaaagccttgcaacagtgtgtgattgtgtggatggctctgtctgagattcctggcatatgaccgagatcaagtgttgacaatgttttgctgattgttccttcattgttcaacagataggatattcctctgtcactgactctcctacagccgcggagagacagttgcgtgatgggaacatctgacttaccaagtgcaagcatgccactatcggttacatcagctccagcgagattcagagaagttaactttctgagggctgaaacagagttgaggc

SEQ ID NO: 145742 - DNA, 140 bp, Arabidopsis thaliana landsberg
attgaattagtggggtttctaaataatattttatatgtattttgcattatataacactaacatattacatcaaagtttatagtgatatcactgattaaaattaaatgattatagatatgtgtatgaacaatatgaatcat

SEQ ID NO: 145743 - DNA, 315 bp, Arabidopsis thaliana landsberg
tgcaattttcctctcctcccaaccaaaacacaagagccaagaacaaagaaaccatggatcatgatcacatgcatggaatgcctccaccatcatcatcatcatcatcaccatcatccatgatgaacaatggatccatgaacgaaggaggaggacatcaccacatgaagatgatgatgcacatgaccttcttttggggcaagaacacggaggttctcttctccggttggcccggaacaagctccggcatgtatgctctttgtcttatctttgtcttctttctcgccgtcctcaccgaatggcttgctcattcctctc

SEQ ID NO: 145744 - DNA, 135 bp, Arabidopsis thaliana landsberg
aaagaaagtgctaatattgatctttgtacatcactagttaaggctgaggcattgtcaccacttacggctaaggcatcatcaccagttaacgctgaggatgctgacatagtatcgtcaaagcctagttctgatttg

SEQ ID NO: 145745 - DNA, 511 bp, Arabidopsis thaliana landsberg
tttaagcctccgtcttcttcttcttccgtcgtcgtagtcgattggttagttcgattatattcaaatctttactcactacgatccttaaattagtgggtcgttttcaaaattttgatttgattcgattttccttggtagaccataaaacctagaaatatacgattaggttattcaattgctgtcgatttctcgatgtaaataggtttcgtttggtagattctagaaacttatttaatgtctatgatcgttgctaggttttgtatcgtgtagtgattagtttatcaaattcacttttgttttgagttgttacctaatttagttttagctgattttgatgaagtgggaataagaatctggttatagtggtaatgatgtgtttcctctgcttataggtggttttagctatatggatatcttctactgcaaatactcttcaaaacggatgctttgaagccttgatactaatttcatgcgttctatatatgtgcatagtaaggaagtaatgggagag

SEQ ID NO: 145746 - DNA, 367 bp, Arabidopsis thaliana landsberg
cgtttctagtattcaacttgcgggttagatcttactttacatttataatatatcgtatagtatttgtaattatttctttttaataaaaagataaaattaataatagaggcgatggagatggataatatagttgactgattgtttaatgttaactagcgttggggacagatggatccacacaactcgactcaaaaaattaatgcctggtttacgaacgtgtatttctgacggaccccatgctttcattgtttggacatagatacttacttttgattccatattccaattttctaatctattagtaaatgattacgtttgtagaggtggtagctgatagatggcttcaaatgtttggggcaaacttaag

SEQ ID NO: 145747 - DNA, 146 bp, Arabidopsis thaliana landsberg
ccttaatatataaacaaacatcaatctctcgccgtcaaaggttacatctatcgccgtcaaaggttccatctatcgccgccgctgagaccgccactttaggccgtctcgtccgcaatctccgtaaccaacaccacccgcatcgcctg

SEQ ID NO: 145748 - DNA, 384 bp, Arabidopsis thaliana landsberg
aagagacactagatcggaaacacttggggatttttttgagagaaacattctctcggttcctctactaccacctctcaaatctcaattcgccgattagtaactccgtccaagaccattttccgccgtgacaccgtccacggtctctctcagtccgtgagttcctgctctgttccgtttggtttttctgttttggaatttcagtatttttcctattgaatttgttgcgatatgatgtccaaatttttggtttgttgagtgatgttccgatatttccgttatcaatcatcttccactgttcgcttgcagggaagaagataccatagttagaagctggtgatcattttcaataaacctcgaacatgtttaagaagtaagcatctttgt

SEQ ID NO: 145749 - DNA, 314 bp, Arabidopsis thaliana landsberg
  unsure (1)..(314): unsure at all n locations
caagttaacaagttngagctggaccatcagaactccagtcatttttggaatcacttaagtctcgattaaacgctgtctccacgaggtatcctgcctatatctggcagctttggcttgtataataattttatcaattctaagtgattccccatgcacaatgtagatacaaagaatcgatatcaaagaatacaaggaactggaaagatagacttttttctcgcaacacgtccatggcagatcttggctctgaggttaaaagagaggtcagtgccggaatcgccactgtgtcccgcatgatggaacgtttagaaacg

SEQ ID NO: 145750 - DNA, 381 bp, Arabidopsis thaliana landsberg
aacattacagcgaataatgttacaacaatgatacaaatttacgtccaagaattttacctctttggccagaaattctacaaaagacaacgaataatatgaacagacaagaaactcatcactgcaaagaatcccaagaactgttagaaggaaaaaaaattccctgaggactcgatcaatctcacaatgaaatcctacaggcgcgggtgatcggatcaatgtgatcacagaagtagaagagaggcgaaaaccgtagcgaatgcagagagaagaagagatagagcgactcgggtttgtccgttgggagacttttcacctgttgattgaggtccaggggtggtggttggggctctggctgagactggaggtaatggtggttcagtg

SEQ ID NO: 145751 - DNA, 142 bp, Arabidopsis thaliana landsberg
atctgacttcttcttcggtgttgttgattcatcttcttccatgtttgatttcaatctcttactgtttcgttcctccagatttgaagatttgggttgaaaaaagttgagacctttctgtttttttttttgtttcttcactaaa

SEQ ID NO: 145752 - DNA, 623 bp, Arabidopsis thaliana landsberg
aggtgaatttggggatttcaagtaagatcaggctttcacagtaacaaaagcacttttcttcactttcctctctgcactcgtcgcacttgccggaactgcattggtaagtcttttctatattaaagcctagcagttctctaaaatattgaaaactgaacggtgatgttttctatctgccacaggttttggtctggggaaatgaaccaggacaatcatcgttgattgaggtagtaaacaacatatttgcactgcttgccttagatctagtttgactcatcttattgatttgaatatatgtggtggttggtgattaaaatcttacagggattcacagcgggaggattcatatacatagctgttgctggagttcttgcagaaatgaacaactcgggaaaatcaacacttaaaaacagtgcctgccatttgatatctttgattcttggcatgagtgttgctctttgcatctctcttatagaatgatctcataacaattgtttttgtaaccgatatagaaatcccaagcttgggttttgttgttttgactacagaaatatactacccagttcttaactttttgaattgaaaaattaggcacatttataaacacacactgattaaatttc

SEQ ID NO: 145753 - DNA, 833 bp, Arabidopsis thaliana landsberg
tataaaatcccaggtgcagtggaggcattctccagaagacacccgactacaacttcttcgcctcgagatcgttctagatcaagaaactcagacgacggacctttctctaagcagacagtaaaaatcttactctttacatacattgttgatcagaaccgctaaataagacaaagacctaactgtgtttgttttatttgtgcagcatggagactccgaaagagcaaacagttcctcaagatacagagcatcttcttctaggaaagccgttgctgcttcaagctcccggccaagttctgcaggtggaccaagcgaaagctgaacttcaagtcgtctggtttcctcaagcggtggtggtggcagcggcagtggaaatggccgtccctcaactagccagagagtgcaagctggatatgaatccaagactctgtctttctctcgtgcaacagcggcaagaaacactcgggaagatcaattaagaagcttcgagcttctctctcttcggaaataaaggaaaatgatggagagagagacagcaaactccatgaaaacccaaagaaattacctctgaagaaagatgagaatcttggtttgagggaattcatatatttgaacctgatgaaatcctcagatctttttacatgtaatttcagcttcagcttgcagagatctttttcactcgttttgtttatgtaatcgtgatatgtgttagacaaaaataacaataaaaaatgtagagagagtttccatgtaaaaacggtaaaatttctatccgtatattcgattacttcgaacctatctgtactggtactgtaataaacaaaacaatcaactgc

SEQ ID NO: 145754 - DNA, 621 bp, Arabidopsis thaliana landsberg
agatgaacaggttcagccaactgaggaaaacacagagggagcagaagcaagtgtagctgcaactaaagaaaccgaggagaagaaagctgatgatgctcaagcttgatggttataaagtcaggtagttcatacaaacaactctcaaattcaaaaggcggttaccataatatgcttgttggatttgattgaacacttgtttaggatcgtgaatttatacttagaacccaagaaaatgcagaaagttggttcttacttcttagccatagaatcttgttcttattcatctgaatttcattcttatagtttagaaactggtgacttagattaattgatgatctttattataagtataaacgtcgtatgaagcatcgtcattcacaatttggatactatattcttcaggtccaaagtctacacctttcgtttctgggttcttttgagagttgaagcttcaatcaaacaacaacaatggaggttccttttttaattatcttgtcctttttcaaatttttgtggtactgctgtaattttaagtcagaaatgagattgtagaacactatcttcgtgacatcttttggaaaatcattacggattgtttacagaacataaatctttttacta

SEQ ID NO: 145755 - DNA, 649 bp, Arabidopsis thaliana landsberg
cgatcttcttcttcgatcttcttcctctcgtcaggtttcgtgtggttcgttctaatcgcgttgtattctttctccaaggaaggttcgtatcgattcgattcataatcgctttcgttctataattcgagaaatggaaagtaattgtggtgtttagcttgcgggatcacagatattgaaatcgctcaccgtaattatgaggattctccagatataggctgtttctattaaatcaagctcgaactctactttttgttgattcgagaaatgaaattttattgtggtgtttaaggttgcagaatctagttattggaaattgcacagtctataaaccctaattttgaggaatcggcgttgtctaagttatttggtggtcatgatcatcttttgaaaacagtagatattgatggttagagttacgtttattcttcagatggctctaaaggaacagctagataaattcaacaaacagcaagtgaaatgccaatctactctttcgagcattgcttcttccagagaaagaacgagttcttcgaggcagaatgtgcctttgcctgcggcactcactcaccagaagcctgatgcagctcctgtcaagttttcaagagataccgagcgacttcagaacattaacaacattagaaaagctcct

SEQ ID NO: 145756 - DNA, 373 bp, Arabidopsis thaliana landsberg
cgtctgcatctcaatgtcaagcataagtatggcaggttctactccatttgtacttagagatatcaccaattcatcagttgggccacatggcagaatgggtggcacaccgcttacgtgtccagagactgaaaaaagatagagaaaaggttagtaactattattcaaactgtgaatattttaatacatgttatttatgctatacagtttttgcttataggcaaacaaagtatcaatgattcggagtgcttgacccaagagcaatcttcatgtgtcaacaccattagacttaacattacaaggaaaaatctgcacatagactttgctatagcaagttctgaatctaatggtgaaggtgaatgattatctataagta

SEQ ID NO: 145757 - DNA, 255 bp, Arabidopsis thaliana landsberg
ccctggatcaacggtctgttgcacctttaacggcacagtcctttctgtaacattcttgagccactccttttgcataagaccttgtgtgatctctgacttgaaaagccccggtgcgatcgagttcactctgatcttatgaacacctaactcaattgccatcatccttgacatggtgtcaacaccgcctttggaacaagcataagcaagtccaccgggcaacataccccggatcccggcgatcgatgagatgtttat

SEQ ID NO: 145758 - DNA, 764 bp, Arabidopsis thaliana landsberg
aacattgtttttcattgaataataaaacagaatcgtcactaacagttcttaaatttaccaaactggatcacgaatcgattttgttacaatcattgtccaactacggaccaacttaacttcacgacagaaccattacaacaaaatcgaatcacatttgatattaaatctacttttaatcagctccgattacagtaattaaaaattctcatcaccctctattattacagaacacaactgttgctaacagtctggcttatggataccaacaaattttattgccagcattgaacatcacatctgactaccaatcaacaaactccaaatacacaaactccaaaaccaaactctaataatttgtagtcaattatttggattctggaagaggtctcttagtgaaactcatcttctcgtagtatcgaattgagagaagagaaagagtgagtttaagctcgtccttaccgaacctagcacgcggattgggtttagagagaggccagaggtaaagagagtggagtcttcggaagccaccaagcgccaacacaacagatctgagctggttctgcccgcagccgatgttagtccagtgacgagtacagatcagctcccaaagccgctcgtcttgtgccgttttgtgccagatcttgctcacgcaagatgacatagctaaggtctttgcgtcgacgtgtttcaacacctcgtacactagattctcgtctaaattggagaatccgatttcttcttcctctggactcttcatcttcttg

SEQ ID NO: 145759 - DNA, 460 bp, Arabidopsis thaliana landsberg
tgaggccaaaaacagacatctcaaatttatagaacaaaaaagggagaaagatattcacaaacggaagcaaagctgttcctggatttacatgcttcgttgcagacaaatcaaactcaaataagtcatataacattcattaaaggaactctcagatttccagcacacacttaagctcatctcttcccaatactgacatgatcttacccttgagatcaggattggtctgatgaagtttggcctagagagacagatgccagcgatgaagcccaagcttgtgcgttctttgccctttcatggaagtttcttgttttgacgagacttagtttcaaccataacctcctcacatcgaccatgtgaataccacggttgaacagttggcttatctctccaaatcttcccaagttcagattgggaacgtaagaagcccataacgctctcatgcgcgattcagctatgggga

SEQ ID NO: 145760 - DNA, 517 bp, Arabidopsis thaliana landsberg
cactctttcgtcctcagatagtgcgcattgcagaacacaaaatctctacaagaaaaccccaaaaatggacggactttgctacgtcatcttcatcatcttctccctgctatcctgcgctttctctcccttatcatacgcctctccggccactttcagtcgccgtcaccttcttcaagctcctgtaactgatccttccacattctcaccgccgttcttcccactttacagctccacctctcctcctcctcctccttctccgccgcagcctcttccgcctcccgcccccacttttgcgacatttccggcgaacatctccgctctcgtcctccctcgctcccctaaaccgcaaactccttcccgtacactccttattcctgctatctccgccgtgctcgccgccgcaacattaatcgccttggcctttttcttctacggacggtggcgagggcaaaccagtcatttcaaagatgaatccaagagcttagcttcagacattagccaatcccaacaacaaact

SEQ ID NO: 145761 - DNA, 530 bp, Arabidopsis thaliana landsberg; identical to SEQ ID NO: 43156

SEQ ID NO: 145762 - DNA, 373 bp, Arabidopsis thaliana landsberg
agaacaatctaacgctttctcgaacatcttcttcttcttctttctcgaaattatttttccagtaatcaatttcttctcttctagatttttacaggaactaattttctgctctgaggtatcagatgagtagccgatggaatcgtacgatctacgttgggaatttgcctggagatattcgcaagtgtgaggttgaagatctcttctacaaggtttgaaaattcctcttttctctcgataaaaattgaattcattatgacttgtttgggttcataaatttgcaattctgtcttgctgagacaatttaaatcgactcttatgtatatttgtttcagtatggaccaattgtggacattgatttaagattccccgagcc

SEQ ID NO: 145763 - DNA, 164 bp, Arabidopsis thaliana landsberg
gcaagagttttgaagatctgatacagaaattttttctcgggaaaattcagagggaaagatcgatactttccacaacggagaaggtgtttcgtttctgctgatcagcagattacttcttctttttcttcgattgatccttatggattcttcgaaagatggaccct

SEQ ID NO: 145764 - DNA, 61 bp, Arabidopsis thaliana landsberg
gcctgagacatcatcatcacattaccaatcatctccaatggcaaaatacgcccgaacaaga

SEQ ID NO: 145765 - DNA, 634 bp, Arabidopsis thaliana landsberg
ttgcagtatcaaatttctccatatattgaccaacaatgacaagaaacatctatggaataagaatttgacagttaaaacttatcttcatgagaccaaacaatgaagcacaaggaacaagtgcagggtaaacaaattgcattgggcttgtgatagtatttgtatatcatctatatgtttcctgtaatcttgccaaactgtgattccgttcactcattgattttcctagctctatggtttggtttccatgtgcattcttcgaatatcaaacttgtctactgactccagaggagagactgtctcatttatcatccttttaatcttgggactcaacagtcccctgtggctaaacccatacagcttcagcacttgattatctgcaaaattaaaagccctctccatgctcttgaagcatctatcgactgcgtaatcagcatagctgccacacggtttgcaccctacaaaatgtgtcacaaagggccatctctcatcgcccaatcctggatgatacttctctatcatctcttcatacctgtcaaccaaaccttcccaaaacccgtgcaagtagtattgattctccacataaaccttctctatccatttttccttctgcgaaagcaagagatatatcaacgcc

SEQ ID NO: 145766 - DNA, 1489 bp, Arabidopsis thaliana landsberg
tcagaacatgttcagaatcctgaaccagaccaagtcttgagccaaagacaactgttgcagctaaatcaaaagaaatggtggatctctgttctaatatgtcttttcttagtcctgcttggagattctcttgtcatacttctcttgaacttcttctatgttcaagaccgtcgagaagataataaccaagatctacaatacaaaggaacatggatgcaagctctgatccaaaacgctgcttttccaatcctcatccctctcttcttcattttcccttcaccaaaaccaaaccctgaaaccatcaatactcgcttcctctccattcgtctcatcttgctttacttctcccttggtgttcttgttgctgctcacagcaaattgtatgcacttgggaagttatactcaagctatggcttcttcatgctgatttcagggtcccagttgatctttaccttgattttcacagctatcattaaccgtttcaagtttactagatggatcatcatatcgatagttctcactcttgtgagctatgcttttggtggtcctgtattttcaggagagcctgatgaaaatgaacatttctacggcatccaagcttggttaactttcgctgcttcagttgctttcgcattatctctctgtttattccaacttagtttcgagaaactgttggtgaagacaaagagatatggtaacaagaaagtgtttagaatggtcatagagatgcaaatttgtgtctcttttgtcgcaacggtcgtttgtctcgtgggtttgtttgcgagtggtgagaataaggaactgcaaggcgatacaccaggtttaagaaaggagaaacgtattacgttttgagtttgatcgggttggcattgtcgtggcaggtttgggcggtcgggctgatgggtttggtgctttatgtttcgggtgtgtttggcgatgttgttcatatgtgtgcttcaccggttgtggctctgctagatgtgttggcatttgatttcatggacgatgagtttggttgggggagaattggtgctttgctaggggcggtcttggctctagcttcttacttctactccctgcacacaaaaaagaagaaggagatcgcagaactgaacaagagagagaacaacaacagtgaagcttagtctctctataatatacatagatgatactcttattactttatgtgtcttgcagatacaaatactgtgcttgtcctgcaagtgtcctttattgactcagaagttgtatacatccaaatgagagactaaaaatacatccgtgatgatatcgtatatatctatctcaataacagctacaaataatcccctcgcagataatcgaatctacgaggtttttgtatggatgagtttgaattttctgtaacatgtgcgtaaaacttttctcacataacccattcctcaaatcggccaagttgttttgaagaattcttcttccagaagggcttgatcgcagtgaaattaccagtttt

SEQ ID NO: 145767 - DNA, 492 bp, Arabidopsis thaliana landsberg
catatacagcatctccacgttgaagagtgcaatgatctcctctacttcaatctcccatcactcactaaccatggcaggaacctgagaagacttagcattaaaagttgccatgacttggagtacctggtcacacccgcagattttgaaaatgattggcttccgagtctagaggttctgacgttacacagccttcacaacttaaccagagtgtggggaaattctgtaagccaagattgtctgcggaatatccgttgcataaacatttcacactgcaacaagctgaagaatgtctcatgggttcagaaactcccaaagctagaggtgattgaactgttcgactgcagagagatagaggaattgataagcgaacacgagagtccatccgtcgaagatccaacattgttcccaagcctgaagaccttgagaactagggatctgccagaactaaacagcatcctcccatctcgattttcattccaaaaagttgaaaca

SEQ ID NO: 145768 - DNA, 269 bp, Arabidopsis thaliana landsberg
ttttagctaaaataatttagttcatgcaggaatcaacacaagttgttcgtgtatgtatttcataacaaaacgccatagttcatgtaggaatttgcattcttcctcaaaattttcactctttctttaaagtgttacagcttcataactaaagcgattcaaaactgcaaaagctttatctcttcttctttgcaatacctccttttctagagctactactagcttcaggtccttctgcttcttcagcctttgctcggcccaagtattccaac

SEQ ID NO: 145769 - DNA, 79 bp, Arabidopsis thaliana landsberg
agggaagctaaaacaattttcaaacactcaatttcttgatcccatctggaattggattccatcgattaatctctcaatg

SEQ ID NO: 145770 - DNA, 314 bp, Arabidopsis thaliana landsberg
agaacaaggatggtattgatattccggccttgctcaagcatactaaagaacacaggggtgtcaaagggtttgatggtgcagatccgatcgatccaaactccatactggttgaggattgtgatatcctcgtccctgcagcacttggtggtgtcatcaacaggttagagcttttttttgctacaaaagcttacatattgttttgaaactttttaaaaactattagttggattttggtttgaagggagaatgcgaatgagattaaagcaaagttcatcatagaagcagctaatcatccaactgatccggacgcggat

SEQ ID NO: 145771 - DNA, 288 bp, Arabidopsis thaliana landsberg
agctttgcagctgatggaaaacaaagtggttgcagccattggtccacaatcttcagggattgctcacatgatctcctatgtagctaatgagcttcatgtacctctcttgtcatttggagcaacggatccgactctctcctctttgcaatttccttatttcctccgcaccacgcagaatgattacttccaaatgcatgcgatcgcagattttctatcatattccggatggagacaagtcattgcgatattcgttgatgatgagtgtggcaggaacgggatatctgtcct

SEQ ID NO: 145772 - DNA, 445 bp, Arabidopsis thaliana landsberg
agattcaggccaaacgccagtatctaaaactccgatgataacgccgttagaagaagaaccgagatcgtgaacaccgaattcggaattgagaccgagaaactcaggagtacgcgtagtgtcaagtgtgtagagaggatcttcgaagatatcgaggattgagtttgaggaggagaggagagaatcggcttcggtggagtcgaggtaagcggagaagccatggaaggaggttgtgtaagtgtagagaagagatgattctgaattgagttgagatgtgtaccaatcgtggtgagtgaggaatgattccggtttatcggagtgattgacgcggatgatgtaggtttttttggcggttgtgtggaggagaaggaagaggaaggtggtgatgattgtgatggaggaagaagaagaagaagaagaagaagccatgagtgtgtgtgaatgatgg

SEQ ID NO: 145773 - DNA, 1484 bp, Arabidopsis thaliana landsberg; identical to SEQ ID NO: 26289

SEQ ID NO: 145774 - DNA, 300 bp, Arabidopsis thaliana landsberg
cttcaacaggcggctatggaccaaaaaaagcgaggggtttaagccacatgatcaagaacaaagctccttcaagaccaaagtgataaagagtaaagctctgcttcatgattaagaattaagctccttatacattgtttgtgtacatccaatctcatatcagttgttgttgtagaatttaaaattctaactcttctcgaaaaaaaaaatgcttcgtatcatcttcaggagagctttcaatttgtaccggaagtctttttcaaacaagtttttgttttgaagaaaattttggatttgtataat

SEQ ID NO: 145775 - DNA, 190 bp, Arabidopsis thaliana landsberg
gaaaatctctgaaaaactctcctgattcaaaagagtaagaaatctacaaaagaaaaccacagagaaaatctctactgatcagtttctctccattggtgatcgctcgtcagaaaaattgagctcgattttgtataaattgaagaaaaagaagaagatcatcaaatgcgtgatttttacttttccgttcaag

SEQ ID NO: 145776 - DNA, 172 bp, Arabidopsis thaliana landsberg
tccgtaaagccaatacacctttcaactgcagcttcaagaagaacaacaacttggggaatagactcttccatcctacgcactgtttcactgagttcaattccttgagccccaacaccacgagtaacagcccctctcagatccaccactgcaatctcagaggataaaatagcac

SEQ ID NO: 145777 - DNA, 460 bp, Arabidopsis thaliana landsberg
atgaaatttcacctgcggttctgaaaccaaactttgatctgcttaggctcgatgttagagagaatcggacattcacgtatgagttgttgtcttcttagagaacttggcttaggacactcagtgtaaactctctcgagagcttccacttgctccggcgtgtacctcacatacttgccggaatctaaccctttatccggcgactctctgttcatcatatctctgctcatcgaatggaccatcatcatagctcaaagtcagaaataggaaaaaaggacgattcttttgaatgggtaaagcttgaaaattggagaaatccctaggttattttcaagggtaggctctctctactcagagagcctccactcacgttcatgagataatggtgagaaaaaaaaggagttttggagaaagaacaaataaacaaaaaaaaaagtttctatttttatttttttcggtttat

SEQ ID NO: 145778 - DNA, 938 bp, Arabidopsis thaliana landsberg
gaagataagagtgtggcacagagctttatcctctctcagagtttcttctcctctgtgaatctccgacaatggcgatagctatggcggttgtttctttcccatctctgctcaacaaaacaaccttatcctcttcactcttcactcccactttcctcccggcgaaatcctcttcacttctcatcaaatcatcaccaaaaaccagattcgtggtttcatcatccatggaagctggaatcggagtaatggggtcaaaactcgggatgatgagtttcttcgaagaagacggcacagtagttccagtaacagtcgtcggattccgcgaaggtaacatcgtaacccaaatcaaaaccctagccacagacggttacgacgcggttcaaatcggttaccgtcgtgtacgcgacaaaaagctaactaaaccggaaaccggtcatctccaaaaagccggtacaatcccaatgagacatctccaagagttcagattaacaaacatcgaaggattcgaaccgaaccagaagcttgtgttcgatgagatattcaaagaaggtgatctcgttgatgtagctggaaccacaattggtaaagggtttcaaggaggaatcaaaaggcatcatttcaagagaggtcagatgactcatggttccaagagtcatcgagctttgggttcgattggtgctggtactactccgggaagagtttataaagggaagaagatgcctggaagaatgggagggacgaggacaaagattaggaagcttaagattgttaaagttgataaggagcttaatgttgtcatgatcaaaggtgctttgcctggtaagcctgggaatcttcttcgtattactcccgccccaatcgtcggagttaacattcccaagaacaagtaaagaagagactctgttttgttttgtaatgttgacttgtgtttagccgttcct

SEQ ID NO: 145779 - DNA, 260 bp, Arabidopsis thaliana landsberg
tcttcctctccttccataagaagaagcagaagaaagaaaagatggagcggcttaacgaactcaggagcttctcgcacgcagtcaatgaccagaagaagaaggcaccaaagcaagaatcaagcaagaaagttttcccatcaagactcacaatgtcttggctaggtcaaggaaagggtaataacagcaacacgcaggaagtccctcaagaacatgatgcacgtagagacagcacaagagcattcattccttgatatttcaaa

SEQ ID NO: 145780 - DNA, 150 bp, Arabidopsis thaliana landsberg
ggaaaaaaaacaaacccgtgacgccattaacgaaggtcgagcttgcttgacaccacacaatgcattctcctcgtaagctatttcacgcgcggtcatcactcgccacgcgccgatcaacggctcttgtcgtattaactttcctagctattg

SEQ ID NO: 145781 - DNA, 418 bp, Arabidopsis thaliana landsberg
taaaaaaattggaaatattatttactttcattgttagtttagtagtaataattaattgatttagttatttagtgttacccccgcatgccgcatgacaagacttttttttatccctctaaaactaattattctctacgaaaatttcagtcgtctatacatttaatttagcatccgatttaggaaaaagaagaagaaaagaattacgatcaacaacgaccagatttagtcaaatttggacgatgcatcttctgtagcttggtaaatcgatcgatatcgaaatcaagcattttaatcaaacgtttctgcttcgtctcgaaccggcttttgtaaaaaccttcaaaggaaggttcctttgaagttcggaggaagaaggcgtaaccagccatgaaatatgtcgaagttacgtagaagcatatgg

SEQ ID NO: 145782 - DNA, 383 bp, Arabidopsis thaliana landsberg
ttcggttgaagaaagaattggcgtcccagtaatgatcacaaatcacaagtgtcttagctttgttgccgacacgtaacccaaaactctcacccaacaccgaccctctttttcatgatgtttacaaggagaatgatacgactcttctttgcttttagataacatcaccattacaaattcgtcttaattatcgtatatatattattgacacacaaagagagagatatgtgtaagagactaatttggcgttgcccaccaacctaacttcccttctacttcatcaacaactcgtgtccactttctcatactaaccttggttcaagattataattataaacacgcctcccgcgtgaatagacaacgcaaacatcataaaaacatcataa

SEQ ID NO: 145783 - DNA, 263 bp, Arabidopsis thaliana landsberg
cagaatttattcctctatggttatggtgcaatattcaactttcttggaatactaggaactgttatatataaaggtatgtgcatgcattttatttaaaaaatggcatggaagaaaataatatgttttaagcagttaagcaccataatagcttttgaaaaaccttcaaggtcttcagtatgcattgctgagaaattttgtcatgatattgacaggtcctggcagctttgacatcctacaaggacattctagggctaccatgtttt

SEQ ID NO: 145784 - DNA, 370 bp, Arabidopsis thaliana landsberg
ttttgaacgaaatagaaattgttgtagttttctataaattattttttaataatctccaaatagagcaacgtatccacttatatatataaccttatctctttttttatttgagaaaaaaaaagtacactgtgataatttgaactcatatatatacacactagttgtgtgtgcttgtcttaagaaaaaacaatgggatcaatgactcagaaatcggttttgatgttatgcggagagttcatggaagcctacgagactatagtacctctctacgtcctccaagcgtttggtgttagcgtccactgcgtttctcctggtcgcaaaactggcgacaagtgcgtcatggccgctcacgatctccttggcctcgagg

SEQ ID NO: 145785 - DNA, 68 bp, Arabidopsis thaliana landsberg
gtaaaatagtaccccaagccatttataaatttcttcactctcagattcaaaataatataaattagaaa

SEQ ID NO: 145786 - DNA, 375 bp, Arabidopsis thaliana landsberg
tgtcataacctagttcagtttcccataatccaatattagtttacaattttacaaaaatttgtgaacatttcctgtcaactatttgcgagtcatgtgtgagtgtgaccatgtggactgttgagttcattaaaatctctcaacttacaacgtaaatttgacacatcaattacaaaactgatccacattttcttgttctcctttcacatatatagagaagagaagatactactactagtcctgaatcacgatttatatgaaaaaagtgcagagatcatcaaatcatctgcagatggagatcgcctgtttgctgggcaagctctaccatcatcgcttcatcaaagaatttatttccgctgacgtcttcgctcattccct

SEQ ID NO: 145787 - DNA, 355 bp, Arabidopsis thaliana landsberg
aacaaaaatggagactagggaaacaaaaccagtgatctttctcttccctttccctttacaaggtcacttaaacccaatgtttcagctcgccaacatcttcttcaacagaggcttctccatcactgtgatccacactaagttcaactctccaaactcttccaatttccctcacttcagtttcgtatccattcccgatggcttgtctgaacctgaatcctatcccgatgtcattgagattctccatgacctcaattccaagtgtgttgctccttttggtgattgcttaaagaagcttatatctgaagaaccaacagcagcttgtgtgattgttgacgctctttgtacttcactcacg

SEQ ID NO: 145788 - DNA, 420 bp, Arabidopsis thaliana landsberg
tcactgaactccttggtggcattgagcaactgctgataggtaaatgatgatccaagactcccaaagtttatagagactcctcctcttgagggaagtgtttcatcaggaggtaatgggccaacaccgttgtgtcttcctctaggatgattacttgttgatgatctgtttcttcgacggacacagaaactcactgttattggtaacactatgagaatgagcataagcaatatagaccctccaactgcagcaagtataactattttcgtgtggcttaaccaggaagttttaaaactcttcttctcttcatgttgtccgaaattgttgaaagttaagcccttttttgaataaaacaaagtgcaatccgacaacttccgctgcttctatgggccctgaagacaattgttgctcaatgaagctctg

SEQ ID NO: 145789 - DNA, 156 bp, Arabidopsis thaliana landsberg
cccataaataaataaatttagagaaatatctaagtttggttcttccctgtgtctacccaccgtgatcatcataaaatggattgtgatttctgatttgtgagtctatctttctctactccattagcttcctctcccttggatggttacgtcactttc

SEQ ID NO: 145790 - DNA, 438 bp, Arabidopsis thaliana landsberg
tcttcactgggttgagtttcagaacaaattctacgaaggagatggtttcaagttcgctcctttcactttcattttcacggcaaacgaagacgagtgatgtgattcattcctctcatcctctgcattttgcatatataaggtacaaaaaacatgtttgatttctttctattaaaatccaatatattttttccccttctctccgtataagggtcaattaaatttatttatttgcctgtggagataaatttttaccataaaaaatgaggggatacttggatctgtacgaggcataaaaacgatttgttgttgttgtttgtttggaattaaataatacgctgtggatatgaataaagtcaggaattggaccttcccaacatgtatatgttttttcaggccgtgggactatataatggcccagaaatgatctaatattatccc

SEQ ID NO: 145791 - DNA, 88 bp, Arabidopsis thaliana landsberg
ctcatttatacagtcttccaaaggctcagtatatctctgtttgcaaggatgggaagccatttacattttctagcagatccaggaattc

SEQ ID NO: 145792 - DNA, 276 bp, Arabidopsis thaliana landsberg
tgaacagtcgtgacttgcaacaattttccccttaaatcgttattttttgtatcggtgcgattttaccgttttggcgggaaaaaacaattccataatttttccgccaaaatcgtgattttattgtattggtaagaaaaacacaattttaccgttttgtcgtaaaaaggcaagtctccaatttttacaatttttgcagaaaaatgtaatttctcaatttttcttaaaaatgatgatttatgatttatcaataataacaataataaaatgggctgacca

SEQ ID NO: 145793 - DNA, 453 bp, Arabidopsis thaliana landsberg
ccaattgtgcatccttgctgctgagggcttgcgtcggagtaatatgtcatctatcactagctccattcagcaggcttctataggatcttatcaaacttcagaaggtctggctctcatgtccttgattatgaatgttaataatctagaatttcccaacattacggatatttgtggaggatatatatgttagattgtcagtactatagtttcaataaactatggtctaaattggcatcatggtaaaagtttgttagaaagatacatgagagaagataacataggctgaaatattctgcttgttatgcatcaccctatttcacattacagtaatatagttttggtattgttcttgcagggagaggtttacctgttttaaatgaagaggggaatttgataacttcggaagctgaaaagggaaactggtctacctccgattcaacttcaacggaggta

SEQ ID NO: 145794 - DNA, 212 bp, Arabidopsis thaliana landsberg
aacgacgaataacaatagtaacttgaaaccaataaagagaaaacaggggtcttctgatcagttttgtggatcgtcgtgacataaatacaaacttatgaactgatgtattgtttatttgtagcattcaaataaatctattttataatcctaaacaaaattaatttgtgttcgttataacttgtgaagagctttgtgcttattggtgggttctg

SEQ ID NO: 145795 - DNA, 488 bp, Arabidopsis thaliana landsberg
catgtaactatctctctctcctttcacagggaagctccacatatcacaaaacagcctgtgagcctcacttacatgccctaacttgctcaacgttctaaccaaataagaatatatcccctgcgtcatataccttttcgaaatctccacaactccgtctaacctcacaagctgaccttcagcaactaaaagattcaaaacaagactatacgtatactcattcggccgacaacccgtttccaccattctagagaaaacctgaatcgccttatcaaccattttgcctttcgcaagaacttgcatcaaagtattataaccaacaacattaagcgtaagcccttcagtaatcatctcattaaataaaccaacagcttcatcacacttcccaatcctccccatagtcctgatcataatcgtgtaagtatactcatctcttctacaatgcctcttcttcatatcttcaaaaacttgacaagcctgatcaatctgac

SEQ ID NO: 145796 - DNA, 902 bp, Arabidopsis thaliana landsberg
atcccaaaggtttgatttttttcctccaacttgcaaaatgttaaaccttaaaccttaaaccttagcttctctgtttgaaatctgtatcacggcccaagtatgaagcatcttcttcttcttcgtcttgttcttccaaagccaaattacattctcagaaggagcttccttttccactccggcaagaccacaccatcgccgttggacccttacgacactctgcagcgccgtgtcgcgagatccggagatccctctgcttcgattatcaaagtgttggatggatggcttgatcaagggaatctggttaagacttcagagctccatagcatcatcaagatgcttcgcaagttcagccgtttctctcacgctctccaggtctctcatttctaaattcctctgctgcttactttaaaaaaaaagttcatcttttttgttgttgttactctgtgatgatacgaatccaaatcttaaaaatggtatcttttttttttgttgttgttgttattattgtgatgatgttagatatcagattggatgagtgagcatagagttcatgagatctctgaaggagatgttgcgattcggcttgatttgattgctaaagttggtggtttgggagaagcagagaagtttttcgaaactattcctttggagaggaggaactaccatccctacggtgctctcttgaactgctatgcgagcaagaaggtgttgcacaaagctgagcaagtgtttcaggagatgaaagagcttggcttccttaaaggttgtcttccctacaatgtgatgctgaatctctatgtccggactgggaaatacacaatggttgagaagctgctgcgtgaaatggaggatgcgactgtgaagccagacatcttcacagtgaacacgcggttgcatgctta

SEQ ID NO: 145797 - DNA, 167 bp, Arabidopsis thaliana landsberg
tcaacatcaaagttataagaaagcttatattttgctggtaatttccccccgccactgctctgtaatctctcttaatcatactgtatcattactcctaggatcaatactcgttcttatatttgaagttcgtcaaagtcttttgagtaaaaaatatctatatttctcta

SEQ ID NO: 145798 - DNA, 216 bp, Arabidopsis thaliana landsberg
  unsure (1)..(216): unsure at all n locations
ctctctgtgtgtgatggcgtgccctagaaactccataacatacaacgccacgcgctgcgcgtgcggtatcggtcagctactaaaccggagctccgggagctgcgagatcttcggttggccgtcaacaatctccacagacanagatgtaaactacagcgtaatatcattcgccggactttattcgctttcgataggatccgtaagttcacgcaatct

SEQ ID NO: 145799 - DNA, 218 bp, Arabidopsis thaliana landsberg
atatattaaaaatcctcaacaacaaaacattaaaaaccctgtctctcttgccactttcacatccatagctaaacccttgaagaagattgtttagtgtgttctcgtctcttcgtttatttcttctccaccgatccaacaatgctactctccggtcaatctccgactctgattcgttaatctccctccgtctctctcgtctgattccttccgtatctctc

SEQ ID NO: 145800 - DNA, 317 bp, Arabidopsis thaliana landsberg
agtatccggtgaatggttacagtcatatgccgttcacagcgatgcttttagagccgatgaccacgacggcggaatctgaggttgagatcgcggaggaggaggaacgtagacgccgtcaccattagtaaaattaggcttttgatttagagtgttaaaattaagattttaaaagtttaggaggtaacagataaggataatttagtcaaatcatgttgtttagtttggtaatgttattttgccactaaacaactaataatattgtttgataatcttattatttggttttggaaacaaattgattaaaaaataatgccata

SEQ ID NO: 145801 - DNA, 132 bp, Arabidopsis thaliana landsberg
agaaaatgcaattgtttgaacttctttagattaatcttgtaactgagaaaacaaaaacatacttttaactttattaatctttcattatttatctatcaaataaatatatctataatcgctacataaatcacc

SEQ ID NO: 145802 - DNA, 416 bp, Arabidopsis thaliana landsberg
aattaaccacttatcatgcaaaattcaaccgcaatgtacatatccaaaattcctacacgaataattgtggcagcagtgaaaaaagaaatgcaacaaccttaagagttaaaccactaattgttgccttaaccggaaccagacaacaacgggctaattaagtaattaactccactaccgagacgtcggtgacaagaaaattagaaagacaaatttgcccctcaatgaccaaacccaatcgccggaaagtctaattacttaaaagatccggtggacttcctgaatccggcgacgattcattaatcgccggaactttctcagtcacgtctgattccgccgcttgctgcttcgaaagaggaatttttgggatctcagtgagaatctgaacgacttcacgcatcgtcggcctctccaccgct

SEQ ID NO: 145803 - DNA, 413 bp, Arabidopsis thaliana landsberg
cacaccctcctgctcaagttcctatcgatctcgatgtttattaggatttgagagaggagatgataagagaaatgatgtggaatgagatgcttcactaccatccacaagcttcaaccttaaacactgagctctgagctcaagtcttgtttgtacgggtaatttacagaaaacttcttcttcttatgtctgacagtcatcatagactcatagtgtatatagtcttgaaaaataagatgaagactaacttatagtttaagcgaatagtgatgccatggaagctctgttttatttaattacaagcttgatgtgtgtctgtaacatatgtacatagagagagctgttttttttttttaattacaagtttgatgtgtgtctgtaacatatgtacatagaaagagctgtgtttttttttt

SEQ ID NO: 145804 - DNA, 104 bp, Arabidopsis thaliana landsberg
tttttcaatttttgtgtgagtgccccaaaaccgctttgatctcgtttatctgtaattcttccgaatcttacaatataatcaagtgatcagtttatatgagctaa

SEQ ID NO: 145805 - DNA, 135 bp, Arabidopsis thaliana landsberg
tttgtgagaacccggaaaaggtcatagtagcttcaaaagttagcatcaaaagtagaactaaacactaacctccacaagccaatcaaccagaattccccgcatggactgggtgacatccttctgtattctctccat

SEQ ID NO: 145806 - DNA, 612 bp, Arabidopsis thaliana landsberg
gctcaagtcacgcagctaacaaagtacagatttttcccttgtttcgattgcaaaagcgcataagcttcgtacttgccaaatctgaagtcaaaccaaatacactggtcaaacaaaaagtcgacgagccccagattccgatagcaaaaccagtcggacccaggatttcgatgagccacactggttagcttccgacccaattcacgtcctaggtcaccgagaacgtggtatgtgttttctaaggctttcgaaagggtttagggttatagtttagctttagctaagggattgggttttgttgtgcgtacttattgttcgatgaaacttctgaaagagttttggtcaattgataatgaacaaagtagaaaactttatctccttaaaagtagtgacatgggagctaattctcctgtttgtgtttcgcagaaactgtgtgagcatttgcagtttctctcttgtggttgagctaaataaaaatcattgtacattttcaagagctaattatttctgatcattgttatgtgatactttcttttgcagacttctttgcatgttttggttttgttgagtcggatgagttttatttttggcttctttctcgaccagtagcagaaa

SEQ ID NO: 145807 - DNA, 119 bp, Arabidopsis thaliana landsberg
cttcaattctcctcccttcataaaccataattcattaattctcttctctctcaacaactacttgtttagagagagtcccaccaccaccactaccacaattccaatggcttcaccaactc

SEQ ID NO: 145808 - DNA, 784 bp, Arabidopsis thaliana landsberg; identical to SEQ ID NO: 59764

SEQ ID NO: 145809 - DNA, 252 bp, Arabidopsis thaliana landsberg
aatgtttgataaaatactttttgttggattttgtctgcttaaagtgatggatgatttttgggggactatgtcttttaatagattttgatacttcttttttttttgacgtgatttttgtttttgtatttgctacatctcacactaccgtttggtcttaatctaatggccaagcgagtattgaaagaggcaattccttttaaaaatatcttaatggccttaaatgaacatcatcggcccattgttttccttttt

SEQ ID NO: 145810 - DNA, 281 bp, Arabidopsis thaliana landsberg
gcacattcttctaagattcaattacttgtataaacttttaaactcttccacttttggtaattcgaaaagattattcttaccttgttcattatttcgggatttcttcaatttcttacatggcttctatgatgagatcacctgttaaccatctaaatatcaatgaaaaacttgcaaactacctaaaaattatactaacactttcacgtttcataagttttagtcttaacgttttatcccatttgccgttttggggtttctcaactttttacattagctcaacc

SEQ ID NO: 145811 - DNA, 391 bp, Arabidopsis thaliana landsberg
taaaaaccaaactcagaaactctttttatatctttttacattaacggcgttgtataaacaccaactcgaaatctgaaggaggcacaaagtactctataccaatattgttctgacatttcaacaccggtgggcgtttccttggagccgccggacactccggagtctttgctcctctcgccgtgggagtgatacaaattccatcttctgattctctctcaggcttaatgagtttcgtcttcaccggctttagtgaagcccgaatcgatgttttggcgaatataaacttttttccatcggtgtctaattctctgctaacttgagattttttcgaaattcccatttaaacagttggagattgagactagtacaatgttttgaagatgaggaaaca

SEQ ID NO: 145812 - DNA, 827 bp, Arabidopsis thaliana landsberg
tcataaaaggagtggcaggttttggcatgggtgcagcagtagctctccactttgcaacaagttgtgctcttaaccattatactataaatccccgagttgttgttggaatcagcgggtggctttctaattcggggtatactcaaataatttcttaaaactaattaattttacgtttcacatctcattgaatgatgaaagactaattattaaacattgcaggagcctaaaacgcagtatagaatctgcttcacatggggctccagctcgtgctgcatcgcagtcaatctttattacgcatggaatatgtaaatctaaccggcttctctttcaatgtaactattttcctctttagataatgatcagagacaatgctaaatctttatgatgacatgtgtcgcaggcgattctgttcctcacccctgtgactgtggagaagaagctgttttgtcccttagagaggctggatttagagacgtcaagttcacaccatttgcaaggtagataaacatcaaataatattttacattttagccctgctctatatagtatataccatttttggtttgaatgttttttgtctaataagttattgggttatgaacatgtgatgtaggtttggaccgactactcatgagaacaatcgcaacgtaatggtcaaaagctggttggaagagaagctccagctcgatgttactataccatagagactttcctctatctagtgactagtagtttactaaatatcgtcgtttgtttaatttgtcctgaataaattagcgtgactcatgttatgacttatgactaagtttttattttttacagacttt

SEQ ID NO: 145813 - DNA, 384 bp, Arabidopsis thaliana landsberg
tccctaattctccaaatttttggggttttacattttcctaatcaagagaacacctgaatctgaaaatgatcactacagtgctacgacgatctctccttgatgcgtcgaagaggaatctctccgcttcgttgacctcaatcaatactgttctgtttcacaacctggccccagccgccactagagtctccgacctagccttaattggatcttccgatgtcaaagctgggtttccgtttggtgttgaagcgtaaggaattcattttcaatctgggccgttggattttagagcttcgatggtttctctagctggatttgcgatctctgagagtagcgagagaagggttggtgattcgtagagtgttggtggcgatgggcttgcgatat

SEQ ID NO: 145814 - DNA, 256 bp, Arabidopsis thaliana landsberg
ggaagtgaccgggacaaaatatgaagacttacttgcagccattgaagcagcaaggtcaggctgagtctctctctatatcactcattatgtaaagtattaggatcattctccatccatgtaattcgtttggttctatgtatgtaactctttgctgttcccttaaccggaatcggttggttcactatctatgtataaatgctggaaagttatggaatgatgagctgaatgtgtatctgtatgcatcacaagttcataa

SEQ ID NO: 145815 - DNA, 146 bp, Arabidopsis thaliana landsberg
attagccagtcacatgttagctttatggctactgtttgtgtgaatggtcagtaagcacacctatagcaatgtcgttggtgattcgtttcaacactagaacaggatttaacccagtttttggttatggatcatcaactatatctttg

SEQ ID NO: 145816 - DNA, 548 bp, Arabidopsis thaliana landsberg
ctataaggagaagatacaagggacagtgtcagtgcattttaagctgcttctgctccccatgagaagcttaatacatttttcatggcttgtttaaaaaaaacaacccagagcagttttcttttcttctatttttctttcttctccttcaaatctttatgatttgttttaatgatctgtttgcttgtttctctctatttcattctccattttttagtttgagtagatttttgttttcttcatattttgggattgtttcttcttcaggtcacaggttttgaccttgagtctttgatttatttattcttggggttattttgatatcaaattgaggaaatttggtttcaaaagtcaaatttttatttagtgagatttcataaaagcaaatagactctgtaattttgttttgcaaaagttgaggattgagttgttttgttttattttgtgaacagcaaaggggtacaaactgaattgtgcttcctaaacttcagatttctttattttactacattttctcataaatatagaaataccatatgttggccaaaaaa

SEQ ID NO: 145817 - DNA, 120 bp, Arabidopsis thaliana landsberg
aagagcttctctatctacaacgaagaagacgacttatcaacctttgcttaatctaggggtttcttcttccttttgtttcttcttctccagttttcaaggagattcttaagctccatctct

SEQ ID NO: 145818 - DNA, 458 bp, Arabidopsis thaliana landsberg; identical to SEQ ID NO: 48393

SEQ ID NO: 145819 - DNA, 364 bp, Arabidopsis thaliana landsberg
aactgagtaatctcgcttatattcgagaatttggttttctggtttcagttgggtctacaggattattgtttctcaagtcacctgctacatttctctgatcgtcttgttgaaatgtttgattctgtccttgtccagaaaacccttgtctaaatcctggatttcctgctaatccatgtggaggaccatagtttccaccgttctgcatattgtaatttgcggggttcactggaaatctttggttgaagtttgcagatgttccttgaccgtaaccgcctggtgttgcttgattgtagtttccatggtatggaggcgcctgtgctccatgggcttgattgtaactagcctgatatgaaagcactgcata

SEQ ID NO: 145820 - DNA, 272 bp, Arabidopsis thaliana landsberg
tgaaaacacaaccaaacgctcatgaaatctctctccaacaccaaccaaaaaaattataataattttttgtgttcgtcaaataaattaaatcaaacaacagagaataacaagagatctctagcgtcatcatacacttgagaagatttgataccgcaaccaccagtagttccggttccggttcctaaaccaccaaccaaaccggtcgaattttgacctgacccaagaaccccaccacctccgattaaatctttgactccgccgtgatggtgatg

SEQ ID NO: 145821 - DNA, 461 bp, Arabidopsis thaliana landsberg
tggtgctttcttttgaggatttaagggaaacatggaacccaacaaggatgataatgtttcattagcagcaactatgctcaaatttcagcacctccagttctacaagatgcctcgtctctgccaggtaattaattagcattcaagtaaattgttacatcaaagattatagtgcagttgaattccttaaatctgtttcactttttcctggttgagtttgtttttgtatttttctcgcaatgcatctagattagagcttaaggatttggtctgtagagtccagatactgtttcgttcttccaattattaaagaagtgcattgggttttctttggtttcgtgatcctttaactctagtaatttatgtttcacttttactgtaacttcaggtttctctgccattccacctgtggttcctccttcttttcccccaccaatggctccaatacctatgatgccacatcc

SEQ ID NO: 145822 - DNA, 148 bp, Arabidopsis thaliana landsberg
cttatttcctctgtcttccttcgcttccctcttctctcaccacaatccgagagagagacagtactgtaatccaagtgagagagagagagaaatgaaaatgcagacgaagaagctctttatcaccattggctcctttcttctctatgct

SEQ ID NO: 145823 - DNA, 411 bp, Arabidopsis thaliana landsberg
cttccctcctaatgttgtcttggagcttcttaagcttgcaaatcggttctgctgcgatgaattgaaatccgcttgtgattcgcatttggcacatcttgttaattctctggatgaggcaatgttgttgattgagtacggattagaagaggctgcgtatcttctggtggcagcttgtcttcaggtttttctcagggaattgcctagctctatgcataatccgaatgttataaagattttctgcagcgccgagggacgggaaagactggcgtctcttggccatgcttcttttacattgtacttcttcttgagccagattgcgatggaagatgatatgaaatctaacacaactgtgatgctcttagaacgtctggttgaatgtgcggtggatagttgggagaaacagcttgcgta

SEQ ID NO: 145824 - DNA, 266 bp, Arabidopsis thaliana landsberg
acgttccaccttcaataaccgaatatctccaccagaagactcggtattcgcgtgccactcccaaccattgtccatacatgaagtaagtctcattgcaacggatctattttcttctatttacattgtctgtaactttactcacttttgatgcaacagtacatacaaaatggatcaaatgatgcaagccttgcagaacacatgggaactcggatatctgatcacatattcatgactccaaacaagttatcagaggaaatgatcaggtg

SEQ ID NO: 145825 - DNA, 351 bp, Arabidopsis thaliana landsberg
aggaagagttcgggattgaaatggcggaggagaaagcacagtcaatcgccacagttgagcaagcagctgcgctcattgaggagctcttgtttgaaaaggccaagtagaatatctttattacattagcaaaaacgaaaaaaatcaaaacccaaaccactatcttattgtttcgttagctagagagcaattgtgtctgttgaaagattttatgttattttggggaaattattacaaggcttgtatctgacttttatctttcttctaaaacattttactttcagccttcatcaaactctcttacgaaacttatgtagtctcatttcctaaataaagatgtttttccctttgctt

SEQ ID NO: 145826 - DNA, 753 bp, Arabidopsis thaliana landsberg
cattttcagacgaaagcaatcagaaactcaggtgaatcagaagcatgattcgagttacgaaaccaaaagcgatcatcgaatcactgagttaccatcttatccaaagatgctccgcaagtggaactcctaaaggaaaagcaaagctgaagacaggtcagccattgaagcgtaacaaactctccatcaagaaaggtggtggcggcggcggagcacctgttgaaggagaggaagcagttaacggaaaaggtagaatttccgatgagaagcagaaactctgcgagcaatgcttaatcgctccttgtcctgttcgctacttgaccccccaagagatcgagcgtgaggcgcaacgtgagaagctaggtttgattagtaaagagaagcaacgagatatggagatccagaagaaaggaggagctgcttcaatgggagtcaccgatgagccgatgcgaattgggacgccaggtttggattacatttcgttagggatttttgaagctgaggaattgcctaagtataagcttacggaagaagatggagagagacttgcgaaggagtatagtaaagtgttgatgagagagcatagagagcgtcgtgcagctgaaactgcgcttttgaatttgaagaaatctgctattgaggcattgccggagaatctgaagaaggcggcgttagagcctgatttgacaccgtttccggcgaatcgaggtatggctactcttacaccgcctattgaagggtatcttgagaaggtta

SEQ ID NO: 145827 - DNA, 493 bp, Arabidopsis thaliana landsberg
gtcaaaaatggcgaaccgtcgaattctctgtatctcttgaatttcccagagattaatttgaatcttcatcatcttcttctctctggattcgccgagaaaccttcttcctctgcttctctcgtcgatattctcttccttcccgcttaagccttcggctaggtctgatatttcgattttcttctttacatttggcaaacatgttacttatggatgttgttaacgatgtgttctaaataagcttctgtttcctcttgtttttcgtttgtttctgatagatttcaatggaaaggtcgtatagcaatgcaagaatggccaacagtttcacgttctggaatgattgtgttgagccagaggatttagaagaaatgtggatggatcctgcggtcagtgctgaatggattgatgttggagagactaaaggccagaaggttcacctctcaagggatcctgatggtcagccttatcttacacagaccgagatgagggtaatcta

SEQ ID NO: 145828 - DNA, 157 bp, Arabidopsis thaliana landsberg
aaaagagagaaatgggtaactctttgatctctcttctctcaatcttccacttgctggtgttatggggatcctcagtgaatgcctattggccaccatcacctggttattggccaagctccaaggttggttcccttaccttctacaaaggttttaggga

SEQ ID NO: 145829 - DNA, 244 bp, Arabidopsis thaliana landsberg
  unsure (1)..(244): unsure at all n locations
ctctcgtctctctctctgttaacaatggcgacgactagtttagtgaccggactaaaagtggtattaccggttatgttctgtctgatgctagcgactcttgtctacaccatcatcaccgatggccttcctttacctgatcgtcaagatgtcttcacaccgtaaaacccatttctctatttctctctttcttcattntcacacagagacagagacacacagatatgtgtttattcatgttagtttc

SEQ ID NO: 145830 - DNA, 192 bp, Arabidopsis thaliana landsberg
tttctcaccagatcgggatcgaagcgtagctagaaatctcttggaatcagcgtccatctttgcccctacgaaattgtcgaacttttggagcaaatagaaggacgaatttgtaataaatctcaagccggatcgatcctgaatagatgaagaagaagacgatgatttcttggtaggaggagagaggaagagaaa

SEQ ID NO: 145831 - DNA, 715 bp, Arabidopsis thaliana landsberg
cgcgtctctctctatctccttagattttcaaagttttcaactttcaacaaaatcattattttaattttgcagagacgaatcgaatcgatctcatctccaaaaatcttgtattcgaagtttatttttctgggtttcttctgtattatctcgatttttgaaaaaaatggcgaaggaaattgaatcagcgacagatttaggtgatactaacatcaaaggagttcttgttcatggaggaagatattttcaatacaatgtttatggaaacttgtttgaagtttctaataagtatgttcctcctattcgacctattggtagaggagcttacggttttgtctggtacaacttctacccttttgtgtatttcatattcttgtttctttcttagtatttgtaaccctaattagataaagaactaagtattggtataggtttttgaattagggttgcttgcaaaatttgatcttttttggatttaagaaggttctgtcttcaaaatcatagtttaaattgaatgaatttgatgatttgtttgtgtttgtgtttatgtataagcaaaatgattcatgagagtattggtttattgttatagtgctgcagtagattcggagacacacgaagagattgcgataaagaagataggtaaagcctttgataataaagtagatgcaaagagaacattgagagagattaagctacttcgtcaattagaacacga

SEQ ID NO: 145832 - DNA, 721 bp, Arabidopsis thaliana landsberg
aatttagaactttgaaggaagaaaaaggtattccgacgggcgaaatctgttggcgaaatcgaaaatgggctcgatgaaattgggggtttagggttcatcaaaatttgacgaaacaacaacagagaaagagagaaatggggagtttagtgaaagcatattactgtaaccagatgcatcacagcagcatcatcccccactttcaccattacagaccttcaagccttcaaaaccctatctccctcttcgccatcacttctccctcctcctctgaacctccttctcctcctgttaaacatccccttcctcaattcggcggcggcggccacttcatcatccccaccatcgccgtcgctgcttccgcctggttcttcttccgtctacaccaataccctcctatcatcacctcccccgttgatctccacctcgatttggaagaagaaggcgctatcaaagagcttcctttggagagcaagcctggttacgttaaagctcttcacttctacaaaatcaagccaggtaccgtcttgaaactcttggacgttttcgactccgacagctacgactccttgaaagcccggattcgtttatccgccgagtggttagaaactgccaggagagaattggaggaggtggttgagagagaccctggtcgggtcatggagtattctcaggtggttgatgagctcatggagattctcagggacatggaggtttacattga

SEQ ID NO: 145833 - DNA, 447 bp, Arabidopsis thaliana landsberg
gagagacactatgaatcttccatcgtcaacgacggcgacgtcaacctccgcgacttccgatgcagcggcgaattccaccgaaagatgcgatgattgcggaagctcagacgcctgggtgatacacacagtacgtctccgtgcatctctccgcttcttctgcactcattgtctcctccgcaaccatccggcgtcgttttgtcccggttgcttcgccttgtacgattcatctccgccgtcttttcgccgcgtctcttgttccattaaagggtgccactccttgactcacattcactgtgccggcgatgaaagtcacctttcttatctctgtcctccttgccgagaccctaattccttctccttcttccgccctatcgtcgacgaaaacggctctcgcttcgtcgataaagcactctccgaagctttcttatgcgccgctaagatcgctgc

SEQ ID NO: 145834 - DNA, 495 bp, Arabidopsis thaliana landsberg
gttttctagatttaagcactatctaagaaaaacaaaatcaaactcataaagaataatgggagaaacagaagagaaagtgaagaaccatgataacaaagaagaggaacacaacaaggctgagaaagctgagaagaaggagaagaagaaggataaagataagaaggataagaacgaggacgataaaaatggtggaggagaagaaggggaagatcaagagaagaagagcaagaagaaagataagaaggcgaagaaagagaagaaccctgaagataagaaagatccagagaagttgaagatgaagcttcagaagattgaagaaaagattcaagctatggtcttaaagaaagatgagattgtgaagcttattcatgatgctgaacaagctaagcctagtactgctgcagtagatgcaccaccaccaactaactaattcaaatacacaaattatatactacaataagttaactaatatatttgtcaataacaaatgctgct

SEQ ID NO: 145835 - DNA, 373 bp, Arabidopsis thaliana landsberg
gcgaatttacaccacctctaacctcagaaagaacctcgtttatatcggtactgtcagatgtatcatcgacgggttccatagcaccgtttagccaatcggtgtattctacgtctccccgtgtatcgacatcctcttcgcctgagctcacatcgactatatcaacatgattacccgaacccattgacaaaattttcgtaactgatcgcagaaattcgcggcgattttgaagtagaatcagttggcatgtgagaacactataattcagtaaattgaccgaattctaatacccgggaaaaatcgaggtaagaagaagcaatgaaatggaaacttcgagctgagaaattagggtttggtttggaatcaaaaagcggat

SEQ ID NO: 145836 - DNA, 1069 bp, Arabidopsis thaliana landsberg
  unsure (1)..(1069): unsure at all n locations
cttctctctctctctttagctcttttttttttgttttcattaaagtttttattttattttctaccaaccaaaagcttttctctttggtttctcttatttagcttctaaccttgaggagaatcataccagaggattgaagtttgaaccttcaaagatcaaaatcaagaaaccaaaaaaaaacaaaaaaaatgtgggatctaaacgacgcaccacaccaaacacaaagagaagaagaatctgaagagttttgttattcttcaccaagtaaacgggttggatctttctctaattctagctcttcagctgttgttatcgaagatggatccgatgacgatgaacttaaccgggtcagacccaataacccacttgtcacccatcagttcttccctgagatggattctaacggcggtggtgttgcttctggctttcctcgggctcactggtttggtgttaagttttgtcagtcggatctagccaccggatcgtccgcgggtaaagctaccaacgttgccgctgccgtagtggagccggcacagccgttgaaaaagagtcggcgtggaccaagatcaagaagttctcagtatagaggtgttacgttttaccggcgtaccggaagatgggaatctcatatttggtaataatctcatatttttaatttcgttaatcgatcgtactttagattataaatttaagtttttttttgtttgtnnnnnnnnnnnnnnnnnnntgtgggaaacaagtttacttaggtaattttattttcctcatgtttttttttgtattttggtgttgaaaaatgtcatcataattttaatttattataatctctgaataggtggatttgacactgctcatgcagcagctcggtatttttctctctttgactctctctatattgagttgttatttatttatttttttaaaaataccggaagaaatttataaaaattaattttaattttgttttatttaatagagcatatgatagagctgctattaaattccgtggagtagaagcggatatcaatttcaacatcgaagattatgatgatgacttgaaacaggtaaa

SEQ ID NO: 145837 - DNA, 353 bp, Arabidopsis thaliana landsberg
tatcaatggaatctacaagaaccacattcagaaactcagatcatggcctccaaattttgaagtctagggactcatcataatccatattacaaaacacaagatcacatatgcacgacactaaaagaatgggatcagaacaaggcaaaatcacaatagtctcaaatgatttaaaacagatatactcaaacagtttaaaacacagtcttgttgtctattctaccgcttctcgccgcacaaacaagtagcagcttgaagagcgaagtacgtgaggatgatgtccgctccagctctgcgtaaacacatcagtgactccatcatcactttctcttcatcgatcattttcaggactcccc

SEQ ID NO: 145838 - DNA, 340 bp, Arabidopsis thaliana landsberg
agggaagaaacatcatttgtttaataagagtgataaaacatttgtgaacagacattgttatcgttatgaaaattattaagcaatttattcagaggcttgaccactgattcggaaacaactctagccaaaaaagcaacaagcacacaatatgtaaaaactggaagttactccttcaactgcggatcgctgggtgtagcagctgggatctctgttttagactctgcaattagaccttcaagcgttttatagaactgctcaggaagaggaccaggtcggtgctgaggaacattgcttggaaatcgcgcatcattctcaatcacttcacactcgtaatcatctg

SEQ ID NO: 145839 - DNA, 742 bp, Arabidopsis thaliana landsberg
gagctgaagtcagtcatgggtaaaaaaaacagtcaagattctggtttgtggtgtgatgtgaatgttcagaagagtggtggagtcagcagcacaccgagtatgagaggtacggtgtgttacattgcaccagaatgtggaggaggaggtgtgttgtctgagaaatgcgatgtttatagttttggggttctgcttttggttcttgtctcaggaagacggccattgcaggtgactgcttcgccgatgtcggagtttgagagggctaacttgatttcatgggctaagcaattagcttgcaatggtaaattgttggagttagttgataaatctatacactctttggagaaagagcaagcggttctttgtattactattgcattgctttgtctgcaaagatctccggttaagagaccaacgatgaaggagattgttgagatgctttcgggtgtgtctgagccaccgcatttgccgtttgagttctcaccctcgccgcctatgggttttccgtttaagtcaaggaagaaagcacggtgaaattcgggtttggttatgacttatgagctcagtcatcaagtgtaggatttttccggtccaaagctaaaccaattgcgagttgtaggaactatttgattccgtaagattagctttttgcaaatatttatgaatatttagttgcttaacaaattagtttagacaataaagaagttccaattgacatcaagaagatgatcatgattatagttta

SEQ ID NO: 145840 - DNA, 210 bp, Arabidopsis thaliana landsberg
attaggtctagcgaatacatgtttcgtcggtctaatcgcttttcttactcttttctcaaacacgttccactcaatcgtactgttcttcaacaatatgtccgaaagtctccgtttgttcggtcttatcgtcggcaatttccctcctccgtaataaatccgataacccgatacaagagatgataactgactccctgaatccggcatcgcaaa

SEQ ID NO: 145841 - DNA, 118 bp, Arabidopsis thaliana landsberg
ctaacttccaaacggatcctcctacatctatatataaacgctggtttatcaagaatacgcaagaaaagcacttcgaattgttgattcagcgccagagatggcttagaaccaatagttc

SEQ ID NO: 145842 - DNA, 798 bp, Arabidopsis thaliana landsberg
gttttccccacaacaaactcaaaccgggaaatacgaatagcataactacattgctcatgatcatacctcgacttttaaatgacctacaaagttatcaggtgattcaacttttatgttttttttaggggtttagtatattcaaattaaactaagggatgttaaccctcactagataattttgttattaaactatcaaatttgtcatgcaacgttatttttcagaaggaacaagaacaagggaagatcaactccgtgctgctccacatgaagaatcatccaggtctggagattgagaactcgatcgctcatatcgaaaagattatcgattcaaaaaggaaagagtttttggagcatgtactagttgatgccccaagcgctttgccaaaaccgtgcaaggagattcacatgtcttgttgtaaagtcttcgagatgttttttaacaagaagaaccgttatgattcaaacacggagatgcttcatgacattaagaaggctctctatgatcccatcaatgtttatgaactatcagagatggagcctatgccactgatggcacatggtgatgaatatatgattcttcctttgcttttgaacagtttgccaaatattcttgaatttaagaggaaggacggatacggagcaatgaaaacatctatgtgctttggaagaagttatcgtgttaataaacgcgttatggcctcacagcttgatgatcaacataagcctctcaagattgttgcgtcgcaccggaaaccggtaccaatgatgcaatcgatattcgcaccatgcttctactaa

SEQ ID NO: 145843 - DNA, 162 bp, Arabidopsis thaliana landsberg
ctgtactctgtgtacatctttggaaccaagacatctttgatgccaccatacaacttcctattcaagcatacagaatgttactttagggaatccctaatagaagatttaaccattagatgagctaataatgttgtagacaagaaatatcatgttatccagtac

SEQ ID NO: 145844 - DNA, 253 bp, Arabidopsis thaliana landsberg
ctggacaaaaagggtcacacacagagatttacttaaccaacactacagaatgtgaagtcgaatacatcaacttttgtcacagaaactcatgagatttcttgtgaattgtccttttcagccgtagcaaaaagccaactattaccgcttttgacacaggcaagattatcaaattttccccctaaaccggatgaagttactttcgtcgggcatgatacgaaccaccacctccttgatgataataaaaccggtgacg

SEQ ID NO: 145845 - DNA, 149 bp, Arabidopsis thaliana landsberg
tggaaattaaggattttttcgcttgagaagacgcgtaaacgctagggtttttcgcttcaatccaaaccctgtgtccctgtcactgcaaagcctatcgagaaaaagcttctccaagacggcgctcgaagcaggggaaaaacctctggtgg

SEQ ID NO: 145846 - DNA, 316 bp, Arabidopsis thaliana landsberg
  unsure (1)..(316): unsure at all n locations
tacacagtgatggcttcgtctctgaccactagattatcggcgctaatcggatctcgacggagttttccgatcgtcggagcgttttgcgttctgtcaactctctcaatctcttctctttcttcttcatctcccttcaaatcgggttgtgcacagtctttctctgttgttcctctcttaaggttagtattttcgaataaacgtcgattctttttgttcagttttgttaataaagctcatgaattggaaatttataggtctaagtttagcagtaaggcttnttcttcgtcgatcagaatggaggagagcagcaaaactg

SEQ ID NO: 145847 - DNA, 309 bp, Arabidopsis thaliana landsberg
aactatggttcgtttggatcaaaccagcagcaattctattccaacaatcagtcaatgcaaacaatcttagctgttaaacagttccagcaacttcagattcattcacagaagcagcaacaacaacaacaacaacaacaacagcaacaccaacagcagcagcagcaacagcaacagtatcagtttcaacagcaacagatgcaacagcttatgcagcagcggcttcaacagcaagaacaacaaaatggagtaagactcaagccttcacaagcccagaaagagaactgaggaatatgaatatgtcccacgtaa

SEQ ID NO: 145848 - DNA, 319 bp, Arabidopsis thaliana landsberg
gactcggaaaaaaatcagtcgccggcgatcgaaaacgacaactcgccgaacgtctttctctcttcttcaagcaaacactttcacatctctctctctctctctcatatttatgatgatcgtctgctactagagatcactataaccagatcatcttctttattcgtcggttaacgtctcaatcactctctggtaatttcaaatctttaagattttgcttctgaaatttttctgaatggtttcttttaaatttctcattcgatttacataaatttgctcttcttattggtgtgtctgcagttcggagttttgaatagagatc

SEQ ID NO: 145849 - DNA, 164 bp, Arabidopsis thaliana landsberg
tctctccgcctctgtctccgtcgagactctgaagtctatatctctctatcactcatcttctccgacgcctctcgttcatccaaaaagctttcctatctgtagatttttcaatccctttttttagcgattcagatctttagattatttttttcccgatcgatttc

SEQ ID NO: 145850 - DNA, 375 bp, Arabidopsis thaliana landsberg
accaatacgacgtcgtttattggatccagcattggaattcacccatcccgccacattgctatcccactgacggcaaagattgacaaaaaaaaacctaattttcattttcagctctcttcacactacaaacctcttaatctggtgattttgatgggtccaagtaagtttccttatttcttcttctgattcttgttctcacgcagtgtttgcctttaattctactccatcagttagctttctttgtttctcgttggcaatgttagaattgtgtacaaagacaaaaccacctgggaactgttttgttttatagtttgagaatgtcgtgtttggactgtattgagttccgttttaaagcctgttgtgttctaacttgtt

SEQ ID NO: 145851 - DNA, 446 bp, Arabidopsis thaliana landsberg
cgactccatcaacatcctctgcttccgattggaaaacccatcatgaccttgttccgagtagccacagaaatatcttcaattctcttacaacgtcgtaactggatcattcatctccaatatgttaaatccaagctcccaaggtcaacacttacttcacctgtattcctccagatcctccgtgaaactcgaaaatgccctaaaaccactcttgatttcttcgattttgccaaaacccatcttcggttcgagccggatcttaagtctcattgtcgagtaattgaagttgctgctgaatcaggtctcttggaacgagcagaaatgctcttgcgtcctctggttgaaaccaattctgtgtctttagttgttggagaaatgcatcggtggtttgaaggtgaagtttcactgtctgtctcgcttagcttagtgcttgagtattatgccttaaa

SEQ ID NO: 145852 - DNA, 74 bp, Arabidopsis thaliana landsberg
ggcccagcccagaccagcccattagaaactatccatacactgggcttggcccatttaagtgacttcattttttc

SEQ ID NO: 145853 - DNA, 390 bp, Arabidopsis thaliana landsberg
ttcaatcactgatcgattagcatagaataggtccggcctgttgaaatccccaagagtacgacgtggttccgcagatggaagaataactacaggaatctggggttggtgttgatagacacctctgttgtgtcgctcgacaccaatcgcatcttcgttctggtcctgaaggtgtcgatcgacacctagttggtgtcgctcgacactgagccctgctgcatctctggcagctaattgtgcattgaggcgcgcctgatcctcattggcgtcctcagggtggataagtacatgatcatccaatctctgacaagcctcattgtaggcttgcccatcctcatctctcaaactccttcctcatcagctctgatggctctgttagccattgctaatctc

SEQ ID NO: 145854 - DNA, 709 bp, Arabidopsis thaliana landsberg
ctcttctttctgactcataacccaaatttctgagaatcagagccttattcaagagaacaccaaggtcagcattttcttctactctctcgatctcaatttctctctttatccttgtgatctatttctctctcgtctacaatttgagctacttttcttgttattatcgtcacgttgtgtgtcgcgtagtggatttgagtgattggttgattgattgatggtttttttcaagaaacgcgtagagtttggtggaagttgttgaaattcgaagccgatcgcggactcgtttgctcttgattacgtcgcaatccgtacgattttccgatcaaacgtaagcttgaatctctttcccttttgttttgttcgcaagcgtgtttgatttctgttaatatttcttgatttcccctttttgcggaattgattccggtttttatattcccatattatttttttattaacatgaaatgagaatcatgattctagtttggtaaacggttggtgttcttataaaatgcttgatagatttccatctgggttttggttgttgctgtagttaagagtgaaggagatagatttgtagaaaaaggaagagaataagagtgagcttgtggccaaaaaagggatgcctttgaacttaggcaacgatggcgatgggtcttcccggattattttgactgagcctcgcggatctactgctgaggttttactcctt

SEQ ID NO: 145855 - DNA, 125 bp, Arabidopsis thaliana landsberg
gctccgtcgctcagataggatctcaacaaggacaccacaaaccctaaatttcgtcaactccacagcaactcgattcgatcaaggaaatggcgtacgcttctcgttttctctccagatctaagcag

SEQ ID NO: 145856 - DNA, 372 bp, Arabidopsis thaliana landsberg
ttctagttcttgagtttgacttgttaaacccctaaaaatagtacctataagaggcttctttttcaacttctcattcttcatttccggcgaagttatggaccgatcaacgccggaacataactcatctccctcacacaagcgtctaagcgtgagctttctcgtctcaatgatggttctctgcgccaggcatgcgaatcggctctcgaagaaactaaagctgaagtcaaagaagcgaacttgcagcggcggagaggatggaggagaaagattccgatggaatatgataagctcgtcgatgagttctcctcggccaaaagagttgttcacggctttaagcaacaaggcgatgaccatggtccgccggaaaaaccc

SEQ ID NO: 145857 - DNA, 361 bp, Arabidopsis thaliana landsberg
acttttgttgttgttgtttatttaatgttttccttcttctaggtttttgtagtttgtacgatctttggatcaatcaatggatcttttgtttgcttagttaatgtttttaattttggtttgctttttttttttagtctttttattttgttttgtttgtcttttacccggatcgtacttgtaatcagcttctgttgcttctagtttatgcttctgtcttttttacatttaagcttaacacaaacaattctgctgtactaacttagatagccaaatacaaaacactataattaacattttaatacaagaaaacaaaaaaataataatgcaaacattgtaaacgtataatgcagccattatagta

SEQ ID NO: 145858 - DNA, 448 bp, Arabidopsis thaliana landsberg
aacactctggtgaggagcggtggcgcgtggctggtatcgccgtcaatggcagtggcggctctgaggaggatgagagtgtctggtttagccacgtcatcatcatcttctgttcctaattggaaaggtggagtttccatggtccaaggagcttccagaggcattggtctcgaatttgtgagcctctttcttaatccatttctctctttcatttacccaaatcctgaaatttagtgactcatttgagagagatctaaatttggctgatttagttcagctttttgacgttgctctttaggtacgacagttgctggagaacaataagaacgggtatgttgttgctacttgccgaaatccaaaagaagcaacaagtctctctgatttgaagaaccgtttctctgaaagacttttcatccaaaagcttgatgttacagatgaaactaccattgag

SEQ ID NO: 145859 - DNA, 1183 bp, Arabidopsis thaliana landsberg
ctctctgttcttctaaatatttccaaacttgattacttaggtggcgaagagattagagaagttcaagactactattttcactcaaatgagcatattggcagttaaacatggagcgatcaatttaggccaaggctttcccaatttcgacggtcctgattttgttaaagaagctgcgatccaagctattaaagatggtaaaaaccagtatgctcgtggatacggcattcctcagctcaactctgctatagctgcgcggtttcgtgaagatacgggtcttgttgttgatcctgagaaagaagttactgttacatctggttgcacagaagccatagctgcagctatgttgggtttaataaaccctggtgatgaagtcattctctttgcaccgttttatgattcctatgaagcaacactctctatggctggtgctaaagtaaaaggaatcactttacgtccaccggacttctccatccctttttatgattttaaagctgcggtaactaacaagactcgagccatccttatgaacactccgcacaacccgaccgggaagatgttcactagggaggagcttgaaaccattgcatctctctgcattgaaaacgatgtgcttgtgttctcggatgaagtatacgataagcttgcgtttgaaatggatcacatttctatagcttctcttcccggtatgtatgaaagaactgtgaccatgaattccctgggaaagactttctctttaaccggatggaagatcggctgggcgattgcgccgcctcatctgacttggggagttcgacaagcacactcttacctcacattcgccacatcaacaccagcacaatgggcagccgttgcagctctcaaggcaccagagtcttacttcaaagagctgaaaagagattacaatgcgaaaaaggagactctggttaagggtttgaaggaagtcggatttacagtgttcccatcgagcgggacttactttgtggttgctgatcacactccatttggaatggagaacgatgttgctttctgtgagtatcttattgaagaagttggggtcgttgcgatcccaacgagcgtcttttatctgaatccagaagaagggaagaatttggttaggtttgcgttctgtaaagacgaagagacgttgcgtggtgcaattgagaggatgaagcagaagcttaag

SEQ ID NO: 145860 - DNA, 294 bp, Arabidopsis thaliana landsberg
actctattactgattggtattaaagctgtatgagaaaggttacctatcacacttttgagaattacaaaaactaaaaacgagttttccaccattggggataggaaattacaagcaaacattcattaatcataacccaaaattttctctcagtaaattttacatttcccgtgaaaacacgaaggaaaattcccaacaataaaaaaaagacaagactgagagaagaaaagaaaacaaaaaaggtcacgggctcgttgtttcttcattttctttggctttctctctgtctcccatttt

SEQ ID NO: 145861 - DNA, 210 bp, Arabidopsis thaliana landsberg
ttgatcgtaccattgggagaaacttgtaaatctcacacgaagtatcaatcaaaatgttttgttgtttcttctccttaacaactcgaataataacatggaaacgaatttggaatatgttcatgttctctattcgttttgtatagtttcatcatcatggatataaaagtgaacataaataaaaatttgtaaattttttgtaccgcaatgaaa

SEQ ID NO: 145862 - DNA, 357 bp, Arabidopsis thaliana landsberg
ccttattctgaagatctgtcgactttgaagaatccaaggccttgtgtaagaattcaaggagcacagatgaaatttctgcggagaaagaagggtataactcaacaaggctgcttacaatcttccttatccttttattagaacctgaaaatcacaaaaataaccttatatgaccttacgaattaacagatatgcgaagttaaacacgaaaatgcaacccaaaattatttccatctctaaagctggaaaaataatctagtgcagccaaaaccaatgtatcatgtcattataaacttcatcgaggtaaacaagcaagacaccgatgggatcattcccatttttttgcttggtgttactact

SEQ ID NO: 145863 - DNA, 1100 bp, Arabidopsis thaliana landsberg
atgattttttcaattttagagcatatattaactcatatatctttttcggtcgtttcaattgtgctgacaatttattttttaactttattagttaatttagatgaaatcataggattttttgattcatcagataaaggaatcataattacgttttttggtataacaggattattattaactcgttggatttattcaggacattttccattaagtaatttatatgaatcattaattttactttcgtgggctttggcaattatccatatggtttcctattttaataaaaaaccacaaaaataagttaaacccaataactgcgccaagtgttatttttattcagggttttgctacttcaggtcttttaaacaaaatgcctcagtctgcaatattagtaccagctctccagtcccagtggttaatgatgcacgtaagtatgatgatattaggctatggcgctctgttatgcggatcattattatcaatagctcttctagtgattacatttcgcaaagtcggacctactttttggaaaaagaatataaaaaaaaaatttttattaaatgaattattttcttttgatgtactttactacataaatgaaagaaattctattttactacaacaaaacattaattttagtttttctagaaattattataggtatcaactgattcaacaattagatttttggagttttcgtattattagtcttggatttatctttttaaccgtcggcattctttcaggagctgtctgggctaatgagacatggggttcatattggaactgggaccccaaaagaaacttgggcatttattacttggactatattcgcaatttatttacatattaaaacaaataggaatgttaggggtataaattctgcaattgtggctttgatcggttttattttaatttggatatgctattttggcgtcaatcttttaggaataggtttacatagttatggttcatttacatcgaattaaagtaacaaataagaaggaatcgaaatctaaataaaaaaatagcatctatatctaacttcatataagttaagaaatctcatttagttttagtagtaaatcataaagaacctt

SEQ ID NO: 145864 - DNA, 589 bp, Arabidopsis thaliana landsberg
gctggtggaagattcaatgttgaaacttgatagaatctgtcgagatgcaaacgttaagttggttttggttcgctcttatggccttgctgggtttgttcgcatctctgtaaaggtaattaataccacctgtctagacccaatttgtgataaagtttagattactttgtggtatgccgtggttaggatattggccaatgagaatatatgctaagctctcttcttttcttttttatcaggagcaccccataattgactcaaaacctgatcattttcttgacgacctccgcctgaataatccatggcctgaactcaagaggtccactgctctcatatcctctcactttatgttgttctggcatcctttaacattatggttgtggatggacgactgagtacttactgatattcttaattatttaatgaacggcagttttgtggagaccattgatctgaatgtatcagagccggccgctgcacataagcacataccttacgtcgtcattcttgtaaagatggctgaggagtgggctcaatcccatagtggtaatcttccctcaaccagggaagagaaaaaagagtttaaggtctt

SEQ ID NO: 145865 - DNA, 521 bp, Arabidopsis thaliana landsberg
atcaaggacacgtcaataataaagctgagaaatctggtttagaggattcaaatgcagatggctccaaagggaggtcactatctccagaaactttggcattgatgtgtgacgaacgggacacaatgttaatggttgcagcttcacctaattgttcggtggagcctacgtcacagctaccaaacgggcaagaccaggtttatgcagaacaagaaaaagtagtattaaccaagttccgtgactgccttaaccgaataatctcctgtggagaagtaaaaggtaaccatttcttatatcatcaagaaaatggagtatatgcccaaacataaagattcacttattcaaacctagttttttgtttgtttgttgcagaatcaaattgttctatgtcaagaatggatctagatacacctgtacaaacgactgtcagaatcgacctcatggttcaacaagctccagttgcaaatggagtttcacaaaccgcaaagcaacctttccagctaaacacaacaacaccaaacaca

SEQ ID NO: 145866 - DNA, 365 bp, Arabidopsis thaliana landsberg
ttccgaacactgctaatgtattctgcaggcgttctattagctagagcattttccttaacacattccgggccttcaacttccgctttgttggcatcaccatcattacccttcacttccttaagctcttccaaccgttcaggaacatctggataaagagtttcttccaacttcactccatgaaggttctccttataatcctcatctttgtcacctttctcgtcaaccgtatctgtaatcttattggcactagcagtgattgtgccatctctatgatcgtgttcaatagccaaagctgtagaagtatcattcacgttgttttgagaaacatgcatggactcagtcgcatgctcaggcacattttccgc

SEQ ID NO: 145867 - DNA, 172 bp, Arabidopsis thaliana landsberg
caggtaatttaagagcaagctgaacggtcaacacttacgcccaacaaaaatctatggggtaccaaatatttgaatgccacctatctgctttttcttttatatatactgaaaagtgaaaagggatgaatctatgaattggtagctttataactaaagaacgaattaagcaaaa

SEQ ID NO: 145868 - DNA, 286 bp, Arabidopsis thaliana landsberg
tagcatagaaggaatcaatgcttgttcctataccagcatcctgccaagtaaacactaccattttagaatttgggtgacaaaaaaagactaattagtttgttgaagtaaagttcatcaaaccgtagttcttctgacatatacagaagccattttttgttaccttctgtgtccattcacctgtaaagacattgatgtgagcaccaaccaagtcgagatttgaacgacgtgcccatagtcccctcaccgcattctttgcaacttgttcgaaaacttcaagtttaacaaa

SEQ ID NO: 145869 - DNA, 944 bp, Arabidopsis thaliana landsberg
gatacatcggtttttgtaagaaactcggaagaaatgttgtcgatacctggatttgtaaaccctgtcccagccaatgttctgccgtcagctctgtttgttgaagatggttatgatgcttacgttaagctggccatattgtttacaaaggccaatggaatcctagtgaatagctcctttgatattgagccttactctgtgaatcattttcttcaagaacagaattatccttctgtttatgctgttggccccatatttgacttgaaagcccagcctcatccagagcaggacctaacccgtcgtgacgagttgatgaaatggcttgatgatcaacccgaggcatcggttgtattcctttgttttgggagtatggcaaggttaagaggttctctagtgaaggaaatagctcatggacttgagctatgtcaatacagattcctctggtcactccgtacagaagaggtgacaaaggatgatttgccagaggggttccttgaccgtgtcgatggacgtggaatgatatgtggttggtctcctcaggtagaaatactggcccataaggcagtgggaggctttgtttctcactgtggatggaactcaatagtagagagtttgtggtttggtgtgccaattgtgacatggccaatgtatgcagagcaacaactcaatgcgtttctgatggtgaaggaactgaagctagctgtggagctgaagcttgattacagggtacatagtgatgagatagtaaacgcaaacgagatagagaccgctattcgttgtgtaatggacaaggataataatgttgtgaggaaacgagtgatggatatctcgcagatgatccagagagctacgaagaatggtggatcttcgtttgccgcaattgagaaattcatatatgacgtgataggaattaagccctagccttttcttgtccaataagctataac

SEQ ID NO: 145870 - DNA, 227 bp, Arabidopsis thaliana landsberg
ctcttttttcaatctcgtttaaaattaacataatgatgccgccagtgaagaaaagtatcgccattagaccggtgtcgttctacggaaatgggcttcctcgtcctcgtttcttcgataatcctaagttcaatgattaccgtgttgatcctcccctctctgtgctagatcctcttctctcatgggcgagagacgctcactggtcaatgggtggtctcaacttcacgggt

SEQ ID NO: 145871 - DNA, 360 bp, Arabidopsis thaliana landsberg
acaatgataaaacagaaagttgattcagccacagagagaaccaccgattgaaacctttaagagaatccatcttggttcctatctttgggttgacttcatttgtggaggcttaagctatcggatggggatcattaatcatctttgagtgaggcagagatttctctctaggagctctctttcgttttatttatatgtcgacattatataatgtgtttttctctgggagagaagcagatttggagttagagaagtactattttcatttgttcttttaataactttgttgcaatttgttgaagttttgtttcccttgagttctttctgttgtaacaatttacaataaccagccattacattgca

SEQ ID NO: 145872 - DNA, 300 bp, Arabidopsis thaliana landsberg
caaagttatgttttctaccaacaacgtacagagatctcaattattcttaaacacaaaggtttgatcaacgacttgcttatttccatggggcagcgagaattgcctgaaattcgtgatctacattctgaacctcttggtcaagaacagctgcttgagactgcatccgagctatctcattgtctagtgtgacttttgcttccttcatcaacacttcttgcctctgcaattcaacaatatcttcttcatacttccttcttttattggcattctctgtgatcttttcctcaacagcttttaatt

SEQ ID NO: 145873 - DNA, 522 bp, Arabidopsis thaliana landsberg
gttgtgaagaagattggtatggtgggactgttcacaagagggcttcctcttagaattgtgatgatcgggacgttgactggagcacagtggggattatacgatgccttcaaagtgtttgttggcctgtaagttcctctctctcttcacttactttcgtaccttaattgtaccttcaaaatgcaaaactctcaattcttttgatttggtattcaggccaaccactggtggtgttgctccagctcctgccatcgcagctactgaagccaaagcctaaacaatgacgaaaaaggttattaggagttcgatggggtaggatttttgtttggaaaaataagagaaaccatacggtgatgaggaagagtgagtaagctcaatttcttcctgatttgaactttatcatttttgttttttttgaaatttgtgttcctgaattcaggataatgctctctctctctttacatactctcttcctattggttcttgtccttttttctttgtgtgatgtaatcttaaaagatgaga

SEQ ID NO: 145874 - DNA, 408 bp, Arabidopsis thaliana landsberg
aaattatgagtcgagtacagcttggaccttcaacactagtcgacattcaactggcatttaatcttggacgaattcaattccaactaattcggtagaatctagaatagtgagatggaagacccctctccttatcagtttcctatggaccttcgactagatcacacgagctactcccaccttgttcaactgtgtgatttgtcgttttccgagattcggtttcttcttttttcttgatccgaggtaaggtgctttttttgatcgatcaacaggtaatatagaaggatgaggctgtgatttacctagtgaatcaacaagatcgaaacacaccaatcgatcaaatcatttttgaaaaacttgtacatcgtctgatgtagccttttgcttcgcgatattcaagtttgggttttt

SEQ ID NO: 145875 - DNA, 255 bp, Arabidopsis thaliana landsberg
gttatggaagaagcgaggaagcataagagagaaacgtcatcaaaatcatacacgaacggtcttcaattcaagatccagaaacccatttcaaaagacaacccgacccggtccacaatgcacaacgacaagaagaagaaacggtgttggtggaagaaagctctcccttttttcaaatggcggaaatggccaatctccaccgtcggcgtgaacgaagatcgtagggtcaggaactttcgctccgtaaccgggtccatg

SEQ ID NO: 145876 - DNA, 116 bp, Arabidopsis thaliana landsberg
gttcaggctccttctctctttttctctttcactcagccacgaacgaaccttccccttgaggcttaatccaatcttcttcttacataaacacctctcctgccccaccgtttccaaaa

SEQ ID NO: 145877 - DNA, 302 bp, Arabidopsis thaliana landsberg
tttagttaaaacattttttaaaccaaatcaaaacagataaccaaaagaaaagaaaatggaaaaatcaaacgttttcctcctctccatacttctcatggcttcactcttctccatatcccacgcctttcaactctggggctacgcaatcgaccgagtcagcattcgtggtgtcgtgtattgtagccttgacggagatccaagcgcaccacctgtctccaatgccacagtctatattgaatgtccaggcggctcaaactcaaccctcgctcaagcagtgaccaatcaggttggtgtatttaccc

SEQ ID NO: 145878 - DNA, 356 bp, Arabidopsis thaliana landsberg
aagtgctgatcattctcatctacaactacaagcctacgtgctctcggatacaaagggtacaacttttaattttccacttaatcattggagtccaatccttacagttcttgctgtatgttaacaaatattggatcatgtatgatcaacctcgttgggtttttttttgcaggagcggtgcacgacgaggtttatattttcacgtaacaaagatcccttctctgtgtgttttcgccaaaacatagcaatttatattagttactaagagcaatacagtgtttctccttatccaccattgattgtaagttgtaaccaaggtgttgaactataatttaaaaaaacacagtatagatcacatg

SEQ ID NO: 145879 - DNA, 389 bp, Arabidopsis thaliana landsberg
tacacgaagagtttacaccgttgatctttgaaggcatttcgtacagttaatatcggacggttgataattgggatgctgtctgtcacatcgtaaggcgtgtcatacacaccaatttcattttataaataattaatacatcctaaattactgaattcttatcaagaaaattgattcgatttgttcaaaatatatatgataatgagatatagcaaatgagatcacgagtcaatttatgtagattgaattagttgatattttatggaatcatccgatgataaaattgagtatctccgtatatttagcttacgaaaatataccattcaattctccctctctcatatttattttgttcttttttcgattaaacatgagctaaaaatggtgacaca

SEQ ID NO: 145880 - DNA, 371 bp, Arabidopsis thaliana landsberg
gtaaacgaattattattgatttgatgaattattcttttaatgactagatgatctataaccgataagcatatgaattcctaaaacttacatcttgtaggaatccctaaagactatagtaactatattatatacaacacaaaaaccttttggtacttaagatacaaacatatactatgagctacaatgaaaaataatatatactataatacagaactaatttaagggatcgtagtggtggataaaagcgtcgatctggcacaacatctccagagttgtggtgtgagcaagctgagactttccgagaatatgaaacgcgtgaccaacgcctttgtgcaacacgcgcttgatcacgtcctcattaccatcgcaca

SEQ ID NO: 145881 - DNA, 284 bp, Arabidopsis thaliana landsberg
gaagtatggagtctagcttgcatagtgtgattttcttaggtttgcttgcgacgattctggttacgaccaatggccaaggtgaatatgtgtatgcacattgtttcttttgacagacctcaccaaaaattgtttcttttgacagtagttaaaaatagtagtgaatatgggatatcatctgggatcatgtgttatgtgtaggagacgggacggggctaaatgcagaagaaatgtggccagtgaaaggtggggatggagtatagagtatggaggagaaagctgatgac

SEQ ID NO: 145882 - DNA, 203 bp, Arabidopsis thaliana landsberg
ttgtgctgccatatgctgctgttgtgtcctggatgcatgcttctgagacttcggaattaacgatttcatgcaaattattgatgtaataaaagagtatttgatgctagttatgttacctactctctgtttggaatatactctgtggatggttgttactatgttttatgtaagtgattatatatatatatatatattccgttgaa

SEQ ID NO: 145883 - DNA, 415 bp, Arabidopsis thaliana landsberg
tgaaatggaaatggtatgaatcatacaacactctttattgtacataatgtttttgcacactcactctcacaatgtatacgaacgtttagtgtatatctaagattgaatctcagaacctaaattctctattcaatcatttgaattgcctgccatgccgactagtttgagcatgttgcgatcttccttaaacctctccagaacagtacctttcatggcgttatgtttggtgtcttgttcatttgaggcctgaacgattccccagcattctatcacttctggctgaattctgctcgtcttggaaaggctcgggctaccaaacgttgtgcattcgaatgtctggccttgatcgaagcttgctgatataaacaggccaaagtgatttatcttacctccaaatcctatcccattcggaatg

SEQ ID NO: 145884 - DNA, 198 bp, Arabidopsis thaliana landsberg
aggagagcagagcggaagcggagagatcggaagtagagagtgatgatttgcagatcctttggtttgttcaacgaagagagagacaaatactggtattgaacactgcttatgttgtacacgtactattcaatgaccgtgcgggtctactttgtcatttggctccgccgagtttgataaatgacttgccagacttcagat

SEQ ID NO: 145885 - DNA, 278 bp, Arabidopsis thaliana landsberg
tctctttgtataagtaaacttcttattctaataaaaatgtaagatttgtggatccactactttaatttctgtcgattttagtatgattgaaacattaacaccgataaagtcaggtcccctggtcgtcttttggttcataaaggtaatcccattttggcgaaatttgtttgaacttggaagtggaagaagtgaaaatacatgtagcacaagactgagattgacgagccttattgattcggcccatttttattcagaccttatgttagttaactggcccg

SEQ ID NO: 145886 - DNA, 241 bp, Arabidopsis thaliana landsberg
  unsure (1)..(241): unsure at all n locations
ngaaatttaatccactagtattaattgtgtcacatttgtttctcaaaaatagaaaaaaaaaaatcaaatctatgtgatttggagtttataaaaatcatgaaatcttttctttactaaatgttcttcttcactccttattcattaagcatccacaatttcccatcatattgntttatactttatatacttcttcaagtcaatctcagtctcatttcgaacttcttcccaacaagtaacgaca

SEQ ID NO: 145887 - DNA, 486 bp, Arabidopsis thaliana landsberg
ggctggagccggaaccgggttaggtttggggacggccactcactcgaccactggacaagtcggacacggcactgggacacatcagatgtcggctctgcctggtcacggaacgggacaactgaccgaccgcgttgtggagggcacggctgtgaccgacccgattggaaggaacactggaactggtcggacaaccgctcataacacacacgttggtggtggtggtgccaccgggtacggaaccggcgggggatatactggataaacggtgttgttcacttgttctgttatttgctctatttttgttgaatcgaaatttcgtggttttctgtcttactttcgtgttctgtttttttttttctttttcttgtgcttctgaataattgtaggacttcgatctcatttaggtttttgttgttggatgatagtcttactttatgagtagaatgttcatgcaatgtaacagtaataaaattatccgttaacaat

SEQ ID NO: 145888 - DNA, 532 bp, Arabidopsis thaliana landsberg
aacgatttgccttcagaacttgttgaagccacaacgttccttagcgatgcagaagttaagaagcttaagggtgtgcttggaggaactaattaagcttcacttagtttcattgttcattttttttcaaaaatgtggttgtgcgttttgttatttcgagttcctctagcattttgagtttgtttttctttatgagttgttattgttctcgaagttttcacttttatagtctctttggcttgaattgtaataactaataagcattacattgcagatttctaagtagcttctcaactatatatatctcgacatttgcactaataagcaactaaaattaaaataaatattaatgataatgaggtaatgttttgggcctttgggccttttgggccaattaattaaaagtcgattttggtcacaactatatatgaaggcaattttgctctgattcttcgtctctctcacagaagtaaaaaaaaacctagatcgctcttcacatctcttcgaacgattctctctttcaaggtacctgttt

SEQ ID NO: 145889 - DNA, 710 bp, Arabidopsis thaliana landsberg
ttttctctgctgcagaatgcattgtcgaaaaggtaattacgttgtttattgacgaagaaaggcaaggaaattccactactaactcatgtatcatatcttcaaaacgttattatcgacttttttggtttacctctctgaaaaaggcaagagctaagcatgacactgtaaacaccgctatagctggatgtgttaccggtggttcaatgtccgcccgaggtaagacctattatcttctgtgcatggaatttaaatcttagagattcattatcaatatgcaacggcctaattcccaaactgtaatctcgtagaggtttgatttctcttacatgatacattgtgttcttgaggacttaatggattggtcttgtttcaggtgggccaaaagctgcgtgtataggttgcgctggatttgcaactttctctgtactcatagagaagttctttgataggcatacataaaccagtgagatatctaacagacgccattgctgagatttttttgctgcttcttttctgtgatagtgatacagttcatcacctgaacccagggagatagaagctagaattacactttccaatatagaataagcaaggcttgtgttgattgcatatacttcaattgttgttatttatcatagatttcattagactttgagggctccaatatttaagtaagtgaattagacttgagggctccaatttttaagcaa

SEQ ID NO: 145890 - DNA, 589 bp, Arabidopsis thaliana landsberg
tatattctacagcctgcgtgactcctgtggtttttcttttccctcttgttttctctttttacccctaaaaaaattatggaagttgcaacaatctgtacaaatagagagagacttgtcccatatattttcatgtcacaacaaataagccttgactttccacaagatttcattccagaaaatctatggctgagatagccaatggaaaatgcctcttcttcctctttcaaaatatccaatactcatcttcacagctgtaatgccagatccggatgctgcgacgaggacgaaccagtctgctgattagagcccggggagtttggtgagactagcctagcgttaaggtctggcggaaaccggtggaattcttgtttggggtaaggaaacaatgagccttgttgttgcgagaccggtgtggcctcgttgcttacgtttggttgttgctgtctagcaattccgagcatctgatttgcattatggttgaatccgcggatgaggccgttgctgctctctgttttgattagcagtcctgcttggtgagaggaggaggatgggtgatcgatttctggattcaagacacgagcaggtggtg

SEQ ID NO: 145891 - DNA, 308 bp, Arabidopsis thaliana landsberg
ttattttctttttttcatgcatcacatttgaatttctgatttataaatagtgcttgtgtttacatgaaaactgaaatgacagagaggaatgtacaacaaagaatcaattagatccctttggttttatgttcatcaagacaaacactatcaccaccctcgtcatctgtagctacaagcctaattaacagcgaagaatttgtttgttagtctcatgaggctaatgatctacgactaatgcaaatgaaaggagagtgagttttactataagtacccaagagattgatcttgcgttttcttcgacaccgtgt

SEQ ID NO: 145892 - DNA, 77 bp, Arabidopsis thaliana landsberg
aaaaaaaaaaaaaaaaaaaaaaaaaaaaaaaaaaaaaaaaaaaaaaaaaaaaaaaaaaaaaaaaaaaaaaataaaaa

SEQ ID NO: 145893 - DNA, 674 bp, Arabidopsis thaliana landsberg
caatcaagctaggaaaactctatgctgcttctgctatgtatggctatttccttagaagagtagaccaaagataccaacttgagagaaccatgaacacacttccgaaacgccctgagaaaaccagagaacggttcgaagaaccttcgcctccttatccgttatgggacccggattccttgatcaggattcaaccagaggaatatgatcccgatgaatacgcgatacaaagaaatgaagatgagtcatcttcttatggattgagatcatatgttacgtatttggactcggatacgcttcagagatatgccacgatacggtctaaagaagccatgactctgattgagaagcagactcaggcgctctttgggcgaccggatataaggatacttgaggatggaaagctcgatacttctaacgacgaggttctgtctctgagtgtctctggacttgcaatgttggttttggaagctgtggcttttgggtctttcttatgggattcagagagctacgttgaatccaaataccatttcctcaaggcttgagtttagtcctccttgacatttgtacctttttgagagtagtgaatgtaaatgttaaatctctcatgtcaaattggtagcaactcctattcgtaaaatgtaataaactacacttcaaaacattagactcaaatc

SEQ ID NO: 145894 - DNA, 71 bp, Arabidopsis thaliana landsberg
cgtccctccaatgatctcgagattgaagattggctctctactgataatccttcagatatttacattatcgg

SEQ ID NO: 145895 - DNA, 335 bp, Arabidopsis thaliana landsberg
ttttgatttggggagacttttgtttgcgttttcttagattttgaaactccctttttccagattcactacttcgattttgaatttttatccaaaagttctttctctttaatttccaaattgcgtttcgattttatgtttgttttttttgtgcaaatcgaaaaaaccctcttttagatctgatttttgaggttcttgattttccaaaaacttgtaattcagaatcatagtttcaattgatttcttttatatcgctaatctaagaaaaaaaaacgtcttttgtcttagggtttctaatttcaatcttgtattcctcttcacaaattatacatatttgt

SEQ ID NO: 145896 - DNA, 477 bp, Arabidopsis thaliana landsberg
aagagagagaggcggagagagaggaaagtgaagaagcaatcgtgagagactctctcgagtcttccctgagtcactcctctcctctcacacctttttgcttcgcgattaagagtcagagagagagagatagtaaacatcgaacgtcttccatttcatcttccttcgattaccttgttagggttttgtattttggcttctggattcttcttcactatggtacgcgctttctccttctcctccttttgtttttttccctctgctttaggtttgcggatcctcttatggcgtctttgcttttctgattcttagagtttcattttaagtcgagtagaaaacgaacaaggctccttaattttgcgatttcagtgattgtcgacatctttgttaatcatatgattggttttgttttctgtagcataagttgagcagaagcaaccgtgacaaacttcagcagttcgtggctatcacaggagctag

SEQ ID NO: 145897 - DNA, 231 bp, Arabidopsis thaliana landsberg
  unsure (1)..(231): unsure at all n locations
ctttaaattttgtgactttctttagttgttactgttattagtagtatatggtttgttgtcactacgagtctacgtgatgaaaagatagaagttaatttctcatcctcnnnnnnnnnnnnnnnnnnnnnnnnnnnnnnnnnnnnnnaaccgtaatatggctgaaacaaatataccatgtcatcaacacgaaacatgcacaaccccacctcaatgagcttcaaaacagaaatt

SEQ ID NO: 145898 - DNA, 251 bp, Arabidopsis thaliana landsberg
cttctcttcctctcttttccgtttatctctttcgcagcttctcaggccgcgaagactttcattttccgtatcgatggtggatctatgccttctattttcccgacgcactaccattggtatagcaccgagttcgccgaagaatctcgaatcgtccatgtttaccacacagtcttccatagtttctccgccgttgttactccagatgaagcagataatctccgtaaccacccagcagttcatctgttttcgaa

SEQ ID NO: 145899 - DNA, 475 bp, Arabidopsis thaliana landsberg
agaaaaaaagtttcccaaaaaacaaaaacatacacaagtttagatatggatcttgaattactacaagatttgtccaaattcaatttcccaacacccatcaagatccgatccaaaacctcaaaaacaaagaaggacgaaggtgatgacgacgaagatgacctccgctgcagcacacccacatcccaagaacacaagattcccgccgtcgtagactctccacctcctccgccgagaaaaccccggccaccaccgtcagcaccgtcggctacggcggctctgatgatcagatcgtgcaagaggaagcttttagtgtcgacttgtgagataatcatgaatcgggaagagattgaccgtttcttctcctccgtctacaatgagacgtcgactacggctaaacggcggagaagttacccttattgttctcgaagatgaggcttaattcaatatttacatttttttacagttttactggaaa

SEQ ID NO: 145900 - DNA, 303 bp, Arabidopsis thaliana landsberg
atcgcaccttctgttgtatggcttaccatcaatgacctaaacccaacactaagtttaattcgattcagttttgaaaacagagagaacaaaaaaagggttttagttttacctcaggagccatgtatccaagagtaccggcttctcctgtcatgtcttttggattaagagcttccactcgtgctactccaaaatccgctattttcaaattcttctgagcatccaaaagcatgttctctgttttcacatcgcggtggacaatcttctctgagtgcaaatagcttagcctgcagtaagaacaacaat

SEQ ID NO: 145901 - DNA, 252 bp, Arabidopsis thaliana landsberg
aatacttctgaaaatgatttattttctggttaataaaaaacttagtcccaagaacatgtttatagctatctgtattctatttattctctgtggtctctatacaaaacatggaactgttctgggacttctttgtaaaacctactatctatattcaaaaatattacaaaaaattaccaaaaaacggttccatcttccagaatacaaaaacaaagaagaggaaagatccgaacaccaaaatcttgacgaatcttt

SEQ ID NO: 145902 - DNA, 499 bp, Arabidopsis thaliana landsberg
ttcatggatcgttattcgaggaggaatttagaggatcttgttgtgcctaactatcaagagacatcagattcgtacccttctcctgatatgtggggtactggatggagcatgaactcttcagaagctgctgagaaatgttttgattatgatgtgattcacaatggtttcagtggaggattatacagtcagatggagatggatatgggaactagtgaacaagtagaagaagaaactaagaagttaaaggctagtggttgttttgaccgttcgcttcatgattttgatgaaatccaacacatggatgacatgttcttgtaagaaattgtttatatatcacataaaaaaaaaaaaaaaatctatatagtttttcgatgtttatatttttgtgtctctctctttttgtttccggttttgactgaagaagttccattttggaggatgttccagggaatgagaattttctttctttcaaggagtcggataataacaacagctccag

SEQ ID NO: 145903 - DNA, 396 bp, Arabidopsis thaliana landsberg
ttttgctgcagccatatcaaactcgttcgggttcggtggacacaactcggtagtcgccttctctgccttcaaaccctgatttcttcataccttttagattctctgccctatcggttactatcatcatccatcatccatcaccaccacatgcagcttcttggttcacaagttggagctcttcctctggccttttgcggttctttcattccccgtttcttacggttgctgagatttcagattttgtttgttctctctcttgtctgcggaatgttgtgtatcttagttcgttccatatttgcgtaatttataaaaacagaaactgagagaatcttgtagtaacggtgttattgtcagaataatccaattaggggattctcatcttttatttctcaacaa

SEQ ID NO: 145904 - DNA, 259 bp, Arabidopsis thaliana landsberg
aaaattcaaaattcttggggtacaaaatatgggcataacggttttggcaaaattataaggaagtccagccagtgaaacaacaaacaatctatgtttctcaaaatcattcagctgttggtttgatattgagactctctcttctatatgtttgctaaataacttaaggcttcctttttctaggtttagttgcgagtagattttgaaaaacaaaagatgcatgaatggtattaagcgctgagctttactgatagacaatact

SEQ ID NO: 145905 - DNA, 715 bp, Arabidopsis thaliana landsberg
agctcttttcgcaaaacacacatcacacacctttttcacaacatcgtacttatcgccttcctctctctctcaatacctctctcaatttctggatccaccatgcaagctcttcaatcttcatctctccgtgcttctcctccaaacccacttcgcttaccatcaaatcgtcaatcacatcagctaattaccaatgcgagacctttgggaagacaacaacgttccttcatctccgcatcagcatccactgtctccgctcctaaacgcgaaacagatccgaagaaacgagttgtcattactggtatgggtctcgtctctgtgtttggtaacgatgttgatgcttactacgagaaattgttgtctggtgagagtggaatcagtttgattgatcgtttcgatgcttccaagttccctactcgattcggtggtcagatccgtgggtttagctctgaaggttatattgatggcaagaatgagcgtaggcttgatgattgtttgaaatattgcattgttgctggtaaaaaagctcttgaaagtgccaatcttggtggtgataagcttaacacggtaacatttgaattgaaattgatcataaaggtttgattttgaagagtttaagagtcaaagttttgatttttggttattgggtttgttgcagattgataagaggaaagctggagtactagttgggactggaatgggagggttaactgtgttt

SEQ ID NO: 145906 - DNA, 432 bp, Arabidopsis thaliana landsberg
tgcgaagagaggagctgagtgtaatagaaatcaattggagaaatcgccatgcaagcgagcaaggaagagtgcaggagattctgaatcaaatgatgtgacattggaatcatacgaggaagaagctgagatggaaatagaacatgcatatgaggaaactgaaactgtagcagaagagaatctgatgtggaatgatgaagaggaaagtagaagctgccttatgatagatggtgaatggaaaagagtaaatgatggagaactctcggggatggcttctagtgttacaatttgtgtttgagatttcgacagatgtaatcatataatccgacatatttttgagaaaatagttcagatatttgatcaatttttacaggcatagtcgcagacagatagacattgtgacactcaagtaaaagtaaataagtggatttgaca

SEQ ID NO: 145907 - DNA, 300 bp, Arabidopsis thaliana landsberg
gctttaaagaagaaggaaatatacctgatggtcaattatttagaggaatattctatgcttgtggtatgctaggtgatgttgatgagggactattacactttgagtcaatgtccagagactacggcattgccccttccattgaagactatgtaagcctcgttgagatgtatgcgttacccggatttttagatgaggctttggaatttgtggagagaatgccgatggagccaaatgttgatgtttgggaaacattgatgaatctttctcgagttcatgggaatttagaacttggagactact

SEQ ID NO: 145908 - DNA, 430 bp, Arabidopsis thaliana landsberg
aaaacacagaagagcttcttcttcttcttcttctacatggcaggagaatattccggtagccggagttctaacacacagcttctcgcggaacttgaagctctaagtgaaaacctttaccagaaacctcaggtttcagttggaaacaggagaacaaactctctcgctctccctcggagttctgttccgtcgcttgttacctctgctgatgaagtgagtacagcacgagctgaggatttgacagtatcgaagccgcgggctcggcgtttatcgctgtctccgtggcggtcgagaccgaaacttgaggtagaggaggaagagaatgttactcagagcaacaggattgtcaagaaaccagaggagtcgtcatcgggttcgggtgtgaaggaagagaagaaagggatttggaattggaagccgattcgagggctgg

SEQ ID NO: 145909 - DNA, 133 bp, Arabidopsis thaliana landsberg
ttgagaacaccgactaattctctgagtttattagccatctaggtctcaagctatcaattcaaaaacagcttgattcaacaagatcaaccgaaggtagtaagatttcatatttttataatcattgctttttttt

SEQ ID NO: 145910 - DNA, 414 bp, Arabidopsis thaliana landsberg
cgactatgatacgactattggacgactattttacgacgactttacgacgacattttgtttccaaataagaatttggtcttatcttgattttttgttggttggtcatcgattatgagaattcggtttgtttgttgtttgaaatgctataaagtattacaaaaagacaattattattgaaaatcctatcaaatacataaaacacaacttacacttatgttcaaagttctaaaacacacacacacacattattgttcaaagttcaagggaaaagggactgaaatctaaacctattgatcattctgtggagtagctggtagaggctctgtggttgtcgaagattgagaggccatgaagtcaaggaatggcggatctgtttgtcggagatacttctccactaaggacaagtgttcgagc

SEQ ID NO: 145911 - DNA, 196 bp, Arabidopsis thaliana landsberg; identical to SEQ ID NO: 9271

SEQ ID NO: 145912 - DNA, 426 bp, Arabidopsis thaliana landsberg
taatccaaacaaaatgcattattatatttaatttatttttcgaaatacaataggggctcgatatgaaatcaaagacaaaggagattattacatcaatgtgactaaacaagacccaatgtctcaaagagaggtgctatagaacttggtggcgaaagaaaggccttcctcggataaccagtcgagactctcaacggaaggttgtgctcgtgccactttagcaatagccttgtgttcctcttgagtacctccttctaggaacactcctactactttcccatctttaacccaatacgtcccaaactttggctttggagatttcgggtcattatctccaaacagtacagattctccaacgttttccccatagaattcccacgatagtttgaaaaatcgagagtagaaatagggaagataatcgtaatctgg

SEQ ID NO: 145913 - DNA, 327 bp, Arabidopsis thaliana landsberg
caggtggattcttcttgatgaaagccttaacagaattcaggatcttctcattcttggcttgatcagaccaggaaggtaagagaccgggagtgtcaatcacccgtaccttaattccctgaaccaaaccctcaacatcttgaaccctctttgtccccatctggaatgcatcagtacaaaatttcacttcatcaaatatagaattgatcgatgcacttttaccaaccccactttttccgagaaccataatcgttcaagaaaaatcaagtggatcctgaccagcagccttaagctgttctgccatggcactggcgcgatcaaaactaaaag

SEQ ID NO: 145914 - DNA, 288 bp, Arabidopsis thaliana landsberg
gcttcttttctctctataaaaccaagtctttgatcatcttatttatatcaaacttcaaaagcgtcaagcataaagttaggccaagaaacccatttaaaaaaaaagagagagagatggagagtttcccgatcatcaatctcgagaagcttaatggagaagagagagcaatcactatggagaagatcaaagacgcttgtgaaaactggggcttctttgagtactctcacttttcttttcttctataaaattgtgtaactcaaaatctaatcatctgtttgtgatattaca

SEQ ID NO: 145915 - DNA, 696 bp, Arabidopsis thaliana landsberg
aaagaaactcaaatttccatttaaagctaaacttcttttttcttacagtaaaagggaatttcagcacagacaacgtatttttaatagaaacctacaatatcccgctttatatattctagaagaagaaagtacatttttcaccaaatgcatagaagaaggagacttttatgcagcatcctaaccattaccaccattgatggacaagcacccctctttgtctgagcgaattgaagagctctaagcattggttataagtcttgctgtacttttggctcctttgaccaggacaacatctctgccacctgttgtaatggcattcaaggaacaactcatctattagacaaatcgctcctgtcttgattagcctcgggatcagatcgaattcggttccttcaacatccatcttcatcacaacaaagtccctctctctcacactcttcttcaaccagtcagcgaaatcaaacccttgaatcaaattcacctctccagctaagtcactcgagtcagactttttaaccggctggattctgcccatccccctgccctttgctttggcttccacttcctttcccggatcgtgattgatctcaaacgataacgtctcgttcctcacccacgctgcgtatggcaacaggttcaccttcttctttatcttatactcttcgtgaaaggctttgtcagcctcaatggcgaaaa

SEQ ID NO: 145916 - DNA, 766 bp, Arabidopsis thaliana landsberg
gcggtttctatgtttatccctccaaaacctcctttcttctaccctctctagaccttcctctctcttgattcctttcttcgtatctctttcagtcgaagccaaaccccttgaatttccccgatttcaaatggcaattgtgacaggagatcgctatgttgagaagctacaaaagtttttagaagacgaagctgagtctcttctagaagaaaccatgattctcaagcttaatcctgctggtcttcactatcttcatctccgtcttgactctctccgtgaactcgaacgcatgctctccaatgctcctgttgattaccttcgcgcctacgtttccgacctcggcgattaccgcgcactcgaacagctccgtcgtattctcagaatcctcacttctcttaaggtcgtttccactcttccttctccggctcgtgatcccacgcctctctctctttttccctttggtagccttaaggttttggaactccgtcgctgtgatttgtctacttctccggctaaaggcttgatcgagctccgtcacactttggaaaagatcatctgccataattccactgtcagttttgcttcctttagcttgtatagagaaattcaacgctagtatataatgtagtgattcaaggttttgcatgttgtggatttcgattttgatataggatgctctgaggcatgtcttcgctagtaggattgctgagataacgaattcgcccgagtggaataagttggcggtcatatcttgtgcttgtaaccgtct

SEQ ID NO: 145917 - DNA, 639 bp, Arabidopsis thaliana landsberg
atattaatttttcatggttataattatataagaacaacatgaaacttactccaagccgtgtaaaagtcgccataaaaacaaacacccaattgaaatagctcaagtacaatgatacataaacacaataaaccacaaaaacagagaaataaaaaagtgagcagataattggtttgtggaatgaagacagaaacagagtaggtaaaatttaagcttgaggtttgtcccacttgagtggcttgacgacttcccaggtgaagtcagggtcgtctctttcaaagtgtccgtaagccgcagtttacaagaaccttccgtttcctcctctctttaggtcaaggttaattgtcatcattcctggtctgaagtcgaagctctccttcacaatctttagtatctccttgcctggaatcaatccagtctcataagtgtccacaaagacagacaatggctcagggactccaatggcgtatgagacctgaacaagagccctacgagccatcccgttagccacaacgctcttagctgcttgtctcacaatgtaggctccgcttctgtcgaccttggttgggtctttacctgagaatgcaccgcctccgtgagctccccatccaccgtaagtgtcgatgatgatcttacgcccgg

SEQ ID NO: 145918 - DNA, 365 bp, Arabidopsis thaliana landsberg
ataaaagagaaaagtgagaggatttggtttttctcctatacatagctaaacatgtgtcgtgaatcatttatttttatttcaacattttatccatggcgttatcatttcaacattttttatttgtttgtttgagacgattacaaatgtttgtgccctttatttttcagtgattgataggatgcaccgttgatggaaaagacccaaaggatctttagcatgaaattttaagattgtgatcgacattgacattcctgagaatttaggaacaatagtagtttatggttttggagtttgtgtttttttctatgaaatttaagttataatgatgattgatcaaagatagaatcatcaataagtagatatat

SEQ ID NO: 145919 - DNA, 292 bp, Arabidopsis thaliana landsberg
gtgagcatatcgactgaaagacgttgactcggtgacactaaaccataagtgggtgcttataacccatttgaaattactcgtcgctactgattcgaattctttatacaaatatttcctttgtgtgccatttactttgttctttccacttcctatatatgtcttagaacattttgggcttttcagaaagcccataaatccttctttgcttgagaagaaggcccgtccttgaatagtaagtgtcctatatagtaaagtaaacagaaatgtcaactgaagcatgtgattttattca

SEQ ID NO: 145920 - DNA, 387 bp, Arabidopsis thaliana landsberg
gtacacaaggatagcctctttcattgtctcactataaacatacaagggagagaattagggcatcgaaagctttcattataacacaagcaatatccttctaaacccaccagggctttttctccatcaagtccttggagaaaacataacggaattttgaactgtatggcaaccattcgacgacctgcgatgctttcttgttgtttgggtttgccttgtacgcatttttgtattgattctccaagcttttcgtctgcgttatctattaaccatctcatcaggtcatcaaagctcagagaagcttcctttgtaaacctctctataatcttaagtaataacactttcttctgcatctttacaaccacgtttgctccaagaaactctcttttt

SEQ ID NO: 145921 - DNA, 132 bp, Arabidopsis thaliana landsberg
gttctcatcttttaagtactgaggattttgttggacattttcttacctccattattcgcagagagaaacaaagaaataaagaacaaaaacaaataacagagaatatggatttggttcagaagcagaagagtt

SEQ ID NO: 145922 - DNA, 241 bp, Arabidopsis thaliana landsberg
tcaaatatccaatgcattctaatcaacacgctccaatataaaaagaatacaaactttcaaataaaacctaaactttcaatggacaatgttaatcccaaacacatcaaggggatctaaagaatcaatctttttgtcaaactatttgtctttgcatgcatttcactgggaagaatctgaacctgagtaacatagaataccctcttatgataggatcactagcccgagatagagcgatgcacaa

SEQ ID NO: 145923 - DNA, 181 bp, Arabidopsis thaliana landsberg
aagccttgaccaagcaattctggctcgaggaaaaagtctccggctataaaccctaccttccattcccatctcctccatcgtctccacaaacaccgtcaaacatcttatcggcggtatgtacaacgttaacggcgccgccgagaacgctatcgtgaaaaacagctgcaacatttttttttcc

SEQ ID NO: 145924 - DNA, 239 bp, Arabidopsis thaliana landsberg
aaagaaagtagaaaaaaagagaaatagatatttccccattaatcttgtaaaattttcctttgcataatcctccgatcttttagtaaaaatttgataaaaacgaacagagagatgatgactcttaacacgctaacctgatccgaaattttctttcttttttgtttttcatcacagaaaaaaagaggattgattctttgatctcaaacaaaaactctacttttggtcatgtgattttttga

SEQ ID NO: 145925 - DNA, 177 bp, Arabidopsis thaliana landsberg
cacgggcctcgcatttccttctcagcggattggtcatcatcagatagcgacggagatttcatctgtatcaaccctgtgatgaatctcattgtgggtagagaagaaaaagacaagagctcagtgaaagccggagactttgagtttctgtcggaaaatgcaacgatgcttagcgctgac

SEQ ID NO: 145926 - DNA, 179 bp, Arabidopsis thaliana landsberg
gccatctgctgaaacaagatcataaggagagtcatctgcgaattctgttggcattgatttccagtgaagtgatggatgccattccgcttctttaaccactcttagtatctctcccgctactattttgcttccttgtgctgacaaatgaatcccgtctctgtaacaaaccagactatacc

SEQ ID NO: 145927 - DNA, 1223 bp, Arabidopsis thaliana landsberg
  unsure (1)..(1223): unsure at all n locations
aaggctgtgagcatgcttactggtaagtgtgggtgatttttgtttttttcagagtattttgttttgttgctagtggagtgtatatccttttttatatgaggaatgatactggtttggttataagtgatctgtttatcaatatttagtctgatactgtggaagttaccatttgtggtttaaggcatttgttttgttagatcagttttagctctcatctcaggtttctgaacgatcgactttggccttgctttaaacctgttataacgtttttctgtttctttcgtttgaacagaataagtatgtttgattagaaatgaaataggatatatactgacttttgtcttttcatttttaagaggaatgattcatttctatctatatatagtgtgacgtgcatactccgttgggcaagttacaaggagaaacctacctgcccacaatgtaagcttccatttgattttctcannnnnnnnnnnnnnnnnnnnnnnnnnnnnaatttccatccttgtttacatttggctccattttaaactccatttacttgactggcggtgtgcctttattgctttagtttactcttggcttttacatcattttctgtacttcttcctttgtaactaattttgtctgttatatatcattgcagcgttgaagatttcatgttcgaggagagtgtatgcctcctcctgagggcatcatggttccagccactggaagcagtggagcgggtttcagacaatgacaatttcaactatgatttcgacattccacctgagtatgaggaggaggatgaggacgacgatgaccttgacgagttttatatgcaaggttcaagtcttcgattaggaaaccggaggtggggtgacaatggatttgtgagggcaggccgccaagaagcaaggccagtccaacataagaaccgaggtggccaggcttctggctctgaacccgcctcttcatcctcatgtgagccaaaggagaagactagcagtgccataacaggaaggcgtgcaaagagggcaatgaagcgtgaagctgcaaacaaagctgcggaagcagtagcagctgcaaagcatgaggcccttttggttaggttgggaaggaagtgactgtggttgtatctctgtaattacatcaacccacccccaccccaaatgaccaaatcctttgacaacgataattgagaatctgtacatcagtagaatttaataatggtagaactt

SEQ ID NO: 145928 - DNA, 408 bp, Arabidopsis thaliana landsberg
ctgaaatcttagttcacatagtaacaaccttgatacaaagcattcaaacttcaaacggtacgactttcactttgaacaatttagataaataattgaaatcaaaaccatataaaaatgcttgataaataaacaattaatcaaaattattagaaaaatacacttgacgaactaaaaatgatagaaacattgcaataagttaaaaaaaaaaaaaaaaaacggcaaaagttatatactactttaataggtggatagtttttgagttagaaccgttgagataaagacacgtgacggcgtctaatctgagttgaaacaatggatacaagaccaccgagcggtggcctcatctttgacctataagtcatctcatcgtacggtctacgataaaacttgggacactgaacgaacgaa

SEQ ID NO: 145929 - DNA, 1141 bp, Arabidopsis thaliana landsberg
agagagagagatcgatcatgtcgcagcagaagaaatacatcttccaagttgaagaaggcaaagaaggtagcgatggaagaccatcaggtggtccagtgtaccggagtatctttgccaaggacggattttccgacccgatcgaaggaatggatagttgctgggatgttttccggtgagatttctcgtttaaccgatcggagtttgtgttgcatgagcctcgtttccgattcgtgctgagattttgatccttgatctgttgactgatcatggaatttgttctgacttgcgttttttgctctttatggattctcaagtagtaagaatcgtatagtttaatttcgtctagtgtttatctggatttgattcatgtttgtttaagtttttcggatcgcaagatctacctaagttgctctaatcgatagaaatataatttgttggttaatgattttgccatttgtctataataacatcgttttgagtggcatgtgattaattaacagttgcatgtatttggttgacattttttgttttgctttgtgtgtggtttggtgatattttgtggttgttgacttacatttttctactgttattgtttattgcagcatgtctgttgagaagtatccaaacaatccaatgctgggacgccgcgagattgtagatggaaaggtgttgttactgtttgttattgattttgattttgtgattttcgtttcatgttattataaaattcacttgttattttgattgttcttagccgggtaagtatgtctggcaaacataccaagaagtctacgacattgtcatgaaacttggaaattctctcagaagtgttggagttaaggacgtaagatccatctttttcctttcagatatctatattcagtctcattatttcctttttttgtcgcaatgtgattattcccttgcttaatcttgtgtttcctgatatgtgggatattaggaagcaaaatgtggtatctatggtgcaaattctcctgagtggattatcagcatggaggtaattttgcggctgaatcatgattatgtcattgattgtgttttgttagaggactgacagtgcacttttgatgtaggcttgtaatgcacatggactctattgtgtaccgttatatgatacact

SEQ ID NO: 145930 - DNA, 226 bp, Arabidopsis thaliana landsberg
atcttacttttggagacacagtgaaaccctaattcacaatgatctttggtttatgcccatttttgcctttgaagaacagaagatctgagacaatgataaagagaagtaaaagggttggttgctccggaaaaaccgaccggttacccgagaaccggtgttattttgggataatctcaaaccggggaagagctagctaggtattaagaacactggaagtttgttgttg

SEQ ID NO: 145931 - DNA, 220 bp, Arabidopsis thaliana landsberg
gagaattaagatttttaactttaaacgagagtttcgtttatttactcaaaaatttacttctgaaatctctatttgaatttcggggaaaaaaatcctaagtaagggaatgcagagagatggtcggagtatcgccggtgaagactaagctgtgtgatcggttaaccgatccgtcggcggcaggaattgcaccggaaacacgtcgaggacgggtgatccagtt

SEQ ID NO: 145932 - DNA, 391 bp, Arabidopsis thaliana landsberg
gcataatgaagctgaggaagcacaagggattgaagctagggaagcaaaacagattgaagctggggaaacttcaagatcatctaggaaattgattacttttgagccaaagttggttataaacaaaggaatatcggttcttggattcgttctgcggttatttgctgtttttggaactataggaagcgcgcttgccatgggaacaacacatgaatctgttgtctctttgagtcagctcgtacttctgaaagttaaatacagcgacttaccaacgctcatgtaaaatattcagtgatcagtatatcgatgaatcatgaatttgattgtgtatatataataatactgctctgttttataggtttttcgtggttgcaaacgcgatttctggtggata

SEQ ID NO: 145933 - DNA, 711 bp, Arabidopsis thaliana landsberg
caagaaggttcctgcaacaaacattactgcgattggtagagctattacacaggttgcggtttccatgaaggatgttcttagggagatgaaagaagtgaagccagcgtgtcctttatctgaatgtgaggcatctggtgataatatgtctagtgatgatgatgatgatgacgatttaggcgatgatttgtctcctgaagaaatggaagttgctacaatggttactgagattgtctctgaaactatcatggtgataaaagaactcattcgagttatcactggtatgattaagatggagaatccaaaggataatagtgggtttgtggagtcgcttgagaagctactgaagctgtgtcaaggaactggtgtacaaatcgatgagcttggtgcttgtgtctatccaccgcaggagatgaacaagatgaagcaaacagtgaaggttatacagggaaatctagacgaatttgaaactgaagttgagcgtttgaagagttcttcagacggcttttcgggagcttgcgggaagctgcgaaactccttgaaacatatggaaactgaattggataaaagatgtgaagctgagctagtagttgaaatgcagaatgttactcttgacagttagtttggattttgcaattgagtttttttttcggtttgtttcagtggcttgcgtcttgtagtaacattcatctaatgttcaatgtgttgtacacg

SEQ ID NO: 145934 - DNA, 340 bp, Arabidopsis thaliana landsberg
ccttcttcttcttctacatctcgtcagccgtttcctacggaggattccgatcgatcccttttctctttttttttttttcttctggtcaccgaatcattgtcataccccactttgagctcacaactcttcttcctcagattgcttgattagggttttcttctgcttgccgaattgatttccaaggaacaactttttatttattttcatcacctaatctttcgttttcagattccgagtatccaaataatatttttatattttctctttcgccgccatgagttcctcgatccagatcgttgttgaggagaagcaagtggatgttttgcctcttcaagatcag

SEQ ID NO: 145935 - DNA, 73 bp, Arabidopsis thaliana landsberg
gcagacgttcttaaattttctgactctttattttcatgttgtctggatccttaatactatttgttggcaaaca

SEQ ID NO: 145936 - DNA, 548 bp, Arabidopsis thaliana landsberg
gtttgattagatatacccattttactgttttctttgtccgagtgaaagtctgaagctttatatcttatgatgcttatggagagctctttgttctgttgtgtgctctattcctgataaaaccatgtgatgcttgctggttgatagcttcaactgattgggcctttccgttaattcgggatgttagcaactagcacagtaattgcaggtgaaggcggtgtcatggagttgatgttaatgagtgctttgccaagtcacttcttcaagataagagaacttctatcctttgttgaatcaggctctgggtgttattttcttcattttcttgatattgttgatattagtacaagaacacgctgaatctgacagacatattttcatggctagctagcttctcgccgctcatcatgtgtgcccaagttacactttatgaatcattctcaaagaaaaaaccgaacttgctgtcttgtatcttaagaggccgcagaagttagtatcttttgtgttgataagctgaatacttttgagtcatatatctatatattaatgcc

SEQ ID NO: 145937 - DNA, 281 bp, Arabidopsis thaliana landsberg
tccctcccgagattggggagctgaagagactaacccatttgtgagtaccttaatgtttctttttaccttctgatgatcgtccatttttatccacatcaaatcatgatattttttcttcttttctttttatgtttaaggtacttgagcttcaatagcttcaagggagaaattcccaaggaactagctgctcttcccgagcttcggtatctataccttcaagaaaaccgtctcattggtagaattcctgccgaactggtgactttgcaaaacctttgccacct

SEQ ID NO: 145938 - DNA, 63 bp, Arabidopsis thaliana landsberg
caagcatacatatatattaatgaataaaactctcaagacgtttacttgagaacatttatttta

SEQ ID NO: 145939 - DNA, 194 bp, Arabidopsis thaliana landsberg
gatataacaaatgcattcggagtttgtgatgaaaaacactacataatcatgtggttacataactacaattagatagaacataacatatccattttcgttgtagatctttgacgtctctgctcaattggtagtcaaggaggctgcctttttgttcatagcataatcgcagatgtaaacacagttctacgtaacca

SEQ ID NO: 145940 - DNA, 1648 bp, Arabidopsis thaliana landsberg
aaaccatagggttttttttttggtcatcacgagagaaccgcacattgaaaagggaaggaagagagatatttggcagagagagaaaacgtttggaggaaggattgatatttgttggacttttggatcgaaaaattgaaaggtaaaagaggtagagaagctctggattccgtctctttccgtcgtcggcgacggtggttttgcccgttggctctgaggtatttctttcgcagatctccatctctccatttcatttctctctttatggtctcgaatttgatcagagtggatctaatttttcgttttgattaatataaattcatttggtatgcttggattcgtctgtttgggatctgtttgagtcggatttgatgtgttcggattatttgattgaaatttagggtttcttaggtagaattattgatttagtattgattgatatatcctcgaattggatatgtttgttttccagctttttccagcttttttcagatctgtgaggtataaagtgggccaatagttaggtgatgatggcaccacggttcagatattgtgctttgttatcttatctgcattttaattattgctgctaggtttttatggtttcatgaacgatgattacttttgctaatgttgtttatgagactgtaatgtaagttgagtccatttttagagcttgcctggcttttggatggttttcttctagctattgttgtgtccatctttggatttcttataattttttaattgctttttcattgctatcaggttatatcaggctttaatttaagtggattgtcatcttctgagatatggaacaagtttttgtctggccaagctgctaccactatcggcttttctcattccaagaagcgctcgattggcggtttcttgtacgttctgatttccttgtgggctctttcgttaactgcacttagtggtcaaaccctcttctatgatctttaggggaaggtgtgaggcaaatttctgagacaggtatggctttcgattaaacctgtttaattctacacgattcttccctccttagatagtttgccattggaactttagtgcgtgttatgcatttggtacaagttgaatttcttgtaattatcccaattgtagtttttaataggtttcattaagatggtttttactttcttatgagtggcaaaataagaaaatttgagaaatggtaaaactgctaattttttttggacaatttgaaaaggaaaaatataaacaaacaatgaacacggaagtgttgtatgccatcacgtcaaccccacacttaatgatatcttttgtgcacatattcatatctatcagaggatatttacatatccgacattttcgttttttttgcagggctgaagtctgcaaattcttccttcgcatagtcctagagaaacctctttgttcctctctttcatatcttgttcttatgggtgctggttgaagaaagatacatcaatttcttttctttttcagtttacaaatgtcgtttccttgagtctgaacccctgagtgagatgttgtgagcatagggtccttcctattagccaaaacagtctttcttgttggtttcttcgcgtctttgagttctcagtatgtgttttcctcttttcttgctctctttcttttgcctaga

SEQ ID NO: 145941 - DNA, 243 bp, Arabidopsis thaliana landsberg
tacataagaagcttgtccttccttaactccattagaagaagctcaagctcaagctcgagtaaacaaatctatgcaaattagaattaacagaagcttttaaaaatcatttctttgattcgtgtctctgacactctctcactcttactctctctaaatctgagaaagatcgtgtttttgtttagttcttccggagaggattggaagaggagaatcactgagtcacgggacgagtcagaaatcgga

SEQ ID NO: 145942 - DNA, 289 bp, Arabidopsis thaliana landsberg
gagaagagtgtttctgaagtctatactcctgcagttttcaaaaagttccagattggagtttttgggtgtaattgcgtgtactcctagggaggagaaccgagatgccacatgttctacttttagagtgcaggattttgaaaacaaccaagacttcatggtaacatggaaccaaacaaaggctgaagtctcttgcatctgtcggttatttgagtataaagggtatctctgcagacacactcttaatgttcttcagtgttgtcatctttcttccatcccctcgcagtacata

SEQ ID NO: 145943 - DNA, 378 bp, Arabidopsis thaliana landsberg
  unsure (1)..(378): unsure at all n locations
aattacgcgtgattcctgtttattgggttaccttttatgtttaagttgcttcttctataaatattacttgctttctgttgttttaaataacctcatgataacacatgagttcagtttggcctattntgagctgttaagaatcttgttatacacaaaagtttgttttattgttaaattttagatgcttcaagccaagaggcagacagtgtcagctctgcaaactctataaacatttagtttgccaaatttatcaaaattggcattattttagccatttaggaaatacaccaagttgcttcttctataaatagtgctgagaacaaaatttgtttaaatcaattgtgatgttgtatatctttatgagttatcatttttggc

SEQ ID NO: 145944 - DNA, 232 bp, Arabidopsis thaliana landsberg
aaacaagttttaaattaatatgttaaaactcaaaatctctaattaattccctttttttctttacaagtcctctaagaaatgaaaaaacataaagggaaaaaaaaaaaaaaaagagattagagaagactcaaaacgattagcctgcaagacatggatcattacaccacaccataagctcaaagcaacaccgtatcttcttcttatacaccaaatttcacacaacacctgacgg

SEQ ID NO: 145945 - DNA, 110 bp, Arabidopsis thaliana landsberg; identical to SEQ ID NO: 68104

SEQ ID NO: 145946 - DNA, 142 bp, Arabidopsis thaliana landsberg
tgtgatacttcaggacttcaggtgataaccttcagacagctcgaatcttatgatttttgtctgttttctggttacatctcagtatttgctgacatcttgggcttattgcaggcgtttcctcttgaacgatcatctgatccgc

SEQ ID NO: 145947 - DNA, 369 bp, Arabidopsis thaliana landsberg
cttcatttctctgcctttgtaaactttaatttattttagaactttatctcatatagaaatctcaaatatatatattatagtttttgcttaacttttatatttaaaataaatctgaaagttgtaagaaaattattttccatatcagatttaacattgggtgcagtcttgggaaaatatataatcgttagaataattttctcttttaatgtgataattcgaagacgtatgtaacaaacaaaaatgacaataataatattacaggataaatcatttaaaacatatactataattagttattttttgcttaaatatgatggaattgttttgatattgcttaagaatcaaaaatgttttactctagataataaa

SEQ ID NO: 145948 - DNA, 325 bp, Arabidopsis thaliana landsberg; identical to SEQ ID NO: 61817

SEQ ID NO: 145949 - DNA, 299 bp, Arabidopsis thaliana landsberg
tcatgcttcaagtgaagtcacgacggagatcttctcttcttccgatgaagagaccagtagttgcaatagtttcagatgaaatctttaatttaattttaatgttgactatcttaataagttattatagttttatattaatacgactctctttcctttttattccatttttacttgaaaacgaatctttgtcctctcttttcgtttcggtttttatatgatttcgtgaaactttgttggagttttatctgagtgattaaccacccgtttcaagaaaatgtatgttaactttattctctagc

SEQ ID NO: 145950 - DNA, 613 bp, Arabidopsis thaliana landsberg
gttaagaaattttatcagggaaggaagagtgagagaacagtgttggtgcatgtgatcggagagaagattccattatatggaagtggttcgactttacttccaccggctcctccagcaccacttcctaaacccaagaagaagaaaggagctccagtccctattcccgacccgcccgcaccaccagcaccggtaccaatgacgctcagctttgtcgtccgatcacgagcatacgtgttggggaagttagtgcagccaaagttctataagaaaatcgagtgtgacatcaacttcgaacacaagaatcttaataagcatatagtcatcaccaagaattgcaccgtcactacagtttgaaggaaggaacaaaagaaaaagtaacaaactttttagtcggcgcaatacgatgtcgtatagagtaacgtgattttacagctcaacgggcagcattttgggttgttggggcagccacgtggaggtgcccgaagaaaagaagcattgtcggtggctttaatttacttgagtggttcatatttgtctgtggaaaatatataattttataatagtgtgtacgattggactgaaaaacacgaggaatcacattttatttatttgt

SEQ ID NO: 145951 - DNA, 408 bp, Arabidopsis thaliana landsberg
  unsure (1)..(408): unsure at all n locations
ctgtttctatgctcctccctcttccttctcctcccgttctctgttccattgctcaatccttgccctcctctcctcacttccttccctcccgccacccgggctccctcctcgtttagggcttgcttgtctcctaccccttgaaccgtccctctcttgcctctccgacctctcactgctcctttttccacttccannnnnnnnnnnnnnnnnatctctgtcccgatgactgaattccctgtgagaaggatcacgtcggtcattatctctcttgttcctggggctaatactcctgcttctgctcctgcttctacttcctctgcggtatgatcgccgatatctcccaaagagttttctccttagttccctcgaaacaagcttcacatgcatgaaattacagtacccaccacg

SEQ ID NO: 145952 - DNA, 466 bp, Arabidopsis thaliana landsberg
ggtcaattatacctctaagcttcgaagctccgacttcttcggtctgtttcttattaaacacacaaacaagaaaacgcaaaactaatcctctctcgaattagggtttcgtcaaggtattacattatttcacacccttatcatcatcttctgatttctggtaatcttcttttgattagatcttcctatcgattggttcagtcctttcttattttcgaattcttgattggtttacgtggttgctacgatttaaacctttaacatacctaaaagaacgtttttgtttttgctttttgttgttattgaagtttttttttatatttattgttgttgatgaagatcctggagttgatgtattgagagaagccattgagataagagatgagctctacgcaggctaatctatgcagaccatccttgttctgtgcaaggacaactcaaacaagacatgtctctagtgcacctttta

SEQ ID NO: 145953 - DNA, 59 bp, Arabidopsis thaliana landsberg
gtttaggatgtgaatagattccaattggtatggtataagtctctctgtataaaattggt

SEQ ID NO: 145954 - DNA, 226 bp, Arabidopsis thaliana landsberg
tttatattataacgaaagataataaataatttagaccctacacattggcatcacgtattacacgcgtttagggtatatttggtatgactacttttaccatttttattggtctctataaaaaaatgaaaaggacaattacattttcattttcttaaggagaccggcaaaatttcataacaagtggcaaatggtataatcttcataacctatacttataaatcgaata

SEQ ID NO: 145955 - DNA, 105 bp, Arabidopsis thaliana landsberg
tgataacaatgctaatgttctattcataggtttgtcgcagcaacacaaatttcataaagatagcaaagattaagagttacaaacaacctgattgaggcagaaggt

SEQ ID NO: 145956 - DNA, 345 bp, Arabidopsis thaliana landsberg
tggttctaagaagcgacggagaaggaatctgccggtgtgtattaaggtttgtgacagcaaaggagccatcttgggaaatagaaagtagagagagatagagatagatgcaatctgaaggttgtgctgatgatgactgtcgactgaggaagacgatgctggtgaaacgggtaccaactgagatccgtatttctaactcggactagatccgacccgtagaatgcaaatgcaataaccaaaaaaaccataattatttaaaatagcggttctcgatccgttccgacccgaattaaaactgtaccgaatggtcgattattaattgaaaccagtcccgataaaccgggaaat

SEQ ID NO: 145957 - DNA, 188 bp, Arabidopsis thaliana landsberg
ctaaggcactaaacgaagctaggttagaagcaaacgtgagggtaaacggagaaactagcttcaagaacaaatggccgagccctttcgccgtagtttccggcttacttctcctcctatccttcctaaagtttgtctactcgcctttacgttggctcgccgtggcagcagttgccgccggtatctatccg

SEQ ID NO: 145958 - DNA, 435 bp, Arabidopsis thaliana landsberg
tttactcctgtaataagaaatcatgctcatttatgttatatgtatcttcaaatctgtacacagatgttcaatatttaacggcttctacgtgatcatcctcttctcgcaaacaactgcgctttgaggagaaaaatgtggaacaaacttgtagatcaatattttgttaatctttggtgatccatctgcggcccctgacttcaaatccaccataagcttgatcactactgctctctcccccgctctctgcgctagtgtatcccgatttacgcctgtgctttttggttcttgtaactccactatcgctaaaactcccatttagaagcggatcatcaatccctcgaatcactctccgactgggtgatgatgacatgcaactatcgtccttcactcttctcttttccgtgtcgtgtttcttaatgttctgggagatcttgt

SEQ ID NO: 145959 - DNA, 934 bp, Arabidopsis thaliana landsberg
actctcttctacaaagagtctggtcacactcatggccatcctccatttctctcttcctcttatcgtctctttccttcgtcctcacgcctctcctcgcttcttcctcctccctcgctctctttctcagtcccctttcctctcccgccgccgttttcaccgtacctccgccgtttcctccgccgctgttcatcaccaatcctatcgtaatcccgacgatgatgttacccgcgcggtgtctgttcctacattccaacaagcgattcaacgcctccaggttcgttcgattctcactcatctccaattctctactttcaaaagttcgacgaattcaaattgaattactctcttttgttttgaaattgaaggaatattgggcttccgttggatgtgccgttatgcaaccaagtaacactgaggtcggagctggcaccatgaatccttgtacctttttgagggttcttggtcctgaaccatggaatgttgcttatgttgagccaagcatacgtcctgacgactctcgctatggagagaatcccaataggcttcaaagacacactcaatttcaagtcatattgaaacctgaccctggaaactctcaacagctctttatcaacagtctttctgctctaggtactgattctttctgccttctcttttgtttccacttacatgtcttttaacagaataggttcctttccttgtagatgcacaattgattgaatttttcaccctgtgctggttctggtttgtggttttatagtgttaattttgatttgcttaaggtttgattatgtgaaggtcgtctttatgtttcattaggaagttttctcatccagataatccttcccttactatttttatgtgttaggtattgatgtgactgcacacgatatacggtttgtagaagacaactgggagagcccggtaatgtgtg

SEQ ID NO: 145960 - DNA, 353 bp, Arabidopsis thaliana landsberg
ccgaacctggcgaaatgcttctttgtgagctgtgtccggttgttacggttttaaaacatgtgaagatctagcaatagaagctcaccggttccaaaactttcttctccgcatacagagcacatcccagcatccattagattgccaaagaatttccagcctgttggaacctaaaatatagaagtattagagcaatagactatgttacgtgattgcaatgaatagaagctagagaaaagcttcacaatgacatctacctcaaagaacttcaaacccaagttttttgcaacgacatcaagtgcagctgaggtcggcatgctcctgcaatacgaatgtgaaagttgagaatttaatga

SEQ ID NO: 145961 - DNA, 266 bp, Arabidopsis thaliana landsberg
ataaaaggcgatttcattcatattaacaaatgacatagtatgaacatcttccaaggcatcagtggtttctttcacagcttgaatggcattgtatagaaatactctctaagaaaactatcgagtgagcaagtgagtctagagggtcttttttactttgcagtcttgtatatgtgttttaatcagaaaatctggaagaagaggctggtggatccatcacgaatgatttcagatctgctggtttgacaaggcctgcacaaaggacacgt

SEQ ID NO: 145962 - DNA, 459 bp, Arabidopsis thaliana landsberg
acttaagcagcatacaggaccatgcacaacaacagctcattgcaatgttcaagctttccattttcatttgaatatgaacggttgtaactgatatttgtgcataaatcagtttggttttcttggttttattgtctactaaacagaatgagaaaactaaactgtttatttttttactgaaaaatctgaaagttgtgttctatttttgtttacacacgataaccaagcaaaccggaactttatggaaaaaccggattggttaggtccagcttgttactacttaatcctatacaatgccaatgcatatgttgctttggtacatagaattgccggaaattgggaacagtagtggctgcactgactcaaaagctctccaataatctctcatttagaattcattgcaaatatgtgaatcacaaaccaaaaatcgatctctgaaactctgctctctagtcagcgtta

SEQ ID NO: 145963 - DNA, 248 bp, Arabidopsis thaliana landsberg
taagtttattcaattaactggtccatgcaattctattctcaccgttcaggtaattacaagaaattgttatttgttagttaaatacgatgtgtgtgtgtattttgaaacgagcgtttggtcgatggaacggcagatattcggaacgttatccgcatctcaaaaacgatcggattacaaagatatcagcaaatggataatgtttgatggcgttaacagtctatcagtcgatggaggcgacactggggttg

SEQ ID NO: 145964 - DNA, 532 bp, Arabidopsis thaliana landsberg
ggaggaagaaaaaccaaggaagagcctgaccagcagtgtcagcagaggttcactcaaaaccaagaatccgtttagccgtgtgaaggacgaaggtgagaacagaaacaagacgggattgtcgatgaggaagtcgtggtccacggactcccttggtctgctcagccagagcaaccggttggggaagacggtctgtatctgtgctcctacaaagcatgaaggctcattccgttgcaggcttcaccgttcatcagccacaagccatggtgcagcaactgcagaacttcatctcccaaagcccttgctttcttctcgtcgtctcggtgaccaataatgtcacatagtctctctttcgttattcacaaaaccagtatggtgccgtcctgattgtctagaagattgttttttcctatccatgtgatgaatccatttggtatccatgtgttcatataaaacatgtgcttatgtgtatgttgatgcacttttaaatctttttttttttggtggtggaaatttcacatatatgtttcttgac

SEQ ID NO: 145965 - DNA, 237 bp, Arabidopsis thaliana landsberg
taggtgttttaagatgaaacttaaattttctgaaatcgtcattttgaatgatggattcatatttaaatccttttcacccgaactttatttttgttctagccttccagactctagattattaattttggaactcttttttcaatttatagtttgtagttgtacaatattcttcttgcatgatttcatatctggaagaggaaagaattgaagaaaaataatatattctgaaaaaatcaa

SEQ ID NO: 145966 - DNA, 240 bp, Arabidopsis thaliana landsberg
cgtcatctctgcggcagtggacagttgatggtgattgaaacaagaaggccaacctttaaacaatcttggtccccacatctctcccaaagccatcaaatgaacaaaacagctccaaagcaacaatacagtaacagcacgaatcatccataagctcatacgaggcctcgaaacaaaagagttcttgagtttctcaactttgctctctcctaaaagcttaacattcatctcccatagtttcct

SEQ ID NO: 145967 - DNA, 272 bp, Arabidopsis thaliana landsberg
gcaacactctatttatttttcgatacaatttgtctaattaccatattgtcccccaaaggccactacatggctaaatgtaacatgtttgcgattctggctcgggtcaactctgtcgctctcttgtagtgaccacctagtcaacggaaatgttacctttgcaaagtgagtttacaagcattcattgcaattgcggttatataatccttttacaatttccaaagctttacaacgctattagctccacacaacagcaatcacaacccccttgcatc

SEQ ID NO: 145968 - DNA, 457 bp, Arabidopsis thaliana landsberg
atggacattatgaacaagacaaagacctactacctaccttgaccagcagagttctgtaagctattcattataatagtatcatatccaacaactctgtttataagaagttgctgccacctgaaaaagtaatccaattttagaagcttatcataaggatacagctctagcaattaaaatcactgtttccaaattgagggccaataacgtgaatattacctgttgccaaagcagggatgccgtgccgatatgctgacatttgcagtgcgaatgttatgccgtgattttgcttcatcaggcagcaagaagtaaccctatatggaaaaagaacaacacaattgtgagaccgaaccagaagttcaaccgaagaattcctcatttcacatctttctttgataagatgctccagcattttccactagtgagctttacattcttgagagagaataacgtgaacggt

SEQ ID NO: 145969 - DNA, 294 bp, Arabidopsis thaliana landsberg
attttagacaaagttactctctttctttctcatgttcttttcggacagaacaaaactccctaatccaaatgtcaattcctttggtctctctctgaataatcatctctcttcaaaccctattcaattttaactatcgatcttcggctaagtctccaatggcggcggcgtttgcctctcttcccacatttagtgtcgtcaattcctccagatttcccagaagaagaatcggtttttcttgctccaaaaagcccctcgaagttcgttgttcttcccgcaatactcgttacactaagc

SEQ ID NO: 145970 - DNA, 63 bp, Arabidopsis thaliana landsberg
aaaactgttattgcttggcttgacttagtgacttctgatcacatctcatctgtttgcatcaca

SEQ ID NO: 145971 - DNA, 678 bp, Arabidopsis thaliana landsberg
ctttagaaagaaatattagtataaacatcgtggcccgcacaaatcaattaccaattgattcgcgaggttacatgcatggttctcaatgtaagagaaaccctaactcaaaccctattttatttattcttggggaaacttaagtgttaagattaacccttgtttaacatcgtaataaacacgccttggacatatagtaaacaacccaaatactaattaatacatacacaatatctcgttcgagcgagttagtaatcgactaaccttgggtacagaaccattattttaagtcgtcgaatagtttgaaacctttctgtttggatatgaagactcatatgaaatgcttttcaagcgagtctgagtcggtgtcatacataaaattggtatggtcaagaagataatttgaccatccctcgaagtttcctaccatattgtcttgatcatcaacgctagttgatgagacttcttgggaaacatcggacataaggagatcattcatactgttctcctcattgtggttatctcctccgaatttttcgaaaaattgtgaaaaatcgtaatcttggtccatgttgagatcagaagtagcattgatctcatgttcggggtacaacgatgatggggagaagggatcaaattcagcaagagtatttgtcagggatgtgttagaactatcctctt

SEQ ID NO: 145972 - DNA, 560 bp, Arabidopsis thaliana landsberg
  unsure (1)..(560): unsure at all n locations
ggagatgggttcaagctggagaatgcagtaccatgagatgttttgcttctgctactcgtggcaaaaagttagggtctttcttataacattgaaatcaacaagtttcaatctttctatgcttcatttcaatgaaactctttattgttctgtaacagcaaaaaacagagactagatgaggcatgtgttgaaaggtttaacgaatacagtcgcacgctaatacaatcgtggattatgcaaggtaggtgatttcttgttttcatatatccataatgcatacataggagcaagaggttcttggtgtagcttaatcttaagtgtgtattatatgttatgtaggcaaagttcttgtggatgggagaaagagttattaaagctggaatgcctgtatctactactgcagctataaagatcacagctgaagttccaaaatttgtatgtaggtgattattcttcgagttgccctatctttctacagtttctttatggtttagactctgtntgttgtcgactgtcctctactggtttttttgctgcagaggtggacttaactggaagctgca

SEQ ID NO: 145973 - DNA, 272 bp, Arabidopsis thaliana landsberg
gctccaggtggtcaattattcgcttaaggtatgactttaagtttccctcaaacagttatgaataaatacgtttcaagctttttcttccttgatttctttgaattcaacgtttgaggtaatatatggctaacttgatcaattggtaatcacttcctgttgtagatcatgtttggcttgttgctaataattgtttgtcggtgattttcatttctcaggataccgtgatagagcttgaattccaggggatcaagaaatcttacaccatgcttcag

SEQ ID NO: 145974 - DNA, 725 bp, Arabidopsis thaliana landsberg
aggtttgaggagatgtagcaaaagctgtagattgaggtggactaattatcttcgacctgggatcaagcgtggaaatttcaccgagcatgaagagaagatgattctccatcttcaagctcttttgggaaacaggtaaatacatacatattcacatgcacatgatctataaaagtatacaaattcttttatttttttgggtatgcataaagataaggttttgaactttaaataacttggggaccaaataattatgaaggtgggcagctatagcatcatatcttccagaaaggacagacaatgatataaagaactattggaacactcatttgaagaaaaagctcaagaagatgaatgattcttgtgatagtactatcaacaatggccttgataataaagacttctccatatcaaacaaaaacactacctcacatcaaagcagcaactccagtaaaggtcaatgggagagaaggcttcagacagatatcaacatggctaaacaagctctttgtgatgccttgtctattgacaaaccacaaaacccaactaattttgctattcccgatcttggttatggtccatcatcttcttcgtcctctaccaccaccaccaccaccaccacgagaaacactaatccatacccatctggggtctatgcttcaagtgctgagaacattgctcgtttgcttcagaattttatgaaagacacactaaagacctcggtgctc

SEQ ID NO: 145975 - DNA, 790 bp, Arabidopsis thaliana landsberg
aatcggagaaaaagctacggagctcgagagaagagagaatctatgtcgaacccaaacgaaccagccagggctcttctgccttacctgcaacgtgccgatgagctgcagaagcatgaaccacttgttgcttattactgtgagtttcgttttcttatctatatctaacctagatgatcgcctcctgcgattgtgtgtattcatggaattttgtgattgattaggtcggctatatgcaatggaacgaggattgaagattccgcagagcgagagaactaagaccaccaattcgattctcatgtctctcattaatcaactcgaaaaggtattacctttgaagttttaaattgtgagtttttctgatttatttcagcttgtttgattttttacttgtttagatttgaaaggaccggttcttagtaattctcatgatgtgtttgactttgattattatatgttgttacttgttacaaagctggagtttttttatttatgtttgtgtttggtaaggaggcttatatctaaatttagcttaggtttgttcatgtgattgacagagttcatgaggcaatttcttgattagttccagtttcttatggcgatttcttttttgtgtaactccaggataaaaaatcattgactctgtccccagatgacaatatgcatgtggaggggtttgcacttagtgtctttgctaaggcagacaagcaggatcgtgcaggaagagcagacttgtaagaattttttttgctcttatgtttgattatatatagaatggcattttttttgccct

SEQ ID NO: 145976 - DNA, 194 bp, Arabidopsis thaliana landsberg
gacgagataggcatcgtgattggaccacatgcgaccgtagatgacgaagacattgacatggacatgggcaccaccgttggaccgcagaccaacctaaatgatgatgatttgggcaccatcattggacccgagtttgacatccacaagcaagatttccccgaagatttcatatttggaacatctgtttccgcata

SEQ ID NO: 145977 - DNA, 737 bp, Arabidopsis thaliana landsberg
ataacaaatgggtcacaacaagttgccataaaggtcccaacagaagaagaaaagagaagtttccccgtgtcactttgtcacaagcttcatcactatttataactaccttgccaagaagaaagcctaaaaaggtataacagtttctttgtctttagagatcatcaaaaagatgtcgatctcttgtactcgaaatttcttcgaaagattctgcgtcgaggaatacaatatagacaccataaaacagagtagtttcctctctgccgatcttctaccatctcttggagccaggatcaaccaatctactaagctccgcaaacacataatctctccttttaatccacgttacaggtaattttctcatctactaaactctgttttaagtactctgttttcaactatgttttcaactattcaggttataagtagttttaactactctgttttaagtactctgttttcaactactcacgttataagtatatttaaagactctgttttcaatcctctgtttgttgaaacagagcgtgggagatgtggctagtattactagttatttactcagcttggatttgcccatttcaatttgctttcatcacctataaaaaagacgcgattttcatcatcgacaacattgttaatggcttcttcgccattgatattattctcaccttcttcgtcgcttatctcgatagccactcctatcttctagttgacagtcctaagaaaatagcaataag

SEQ ID NO: 145978 - DNA, 568 bp, Arabidopsis thaliana landsberg
  unsure (1)..(568): unsure at all n locations
tgtagctactgatttggtaccagaaagagagtgcgacggtggacgatgacgctttttcacttcttcaactgtgcgattctcacattcggtcctcacgctgtctactactccgccactcccttgtatgaacaaatcctcttttctcgatctgtaaaatctgttagtttagtcatacctaatctaaaattgtacttagatcttctttcgcttcatgatctagaatcttaaggcttagtataagctagccannnnnnnnnnnnnnnnnnnnnnnnnttgaatctgtgaattgttattgtttcttcacggaattagaattgtaatcggaaaatgaatctgcagatctgaatatgatacacttggaacctccgtgaaagctgctgttgtttaccttgctactgcattggttaaggttagtcaactgtaaaaatctttgtgcaaatctttcttgtgatgatggatttgtatctgaatcggtttaagcttatagattgttattttcatggcagcatgtttgtttggcgacttttctgcaagtatctgagactgaagtgtttgacccttaccaggc

SEQ ID NO: 145979 - DNA, 430 bp, Arabidopsis thaliana landsberg
acaaaaaaaaagaaaggaggaagaagtatcgtttcgaaagaggggagtctcaggaaaaaaaggacagaatttttttccggtgacagtgtcggtgtctctgacgctcctctctgttttcaatctttctccgtctctccctgaatgccttcgtccgtattcagggttcgtctattgattcttctccaagcaatcttaatcattctttaaggcctgcttccatgtgaatcatcttcttctcttttgtttctgcagaaaattgcggcgattcatggttggaggagcgaatacttaaagggcacaatggattcaagcgaagcaaaggacacaccatcttgtggctgtatatagatccaagttgatttgtaggtatttgaaaaacaatacgaaattttgttttagttgtgtaaatatataaataggagtgccaaag

SEQ ID NO: 145980 - DNA, 378 bp, Arabidopsis thaliana landsberg
atcgatctctcaaagtctcaacacttttaatttttttgatgactctttttaatatataaaacatttatttatgttttttatgtgtctgtctgagtttactaattaaccatgtttttttttcgttgttattgttttatttttgggagttcttttttacgaatgatttgattaccttccaatatttatttgttacttttcgattgaacagatacatgcatgatgtagtgaaaaaccctactctaaaataaatttaaatcatttacatgcatagtgaaatttatgacagtttgagaaagctacatatgtaacatataatgtgaattatagtttgaggtaaatgactcaaactgaaataagcaaaagacaacaaataaaatc

SEQ ID NO: 145981 - DNA, 431 bp, Arabidopsis thaliana landsberg
gaaaggtaaccctgcacagaagaatgttggtgatgaacaactgagaaggtaccttttgggacttctgccaaatttggtatactataatagacaaggcactaaagatgctcggctcgggacaagcacacatcagttggaccgaggccttagatcagagctcaaaaacagtagccggaagagtagccatggtgcatccagttctcacaaacctggatcctccacagctcgtaaagcaccagcattgcagaaacggtccaaggagagaagcagccgtcttccacctgtgggacacaaactatctccagctgcttacgagaattatcacgttgctactggtgatagattgtctagtctgagaactgagctctccatgcgaagaagtcgaagtgaaggaactctcggccccacctgatctctctctctccctcttt

SEQ ID NO: 145982 - DNA, 162 bp, Arabidopsis thaliana landsberg
agtttcttttctcattcggttctaaagttcctatttttcaatggattacgtgagaacccaagtcgaagctgtttttgatgattctgagcaagatggatcaaccatctctgaatctggaagctgcgattcttcttctgatcgatcttttgctgacgagcttgg

SEQ ID NO: 145983 - DNA, 779 bp, Arabidopsis thaliana landsberg; identical to SEQ ID NO: 9765

SEQ ID NO: 145984 - DNA, 218 bp, Arabidopsis thaliana landsberg
ctaaagaaaccgtgcggaccagcttaagaagacagagtttaagaatcatttaagtcgtcagcaagaaccaagtgattccccactaaaacacttttctttcttctgtctctctgttaaatcagatgcttacgtacttaaccccattctaaacaacaaaagacacttttatttcttagtaattaaacaaatgccctagggtcactgacttttgcttaact

SEQ ID NO: 145985 - DNA, 217 bp, Arabidopsis thaliana landsberg
gaaggttagagaccaagttctctctgcaaccttccctatcctttgcacagtagtgtgtattttctaattttaatcttgattttagttttttttttttttaaatgtatgtttgtaaataatggaaacacatacgtggttggttatgctctccgtttgtatctctacatagacaggttcaaaagagagattcttcttcgtcttatataaatatgattta

SEQ ID NO: 145986 - DNA, 660 bp, Arabidopsis thaliana landsberg
acaaatacaaaggagagagagagagaagaggcgcttcgctacgagatttgcgggaccaaatcaatgcccattggtccctcctccttcacactgagagagccattggccaatttccagatatagacgacgacgacgacgaagcagcagcatgatgatggagtaactagacgaagacgaagaaggtaatgtactgtgattctctctctttctctccggatttttcgcactatgtgtaatgtgtgatagagatcctgggttcttctttgagcttccgattccactgtttcatagattagatagagagaccttgatttctcaaatttctcctctgatttctgattttcttaatttgggtgaagtgttgtttctttatctgatttttttgaccagcttgattctaggaattattttgggtcaagtgttccctattttttagatcgagattgctatttttggaaattttagtggagaacacttggcgtttttatttggatgcgctttatagattcagaaatttctatctagggtttattatatttcctattccactttcaaaatcagtcttgtgtgtgttttaatgctgatatctgtggtggatgtttcagattagaggagcttctgaagaatcactttgaggaagaagacaacatatctcacaag

SEQ ID NO: 145987 - DNA, 400 bp, Arabidopsis thaliana landsberg
catttctctgtgactacttcatttcctctggccaacagttaaaaaaagttctgattcgattcaagccaagatccacgtataaagatatgttcatgcgtagaggtttggtatacaacaatatatacatataatagtttgtcgttatgcctggctccctgtatgccacgagtggataccgattttggttttaaaatcggctgccggtggcgtacaaggagtcaagcatgaccagaagcatatggtaactcaattgcatctacaactaaatatgaaatatctagttatgtatatggtttgtgttatataagatgttttcttcgaattttgatttttgtgttccatttgaataagcaaacagaaataaaaccaagttttgtagttttttgctttctttctgatt

SEQ ID NO: 145988 - DNA, 191 bp, Arabidopsis thaliana landsberg
actcgagtctcagtttaatgaaatgtttgtggatttttggtaaatagtactaatgggtatgtttcttttctcctctatattcgttttcttttccgagaacacaagtagtgtctagtgaggcttgctttgatttggtgaataagaaaggttaggattagagcagcttaaatttagggtttttcgagcttgaa

SEQ ID NO: 145989 - DNA, 277 bp, Arabidopsis thaliana landsberg
tttccgatgactttctcgcttaataaaaaaacactaacccaatcaaatccactttaatccttccctctctcgcgtccgattctccgatggctttaacggaggacaaatcagattccgatggtcgacgttggggcaaattcaaacttccatttcgaaactctaattcccaagctccttcagcctcctcgtcctcttccatggctacttcttcttcttctgtaacatcttctcatctaaatcaaaattacattcatcaatctcgccattttcaatatca

SEQ ID NO: 145990 - DNA, 190 bp, Arabidopsis thaliana landsberg
attaaatgagaaagattgtgagtcctcacaaaaccacaagactcaatttaatcaatcctcaaatttacatgataccaacgtaatgagagcttaaaaataaatgagaaacttggacataatcagttgatggagtaggaacgagaacagacagtctggagagattcagtgaagagagatgagaagctggtca

SEQ ID NO: 145991 - DNA, 455 bp, Arabidopsis thaliana landsberg
aaacaacaaatcatatacaagcaattatggtcacaaaaacaaaaacaatgtctctatcattgacactcctcctcttcatccttgtttctaccgtctccgtgacctcaacactagaaaacctttcaccggcacctgaaaacaaaggatattggtgtgtagcgaataaaaaagcaacagatgagcagctacaagcgaatatagattggtgttgcagctacgaaggaggattccgtgattgtacacagatcaatcccggtggagtgtgctatgaaccaaatactctacgagaccacgcgtcgtacgtaatgaacttatattaccagaaccttggtagaaccaaagaccaatgcactttcaacggttctggctctgaagttactaaagacccaagccatgacgcgtgtattttcatatcttatgattaatgtatgtgtggtagatttttaagccgaatc

SEQ ID NO: 145992 - DNA, 369 bp, Arabidopsis thaliana landsberg
tcaaactatgtagctttgatagtttcacactataacaatgtttaatcttatacttgtacaacaaggtatcgcccaaaacttgtgatacaccaaaattactaaccctagtttaaaaattccctaaagccgtctaagcgagatcaactctcgttgctttttcttgcattcccaccgaaaataacagagcagagtaagtgaaaagacttgcacaatctctgtgaagctacttcaatggtggacatgtcagagaaagagatctgcaaattgttacgcctcggatcttagatcattaaagaagaaaatattagatggcagaatggtagatcactcatcatccgatggcaaagtcgggctttttgagcagctctc

SEQ ID NO: 145993 - DNA, 420 bp, Arabidopsis thaliana landsberg; identical to SEQ ID NO: 4799

SEQ ID NO: 145994 - DNA, 281 bp, Arabidopsis thaliana landsberg
gccggaaagtgaattgagatcgacgaccacggcggcgaaggttcctaaggtggagattcatctgtataagtgtggaaaaggtccgatcgatgtgttcaagtcaaatctcggcggttatgagcaggatcagctcgaggttcgatctattcttgagaaatatggcttgaaagcaatcttcgctttcaacgttgagaaaggtcgtgctgttccgatcagatttcaccctaggaatggtcggtctgtggtgccttatagggatggtgccgtcatttacatcgacg

SEQ ID NO: 145995 - DNA, 427 bp, Arabidopsis thaliana landsberg
ttcaactctttgagttatttatttccagaagcttcatagtttctggaaaatgctaatccactagcggaataaaagacagatctttaatccactatagaaaccgcgttttctgaaaatgcggttgcgttttccgatgaaatctgccgttttagcgtttgctatctttctggtgtttattccactgttttccgtcggaatacggatgattccgggaagactcaccgccgtatccgccaccgtcggaaatggctttgatctggggtcgttcgtggaagctccggagtacagaaacggcaaggagtgcgtgtctcaatcgttaaacagagagaacttcgtgtcgtcttgcgacgcttcgttagttcatgtagctatgacgcttgactcaaagtacttacgtggctcaatcgcacccgttcattccatgctc

SEQ ID NO: 145996 - DNA, 260 bp, Arabidopsis thaliana landsberg
ggaatttcagaagaagctaggctagtaggtcaggtttacaaacattcatatttacctgatgtctatgtacacgggggcaccttgcagccccaggcaatgaacagcacactccaaactgctcctgttgaaggtacttgaacgaatgagtcaatcacagaataatacaacaccaaagagatggagtttaagagatgcagtgaagtaccttcaacctccgtagataccaatcaagttcactacttaagccatctctcatggaa

SEQ ID NO: 145997 - DNA, 410 bp, Arabidopsis thaliana landsberg
ctttgcctttaaagatagaaacctctctctctcaaagaccaaaaacaaaagaaaaacttttttttttcgcccttctcttctttcttcttcaaggtagcctccaagccaaacacggaggaacctaatctgttgtctgctcgtaacttcacaagaagctataatttgtcgttaatgttggcttcttcttgtccatttcttcttttcttcttcctctgaaacacaagaaaaacatctttaacccctgagcagagtaaaaagacgaagaaactggtaactccaaaaaacagagtatatatatgaagagaaacttgagtttgtgaaagtttttttagttatcttgtttttgagataagagttaagtagaggaagaagatatgtctgcaaaacttctatataacttgtcagatgag

SEQ ID NO: 145998 - DNA, 320 bp, Arabidopsis thaliana landsberg
tagttacagaacaacagaaagcaagcttccttattattttacttcaaccatcttacaacactagtccagtcaccaacatcaaacatggaacatcggttttaataatttgaacttaaaaaggttttgggaatcgagcaacaggagtgcacttaaggggatgagccaaggtcaggttcagtcctccaatggcctctttcatgtcaaccttttctccattgattctccagtcaaagcattgcaccatcattccaatcgcggttcctacaaagatataagctacatttgctcctgggcagcctctccttccactaccgaaagcg

SEQ ID NO: 145999 - DNA, 187 bp, Arabidopsis thaliana landsberg
cgtcgggttgcgttaaaaatgttggtacctcgccgagtcactcatggacgagctccaaaatgtcattgacccgtgaatctcaaccgttggccccagcgttagaaaacgaagatcctgttgacgactttgagtttctactcgaagatcccgtcacaatgctatccgccgacgagcttttctccgacgg

SEQ ID NO: 146000 - DNA, 593 bp, Arabidopsis thaliana landsberg; identical to SEQ ID NO: 80326
  unsure (1)..(593): unsure at all n locations

SEQ ID NO: 146001 - DNA, 376 bp, Arabidopsis thaliana landsberg
tattagtccatttgatgaagactgatgaatcgctgttctaggtcaatgtgagcacaggataagcaaaaatatacctggataacacagagtatatcaagaatcttgttttgggactcatcaacaggacctgcgtttaaaagcagttaggaatagttctgaaaattaaattaggtgtgggaaaaggacaagcagcataccaagtaacacaaacaaatgatgagcaggagcatcagccagcagttgaagatcattaggagaattcttgtagtgagacgagacacatagcgccatcattctctgtaggatgcacttatatcagtctattgtcaaaataatgtacggatctcaatcaactacatttacctgtagaaacaat

SEQ ID NO: 146002 - DNA, 241 bp, Arabidopsis thaliana landsberg
cttacattaacaaagcagtcgtggaaatgaagacgaaggatgcttgcagcgatgcgagggtccgatcttagagcattgacaatggtagtggttgcaatgtcaaagacttgcggacatgttttatcgtaaaaggaagggcttagttgagcatgagacaatgatacctgaataagaagaagaagaaatcccaattttatcaaagaggaatgcattttcttagctcttttaagagaattatttg

SEQ ID NO: 146003 - DNA, 719 bp, Arabidopsis thaliana landsberg
taataaagtaacggtcatattaaattcatgaaatacgataatttaaatagagattttaccaaagtagttaatgcaaatgtaaatcattcaacaaggcgatcaagaatcccggagacaacaccacaaatacgtctcagactcgctttactacggcgaatcttcaccggataagccaaccctttaactcgcctaaaaatattccggcaaacattaggataatcctgcgccgccaacacatgcatggaggcatagtcataagcttcatcatcaagatcttgaatcgtcagccggagagaatcagcggcgagagcatacttctcggagcaatcttgtaagacctttttgagaacggtgtcttttacggtggcggataggtttccagcgatgtaatttgcggtggaggtggcgtttgtcataccaacgccgaccataatggaggcgagaccttttgtgtcggctgtgggacttcttgggtcggatttgagagctgagacgcagaatttgtagtagtttgtggttttgcaagttgattcgattattgttgttgtgttggatttggctgagattagggttgatgctgaaaaggttagggtaacgaggaggaggaagatgagagaagaagccatttcaggaagaaggttttgagcaactgtttacggagagatagagatggaagaaagaggattcttgtctttatattctgagcagtttcttgaatt

SEQ ID NO: 146004 - DNA, 422 bp, Arabidopsis thaliana landsberg
aagatcgtactccgtcactacgccgtcgtaatctcccgacccaataacccgaccgcccgacccgggtctccaccggagactactaagtttcgccggagtacagatgtaatattcgcaggcggtggcttgatcgacgaaggaaactccggtaccggagacagcgttgttacgtaaaagagaagggaggccgtaaaaacgaatctttcttgaaatcccggcggtacgacggatgttatcagtgggatcgaattcaatagctccgataacgtcggaggcggaggaggaggaggaagatacgacggtggagagagaaagatcccattcgtatctagcttcttcttgttgttgtgcttgttcttgttgctgcttgtgaggatgaagactgttcatatgaaaacagagtaatgactgttgcttctggg

SEQ ID NO: 146005 - DNA, 644 bp, Arabidopsis thaliana landsberg
aaacaggagataaaagttaaactgaagaatgtttcatgggcaatcgctagcttatctttgaagcgacctaaaggttttctctttactttttactagtacattaagttaccaatggctcacttaggcaatataatggatttatatctgttcttgataatttataaatgagtaacttgaggacctcttattggtatttgtttccaaagttaatcataagttccatagtatatgacactaatatgtatatgcaagcatttttatatgaaaaactactttatttagatgagaatgaaaaaatgtagatagcttttgtagttaccattttgtaactggtccattcttgagttctatgtttggagaaagggcccaatttataaatttacaaaatattggcgcagattaggagtcaaaaatacttttctatattgtttgaaatctcaatgtattaatatatcagctctatttttacattagctccaggcgcaagtaatgtattagacgctagtgttgatcctgtgagtatcggtccaagtcagttccaaggatctctgcgcaaaggaaatggtgataaggactcaaattgctggaattctcctagtggcatggggtttatgatcaggggaaagacctacctaaaagataat

SEQ ID NO: 146006 - DNA, 94 bp, Arabidopsis thaliana landsberg
ctcttcttctggggcagggaatgttatacatgcaaataaaaagaagagtaacagaagaaagggttagatcaagattcaaactctaccaaatctc

SEQ ID NO: 146007 - DNA, 251 bp, Arabidopsis thaliana landsberg
acaatgtagtagatattacaagttccaagagatcaatataacaatagaagttatggactctcttatttaacaaaaaatacagtaaaaatatatttttaaagcacgacatagtactacagactcttaattagctctcgtggaaaaaatcgtaaatatttttttaataaacaatgtaccacgacggacctccgccgcggcgccgccgtataattattcccgtcggcaaagatctcaagtagttcaccgttgat

SEQ ID NO: 146008 - DNA, 425 bp, Arabidopsis thaliana landsberg
ggatccgacgcgtagatggctccgtgtacggcggtgctttgacgacggagctaaatcggagcctccgtgtcgtttagcaccaccgattatggagacacacgcacctatgtttctcctttgtgttgacctcaaaacaaaatacacaaaaaaaaacagagcaagaacaaaatctatgtctttctctatctttttcttctagggtttgttcaaaagctttttcaggggtttcgctgtgaaatccaaaaatgttgtttctatgaaatcttcttctttgaagaaaggaagaagaaagagacaacaaaacctaaaaatggagtctttgattggctaattttgccgcgctgaattttcgttgtggttagtttgaagaatctttgatgtcaattagatattaaacaattttttgaagcttattattctacaca

SEQ ID NO: 146009 - DNA, 322 bp, Arabidopsis thaliana landsberg
gttccttacctcttcggcggtttagcgacgatgctaggactaatcgcctttgctcttctcatcctcgcttgctcttactggcgcctgtcttcctccggcgaagaagatggtcaaaacgtagatgaagagaaagagagccggtctggagataaggcggcgaacggagcttacgaggagaagtttcttgtcataatggccggagaagatttgccgaggtatctggcgacaccggcgatgaaaaagtgtacgtgtggtggtcacgagggtaaaatggtgatttctcaggaggaaagtgttgccaaagaggaagagaagatgagag

SEQ ID NO: 146010 - DNA, 373 bp, Arabidopsis thaliana landsberg
cttcctcttgtccaatttcacgacgagttgattcttcaactgcaacatcagcttcctcttccaatctattttgccttcgtttacttcgcctaagtggagaacaaactgcggttgcatttcccacatcaacggactgacctcgagcttcttctccaatttgatttgcttctccttccggcattggttcaactgcatcgtgagcttcttcttccaatctgatttgccttcgtttacttcgcctaagtggagaacgaacttcggccacatctgccacatcaacatttgatactacattcgcttgacctcgagcttcttctccaattcgatctgcttctccttccggcgttgctttagctgcatcttgtgctccgtc

SEQ ID NO: 146011 - DNA, 133 bp, Arabidopsis thaliana landsberg
cttctctcgaatttacgcaggaagatcattagcagagaattctcatctgattcagtccatggctgccacggctcttttccgatcgattcgccgacgcgacgtcgtctccgcgcctctttccgtttacaaatcc

SEQ ID NO: 146012 - DNA, 55 bp, Arabidopsis thaliana landsberg
ctgacttaaggatgaagctagtgatactagtatctttcttgctcgttctcccaat

SEQ ID NO: 146013 - DNA, 2212 bp, Arabidopsis thaliana landsberg
  unsure (1)..(2212): unsure at all n locations
atcaaatcaaatcgaagaaggagagaagaacagagaaaaagaggtaatgagtaaaatctatgagcttttgctttatcttcgaatctaagatcaggaattgatcagggtttttacccaatttcgataattgtcttcttcgctggattgatttttgttctggaattgtttatcgtgtgtagttgaatcaaatatggctgggagagctacgatccctgctcgcaactctgccctcatcgcaatgatcgccgatgaggtaaattcgttaccaaaaaactcatctttttatatgttgatgaaggatttgaggttccattagtttgattctttagataattttgatttttcatttggatcttctgtgttgagttttgaatctctgagatgtgatctgaactaaatcaatgcgttgtttgtatagatttatttatccgtaaactgcttgactttttggatttgtttgtggaatttttaatctttttggtagtgattcaagccttagaatagctttgtccgtagttttgtgtatttcttgatttgggatcagaccaaatctgcagatgatctgatctgctattactgaattttgatttcagcacgaatcaggaaactaaggagtagaaatcttcctagaaactgtattaacattgaataacaagaggtttaggttttttaatgttagtcttcacaactgttctggcttaacaattggatttactccattgtattctatcagaaaatcatgtctagtctcttattttagacttaacttgcattttcttccttgtacaacgacttgttactggcagacacttaattggccaatggtggcagaattgtttggaactatccgttgatataaccctttagcaatcttcaatgccacttacaagacttaaattttgtgtacaggacactgttgttggatttttgatggctggagttggtaatgttgacataaggaggaagacaaattacctcatcgtggattcaagtatgtttttctaactcaatatgatcttgaggaaagataatcttttcaatcatgaatcaagttatgtcacttatctcaaagtggtatccttttgacaaaatcaagttagttgaagtttttcatctaatcaatttcgtgtggaattgttaggagataactctcttaacttctatttctgtagaatttgtataaattacccatctagtcttctaagttaattgatntttcttttcttttgggtntgnctttcagagacaactgtgagacacattgatgatgctttcagggattctcagcaggggatgatatcgctatcattcttttaagccaatatgttagtgtcttcttccaaatccagtttacggtggaatgttactcatcttaactgctatgtctgtactgtcttgtttaagtcgtaatcaaaggattcatgacttgtactcctccactttattgagccccttatgtttaatgccattattgactatcttacttgcttccacgcacccttttcatcatggatcaaagtcaccattatgtagggtagttttgctatctttttcccagcaattagtatattattggatccaactgtgtcagaaacataaggttaggctactttgtatcagccttttgacacatatcatttgtaaacatgaaatagaatgaggcctatctctatgtgctctatactgcaaagtctatttctttctacaatgtcaaaaatgtaatgagaaagtttcatgcttgtagatcgccaatatgatccggttcttggtggatagctacaacaagccagttcctgcaatcttggagatcccttccaaggaccatccctatgatcctgctcatgattcagttctctctcgtgtcaagtacctcttttctgcagaatctgtgtcacagcgttaaacatatgcattttgcaagctctcggagcctatatcatttgtttgtttttgatattcttgtctttctccttcggaacccgaaaaatctacaataatgtataactcttgatttttatttggagaggaatgttatattatgaagaagcaatggtagcttcatctggttctttgcattcaattaagaaagaatcattgtgggtattcaagagacaagagcaggcttcgaaggtttagtgaagaaatctaaaaccttaagtccttgctcaggtgattcagactcgcccaagatcttaaccatcgcgctaccaac

SEQ ID NO: 146014 - DNA, 379 bp, Arabidopsis thaliana landsberg
agaatttgaaccaacaaagcaaaacatgaaaggcacgttcactaacttgcttgtgctccttctcattgcacttgtttgtgccaatgtcggtgctaggaaacttatctccgaagatacccaattcaaggatgaaaaatctttcctcggaggcggtggcagcggtgatggcttagggcttggccttggtggaggagctggtcttggtgggcttgggattggggctgggatcggcgcgggagccggactagggttaggtggaggcggtggtggactcggaggtggtggcggtggactcctcggtggagacggctttgggggaggagccggtggcggactcggtggccttccttgaacgtattgacaagtgtgcgtgtgagag

SEQ ID NO: 146015 - DNA, 747 bp, Arabidopsis thaliana landsberg
tgtgttttcacaaagcaaatctttataaatagcatagaagtgcattattctcacgtacaagccaacgaaagtaagctatacaaattggcttaatagaaaaaatatatataagttataaaaagcctcaagttctcttagaaaacttcagatatccagcttaggttttcggctaagctcggagtattgaccgcccattaactgtaaaatctcctcccacaagttttccgatgaagctccgcatattaaatccgagctgcacgcagcaacatgccagtaatctgattcaatctcttctctgagctgatctagctgccaaccggcgtaaccaacaaagaatctaaactcctgtggcttaagaactcccttctttacaagcactgcagcttcatccaaactatttcgagtaccaaagttaagcccgggcatgacttcttcaaacccaggtatcttggttttatcaccagtcttcaacaaaaacatgcttgcttcaagaggaccaccaaagtacaaagaacattcagaaaacgtagtagcgagctcggttttcgtagatttcatatgcttgatgtttttatgaagtggacggttgataacaacaccaaacggcccttcttgtgggtgtctagtacctgctctaagaagaagcacaacagttctcgcaaatgttctataaccatctagcttctctgtagcaactagaacacaaccagtctcaggaaacgaaatcggatgtgcccattacacccc

SEQ ID NO: 146016 - DNA, 686 bp, Arabidopsis thaliana landsberg
  unsure (1)..(686): unsure at all n locations
aagtgtatatatatttcacgcggacgagacaggggatattgagaaagttttcatatcgagtgaatgctaatttacagaaagctagaaacaagtttatcttacagtttttctcctcgatattgttaaccattggtgaagcatatcattgctgaccaggtcttcattaacactgaaggtacacatcaaaccctctttgatttcatatttctgacatgttttgctggcgaacttgtaagttttcaagaatgatgtgagacagacgataacttattgttcagaggacagatgcatcaaatcttggctcataaaagcacacttggctgttgcatgactgaagagcacaaccggaaatccaagaccaaattttcttatccacattgtatagaagaccttttccttgattccaagacgtaaagcagatcaaattatcttgtccaaaacactcgaacctctcagccgaaagtctcagaagtgctcggaagtactttggtggcattctacttatctctacccaagagacctttgtgtgatccagcccccatattctcatgctttggagagtactgtagaggccaatccttcccacgagaacanatctcttctgagttccagcaactaagtaaccatccaacaaagatctcgggaatttagctggaatgtgttcccattgccctgaatcaagccga

SEQ ID NO: 146017 - DNA, 514 bp, Arabidopsis thaliana landsberg; identical to SEQ ID NO: 53527

SEQ ID NO: 146018 - DNA, 738 bp, Arabidopsis thaliana landsberg
cttgatgtttaaagcttggtgtatgcaatttgattgggtttactggagattgatctgtgacctaatcaatgagtgataacattgctggttcatctgatttctcatctggtgtgtctgctcgattccctgaagaaagtttgaaactcaggcttggtttgtgcagtttgattgatttatctcattacttgactctggtgtacttgattctttgatgaaaccttgaagttaatgtttggtttgcgcaatatgattgggattaactgcatttgatctctgaccaaaatcagtgattaattacattgcttggttatctcattacttgagtttggtgttcctgcatgatcccctgagcttgaagttcatgcttggtttgtccaattgtgacctaaattgatgttttcttgtggtatcttttcgtaggttttgttactgattgagaaaacatgggaggtgacaatgataatgacaaagacaaagggtttcatgggtatcctcccgctggatacccaccccctggggcttatccacccgctggatacccacaacaaggttaccctccaccacccggtgcttacccgcctgcaggttatcctccgggtgcctacccacctgctcctggtggttatcctcccgcccctggttatggtggttatcctccagctcctggttatggaggttatcctcctgcacctggtcatggtggttaccctcctgctggctatcctgctcatcactcag

SEQ ID NO: 146019 - DNA, 434 bp, Arabidopsis thaliana landsberg
agaaatcaataatagagcggaaggagaagcgtgaagattcacaagagtcctctaaaaagcggcaccgtggggaaaacaagagccaaagtccgccacggaaatcatcaacgagggagagagatcatgacttggggagagacagggatagagagagacacagagacagagataggcaacatgatttgaacagggatcgagatcgacgtgaaaagagttcaagccacgatcgagacgataatgatagaagcaaagagagagacagggattggcgcagacgaggcacgagatgataatgatgattatgcttgttctcacctcatggtctgttctcaagattttaaccttttgtgtttttaaatccagaagatattgtagaacttgttctcagacacagcttgtaattttgtatcccaatttctgaaagatttctcact

SEQ ID NO: 146020 - DNA, 237 bp, Arabidopsis thaliana landsberg
agaaaaatcataaagaaaaaaaagtaaagagatgaagacagcagagctcatattcgttcctctgccggagaccggccatctcttgtcaacgatcgagtttggaaagcgtctactcaatctagaccgtcggatttctatgattacaatcctctccatgaatcttccttacgctcctcacgccgacgcttctcttgcttcgctaacagcctccgagcctggtatccgaatcatcagtct

SEQ ID NO: 146021 - DNA, 211 bp, Arabidopsis thaliana landsberg
agggtcaagcacgccggaaaaggctagcaccgtgggccccacagaacatgcaggcacggccacaaccgctgccacagctgtttcagcctcgccgcttcatcagatcaccgttactacggctgccacggccgcaggaaatatgattaccgaccaaaatagagaaagaaggttcggtttttcgaggaaattcgagttttaaacgctctcacac

SEQ ID NO: 146022 - DNA, 396 bp, Arabidopsis thaliana landsberg
atctcttaaggactctaaacaagtttaatgtaataagtatatatataacaaaagaaatgtccaaaggtacattatacatttgcctttagccagaaatttaagagaactgatggcagatgatgctaccatacataagaccattgcagcaaaagaaaggaactcacctgtacagaagaacctccttatgcgcctcaactaatatctcacaagtttgcacctcgatgacttggttgtgtcttggcctggtaaattactttctttaccgattttccatttgtttcactgtacccaactccatccctatagtatccaccgacaaaattaccacctggctgtgtaccgatccattgggtggggggtgatggcaacgggttcaaatttgcattagcagcttct

SEQ ID NO: 146023 - DNA, 458 bp, Arabidopsis thaliana landsberg
atacactctgaataaagaaagagagtttaccctagaaaacttttttttttcttcaccattgttgggggatggatgagaaagcttattcacacttcatttctttgcttttggtgagagaatgaaacagagaagaagagatgaagaaaattaaagttctttccttttctcttttggatctaatttcgtcttgagattttctcatagcttgatactaaagctacataaaaaacaattaggtgaaatgaaagtttgtgtgttttgataagttttcagagattttcggttgcatgttgttatcttgctcttgaagtctatcgaacccttttagattctgattttgttctcttcttatccctcctcctataagttagccatttagggtccccatcgaattttactaagttaaagtcagagtctttttggttaagctatggatcgaagagacgcaatggcgttat

SEQ ID NO: 146024 - DNA, 346 bp, Arabidopsis thaliana landsberg
aaacaaacgtgaagtttgattcctcggtggtgaaaacattctttgtatcatctcctagtgggagtatagcttcagttggtggtaacaacaatggcggcggtggaaacgtcaagccggtgttaagcggaactgacggtgatggatccgatggatcagaacagttcagaacaatcatacccgaaggagtttctcaattgtcatcatcgaatttcgggtcagagccgtcagtatcgggacaagatgaacataggctgtggaattcgatggtggaggaagcagaacgaatgcagtattcaaatattgacgattcgttggatcaagagacgaggaagcggttcgtgtctca

SEQ ID NO: 146025 - DNA, 201 bp, Arabidopsis thaliana landsberg
tttgtcttaacgtacaagataatttgaaaggtagacgtagacgttggatacttctttggtaggctcttaagaatcttaggtgtatctctttagtttgaaggttagattcagaatctctgtagattcattagtagctttttctgtgtgatcaatgtgatgtatatatatagatcgaattgattttagctggtgaaaggtgaa

SEQ ID NO: 146026 - DNA, 257 bp, Arabidopsis thaliana landsberg
ataaaaaaaaaactctaaaaatttgggtggaattttaaatggacttccacatggccaacttttcatttcccttaaggataaattgagaagaaaattatatactggaatttgaaaaagctttatataattgtaacgtatttttataattgcacgacaaatctcttttcttgattttttgtatgaaactacaaagaccaatttttctaacaactaagattcagttattatttttggtcacataaataaatgagacgata

SEQ ID NO: 146027 - DNA, 256 bp, Arabidopsis thaliana landsberg
gaaaagcatttggggaagagtaggttttgcgatctgtgattttctgaggagaaacgaaaatggcgtttagagggaaggagatgatgaagaagctggtaaagaaagttggagcggagaatatcacgccggagctcaaggagaagctcaaggcttgtgttcctgataccaaagtcgtcatgggcagagccaaacgcggtctctacgccggccgccacatccagtacggaaaccgtgtcagtgaagacggtggaaacaa

SEQ ID NO: 146028 - DNA, 459 bp, Arabidopsis thaliana landsberg
tcataagaaaaaacgtaaaatattgattgatagcgatgagttcctgaagaacagtcttttttcttttccagaattagtaacactttccagaaaaacctcttcataaaaagagaagctttaatctaagaagaagaaagaacaacaacacagtagacacgttaacattgaatccccctcatcagattcatatacctaagaaagttagtctttagtaactcgttctttacaaagacaacattggagctaactatcaaaatgcctctcatgacttccaagaatatcctcccatgctttcatcaacctcattgctaaaaaccccgttattcccaaagttgagcgatgtattagagataataccttccaggttttggctttggtctaaccccttgatgcctctgaatctgttggaggtgcttggtgtttcagctgctgcgggaacataatctgttctgtttcttc

SEQ ID NO: 146029 - DNA, 433 bp, Arabidopsis thaliana landsberg
caaaatcactgactggccatatgagatggtttttgtgcatagatgagaatcctggaacatgctatacttgtatattatacaaaggcacaatgtacaatgagtcagataataagagtcactcatacagctctatcttgtctccctgttccatagatcatacacagcatgtgcaaccactgacactgaaacctgactaagagtcaaggcaaccaagagaccaaaactggaagactcattttcgcatctcctgcaatcaaagaaatgaactggtaacctcgggatcaagtctcagcgaaaggaaaaggagtgttattgggtgaagaatggttacagttagtcacatgttggtttccctgagcggtttcagacagactgaactccatgtcatgtgtttcagaccatccaggctcatatgtctcaaggaaaccgattt

SEQ ID NO: 146030 - DNA, 623 bp, Arabidopsis thaliana landsberg
tggcggagtagtcactgctgttttctcgtgtacacgagcttcttgtgttcgttccacctcttgaagatgaagaagttcaactacgaaatcgttcttctctcgatctcggatttttctgatcgatggcggttcccacactctgtatcgccgatggaatctaccccactgcttttttctaccggaattcagtccgacgactgacctccgtcgcgcatgatcggtttacgaacccgaaattcggaatcgatggacgtctacggaacggaccgaaggtgacggcaacggtgaatccgtatacgtacacggaggcggcgcagcccgaagagcggaagagtttgacggattttttggtggaagctagagatttcgtcagatccgacgggggggatggtggtccgcctcggtggttctctcccttggaatgtggcgcacgcgctccagaatctcctcttcttctctacttacctggttcgtcctttcaatttagggctgaaatcaattctcgtttgattgattcgttattctgattggaacaatccacgttaacaaaactaagaatcccccattgtagggatcgatggtactggattaaagctcattcgccagcataagaggcttggaga

SEQ ID NO: 146031 - DNA, 159 bp, Arabidopsis thaliana landsberg
atatgcaataatcagaagaagaacctaaattaaaaaaaaaaattacaagaaaaaaaaagagaaatcattgacgaagaagactgtaaccaggataaaaacaaatgtgccgatcagatctccaatcatcacgcgtctgttaataatctgaatagtcaacgc

SEQ ID NO: 146032 - DNA, 484 bp, Arabidopsis thaliana landsberg
aaagataagagcccagacggggaagacgacgagacagttgattctgacggtgttggagataccattgggtttagtaaatgcatttctgaatccacctgaagctctaatgtgttcttgaagcaagtaacatccaatacctaaacatatagctaaaccaatccaactgtctctgaatgtgccagcaatcaaatttggtgccaccacggcgagaagaaccaaagccaccggtaattccaggtattctaataacacaaacaacagagataagccaaatcagaatcaaagtcttgttgtttgtaatggagagtgaatgaaaaaaagtagacaaacctctggcgtgtttaggaaagaagagttgtacaacaacagctacgaaagcaatccatttaccaatttctcctctgtcaaagtttcagacacaagttagggtttaggaacataatgataagtaaagaaaaagtctctggcttttgttgtgttatac

SEQ ID NO: 146033 - DNA, 382 bp, Arabidopsis thaliana landsberg
cagtcttctactactactacataaggtaaagtaacctcaccagtctgaataatattctctttatagttatcgatcatgttactgactttggatcctttttgattttgttgtagctggaaaaccaacaccaaacttaagcttccggcttgaaaagaacccgaatttttttgcaatagtatcaaaatccaggaagttacagcaatggtgacattagaaaagaaagacatggttaacatttgggtcctccctctttctaacaatgagttgaaaattgaatgatgcaggattgttgtttaaaatgtgttttttttttagtctttaatgcacattgtaactttcccgacgattttagacattgagaagaggcatcgttttatcaaaa

SEQ ID NO: 146034 - DNA, 1026 bp, Arabidopsis thaliana landsberg
  unsure (1)..(1026): unsure at all n locations
tggcgattgcgatgttaccggagctcttctcttctccttcgattctaaccagcagaatcagatgcggagccaccgcaaacagcggcggcgcaatctcatctacttcttctaattccgatcctaggagaggtgttcccttgtataagcccaaatcatacgaggttctagcctctgacgccgccaattctctagctttcgctctccaggattcaanaatctcgtttaggaaatcgattttccgtaatctccctgctcttactctatctcaattatctgaattttgagctctgggttcgtgattctaatggcttctttggctctctctgttcatgtgtagacctttacccaggagcattcttctacaagtaagctttgttaactgttaccattgtgacttagtttttagcgaattttaactgtgttgttttgcaaacattgtataggttcttcagacgactttattgatgctaatatacaactggccgtgactgttgttcgcaaacttcaggagaaaatcgagaccagagcatgcattgtaatctttctccttcattactctatatattactcatcctttttatttggttcttctgacctatgaatgatcaaacatgttccaggtttttcctgacaagcctgagaagcgcagggcttcgcaacgcttcaaagcggcatttgattcggtacaaatagaacttccactttgctgcaagtttttgcacatgttaggaataagatattgaacacttggatcttaacaacggcttatttgtgagtgtctcatcaggttgatggcataagtattggctctctagatgatatacctggtacttctgtcaccaatttctttaggtccataaggagtaccctggactttgattttgaagatgaaaacgaaggtatagctaaaactgtcctttttacttattttccccgatggattattgcattttagtcatgagaaaatgtgttcctacaggaacttgggagcccaaggagcccccgagcctttatatactttatcaa

SEQ ID NO: 146035 - DNA, 754 bp, Arabidopsis thaliana landsberg
gtcgataattatggagagaataacgaccttatggttttggtttagtcttatgattttcttaggaatctctatcaatggaggtttgtctcaaggacagcaacatgttatgaagaagacacgttcttctgcagttgtagtaggaactgtctactgtgacacttgttttaacggcgccttctcgaaatcacccaaccacttaatctcaggtctggcttctgctttttgtttttttttcctcttgcagtcttgctcgtgtttttttggtaacactacttggaaaataatgttttttggattctagaacagagcactctgttttggaaacttatagggttttttcttgtttgtgggtctaaaatcttagaaagaattatgaaaagttttgtggatcttgttgcaggtgctttagttgcagtggaatgcattgacgagaactcgaaaccgagtttcagacaagaagtgaaaacagacaagcgcggcgaattcaaagtgaagctaccattctctgtgagcaaacatgtgaagaagatcaagagatgctctgtgaagttgctaagtagctcacagccttactgttctatagcttcgtctgctacttcttcttctctcaaacgccttaaatcaaaccatcatggagagaatactagggttttctctgcagggttcttcactttcagacccgaaaaccaaccagagatttgtagccaaaaacctatcaatctccgcgcttccaagcctcttttaccggatcctt

SEQ ID NO: 146036 - DNA, 282 bp, Arabidopsis thaliana landsberg
agagtttcatggttttcgttttattggtaataaccgtttcaaaatttatcaaaagtctagtttgaagtattcatggtgatattgtagagtatagcacatagtcaccaattcttatctttgtttgatggttagaatcatatatggttctggacaagaaggttatatatatacacacacaagcaaccatttgttgctttttggatacaaaacaaaaagcaattaaagtaccaattgattaagcctaaatcgcatcaattgatcttctcatgctaatatgagctt

SEQ ID NO: 146037 - DNA, 432 bp, Arabidopsis thaliana landsberg
aggttaacgtcatttgttttcattttaacaggtatatgttatgtgatgatttctttggtgaagagtccatattctatgaaatttttgcgggtaatttctaatctgtctcccttccttttgctataccaaactttgtggattttgttagctgtgtagaagaacatctgtatttcctgtaatattggtataccaaatttgatttggtgttgagcagcgtgtaagaaattatcttctcttcttccggatagaaagctgaacctcttgtactttacaatggatatgatcattgtagcagttttttggataaattctaaaatttaaatgatacaggtccattttctgtcatcgacgagcacttcaatcccgttctttcaaactgttttgatgctattggcctgatgcttatgattcgcataatacaccaccaccagg

SEQ ID NO: 146038 - DNA, 164 bp, Arabidopsis thaliana landsberg
cctctcttatcaagattgcaatgctcagctgaaacctcggagattcataagactcaatgctacctataccgtacatcaccatctgcaactgtgtttcagaccctaacacgaggcgaatctgattcgaaacctcaggagacttaagctgctccaagaatgttgtg

SEQ ID NO: 146039 - DNA, 399 bp, Arabidopsis thaliana landsberg
gctttctcgaggccaagaaaatattttggcagtccaagatctttgaagctaaggtaagtagtaaattattattctttaaatatgactctgcgttgtaggtaacagaagtcttcgacccaaataataatgtaaacttctcggccacctcaaataataaatggaagattggttcggcgcaataaatataaattcattttcttaacaaagaaaagacgaattaagtttaagataaataaaagtgagtgacaaacagaagagcttcatgcaaataaagaagtctacaagtagctaggcaacattaatacattctaaccacttaaatatgctgcttttacgttatttggtaatggtatacatcatcaggtctctgctcttctctaaaaatcttctgtcactatt

SEQ ID NO: 146040 - DNA, 176 bp, Arabidopsis thaliana landsberg
ctcgaaacttacaatagaatgattagagtcttgtgtgaatcaggttcaacgagttcatcatactccattgttgcagagatggagaggaaatggataaagccaacagaagctagctttggtttaatgattgatggtttttacaaggaggagaagtttgatgaagtgaggaaagtgat

SEQ ID NO: 146041 - DNA, 129 bp, Arabidopsis thaliana landsberg
ttggattggccagtcccaaaataattcttttgttcttttgttataattgattgtgatctatccagaagctcttttgtaatagagtttgtaatatacactgcaaatataatttccttaaggtattcgttt

SEQ ID NO: 146042 - DNA, 401 bp, Arabidopsis thaliana landsberg
acactttaactaagcaaaccaataatggctaccactcgtctaactctagctcctctcctcctcatcgcagccgtactactcgcaaccaaggcaacggctcagccggcagcccccgctccagagcctgctggtcccatcaacctcactgcgatcctcgaaaaaggtggtcaattcactactttcatccatcttctaaacatcactcaagtcggtagtcaagtgaacattcaagtcaatagttcatccgaaggtatgacggtgttcgcaccaacaggcaatgcttttcaaaaccttaaacccggaaccctaaaccagttaagacctgacgatcaagttaaactcattcttctaccacgttagccccaaatattacagtatggatgatctcctcacagtgagta

SEQ ID NO: 146043 - DNA, 374 bp, Arabidopsis thaliana landsberg
gatgacatgaagaaaggatcatactattaaggttttaatattaactaacgtcgacatgtgattactaacagtgatgagaggaacaccaggtggtcttgactggacaagattcataagagtatctgcattgtgaactgagcttttattgcaaagatttgtatactgcttttgcaaatgcactaacagccattatcgcagtattccttggaattcctcccaaatgatcagatcttgctgcccattccattatcttccccattagcttcaaagttctctcccttcaacaaattataacagaacctcaagctacttgcatacagggccggttctgatgtgcgaaccggaaattatcatatctatgacaaaattcgatg

SEQ ID NO: 146044 - DNA, 653 bp, Arabidopsis thaliana landsberg
ggtgtctagcaaaatgagccgaccacaagatccactttgaggtttcttcccatttggaaatcccttgcggatgttatcatcaaagggatcagatttatcgccatggctactttctctattgaacggctttgagctacgtttggaagagagactgaagaaacttatgcctaagaacaaagatgacatcctcactttatcctggatgaagctagctatggagtcactctgcgagactcataagaacattaacactctcattactgatctccagcttcctgtctctgattgggaagagaaatgggttgatgtttacctcaacattagcgttaggttactagatctctgtaatgcctttagctctgagctcacacgtctcaaccagggagatctcttcctcaagtgtgttctgcacaatttacaatcggattctggggagaagtatctccaggctcgatcttcgcttgatagctggaggcaacatgttaatacaaacaaccctagaattgaaaactgccgtgcggttctagacagtcttgttaaatctctgagtctgcctaaagtcaagaactcgcctaaaggaaaggttctgatgcgagctttttatggtgtgaaggttcaaacagtttatatctgcagtgtatttaccgcagcct

SEQ ID NO: 146045 - DNA, 568 bp, Arabidopsis thaliana landsberg
cgcctgattttgtcttcacatctgaaattcagtctccgaggctcaaaattcgaaaggtttcttacttcttcttcttctggctatgatttacttgcttggtcttgatacatggaattccttactcgttaggttcttttggattgtggggctgtacaagctgatgcattgaccgttgatcgtcttgcctcgttagaaaaggttttactcatatgatcacttttatgattcttgtccattttggcgtatttttggctttgttaacatttcgatactggtttggtttagtatgtggaaacagctgtggttcctcgagctgaaatattggaaactgaagtggagtggcttcattctatcaaagctgattttgtggtaattttgattttgttcatacaacaatctcagcacttttatcagaaacgcattcatctagaagacttttgctttgtactccatcattttcataccaagagataaactttagttgaaaacaggtgtctgatgttgtccctgtcgcatgccgtgctgcggctgatgctgggatacgttctgtttgtgtcaccaatttcag

SEQ ID NO: 146046 - DNA, 422 bp, Arabidopsis thaliana landsberg
tccccatctcaaaaccttgatattgatgtgagctctgaaaatctcgttgacgtctttgctattaagaaggtttaaggcaagcttaagaccctgagctacaagagaggagaagaggaagaagctgaaggagacgacttcgaagaccagtagcttcttggcgacgtcagcacttgcgtcgcagctggatcgttgttcgaggctgtgttgtcctggagtcgctaaggaaagaccaacgaagacggcgatggtgaagagagagttcacgttcacgagtccgtcgagagcgcttacgtggacacttgtggtggcgagggaagatgttgaagacgtctctggtgacgtcattctcacgccgttctcagcgccggtcatgtagttaaccttcggctcagatctgctcggaaagggaaaaaaagaaacgc

SEQ ID NO: 146047 - DNA, 75 bp, Arabidopsis thaliana landsberg
acatgttgagaacattgggattcattactaccaaacattgagattgtggaggaagaacttcttggagagacagaa

SEQ ID NO: 146048 - DNA, 379 bp, Arabidopsis thaliana landsberg
tccttttttaaggttttagtttggtaccaataagtcaaacaacactaactgcaaaagtaagggtaaagatgtttactcttataagcttcaagctgctgaagtaaaatttctagtttagtgatttgtcacggtctactcgaaacttaatcctttaaatttgttaatgatttgacttttttgcgtaaaagaattaacctatattggtttaatcatacttcatccgtttcctaatagtgaatatataaaaggttgaagaatttcatcgtacgtagtgatagtgaactataagctatgctatatttttgtacgaaacttacataaacaagtttaattttgaagcgatattgttcgtgtactaaagcatatgtgcgttaattcc

SEQ ID NO: 146049 - DNA, 478 bp, Arabidopsis thaliana landsberg
ttgcaaaactctgtgtgtaggcggaactacagaaccaagagcctctttctaatcggagttactttaatccccttgaaccatggtaagcctcttctgcgaaaagttttcatcttttctccgattatctcagattggtttgagaatacatatgtagattttggttgttccattgtttcttcgagtcttttggagttaagaaaatatctatctttctttgttttggatcctgtagctgttgtttaattggatttgtgagaaaatgccatttttattgtctaagcttgtaatctgaatttgctatgattattagattatcattgagttcgatttgaagtgatattagagattgggtttatgaatcatgcgttaatgtaattcttgaagcgtaatgtaattgagtgttaatgtgtattttgtatagtcaaagagaaagactaaagagccaaaggtcgatgttgtgactcttggaccatctgtt

SEQ ID NO: 146050 - DNA, 343 bp, Arabidopsis thaliana landsberg
acatacttataattactggtgttgctgctcctgcctttcccggaacacgaatcacctttggtacaccaatcttttcgcatgattttccatctctctctctgtgaatgtgatggaccgatcaatgaggttaaactctttgtgtgacttgcaggagatacaaatctagcaattttccgtgttttcaagctccaagatagtgaagaatccatagagaaaccaactacagagtaacacaaaacccgagaattgcttatctttgcttgcaattaaccggtttttgttgaaattctaagttgttttacaacattgttgatttatatatatatgaacaatagctttttat

SEQ ID NO: 146051 - DNA, 501 bp, Arabidopsis thaliana landsberg
ttgtgtgatgtaatcttaaatcatttacagaaaaagaaagcaatacagagaaacagctttaaagtttgaggattgatttgacagctaaaaacaatctgttttaccaaccaattctaaaatgcaaagtgatggattcttctacaggcttttacggatctcggaaacgaacaaaagttttggtgaactacgacctatctcatatgatggaggatcttacaactcttgttaagaaacttctgatggaatagaagagttactcttcttcttgatcagcttctgtgtcgtcagtgtcctgaagatgagaaagagcaacttttggctttttcggtttcgaagaagcttcttcttcctcaccctcgtttccatcctcagagtcctttcttttcagatccttgacatctccttcattgctacaactctctggtttcactatttccgtctttttctcattgttcaccttagctttccttgcttgctcttcacattcttcaaggaaatttt

SEQ ID NO: 146052 - DNA, 627 bp, Arabidopsis thaliana landsberg
agtttcatagaaacccaatggacaacaacaacaacaacacttttagttctctggataatgtcatgactaaccaaaatcctcttctcatggattttataccttcaagagaagattcaacttcattctcaacaatgcttccatggaataccatcagatcagatcctctacaaatgggtggctttgatattttcaattctatgctgactaacaaatacttatcatcttctccacggtctatcgatgttcaagataaccgcaatgttgagttcatggctcctcctcctcatcctcctccacttcatcctttggatcatttaagacactatgatgattcctcaaacaacatgtggggttttgaagcaaatagtgagtttcaggcattttcaggtgtagttggtccaagtgaaccaatgatgtctacattcggtgaagaagatttcccgtttctaatttcgaataaaagaaacaatgagctttcattgagtcttgcatcagatgtttctgatgaatgctcggagataagtctttgtgcagctacaagattagcctcagagcaagctttttgcagcagcaaagacatttctaataacgtgttactcaaggtttctctcaacttatatttggctc

SEQ ID NO: 146053 - DNA, 836 bp, Arabidopsis thaliana landsberg
aacggagaacttcaacggcgagctcgggaaattaatactctccgacgatttgattcggtatgtatatgtatctggagctcgttatcgtcaaattctatgcttatcggtataacttttgttgaatttggtcggatcctctcatgattcagatgtattgtctcttttggctgtgactgcaattcatccattttactgaagtttaggattactaagtgcgtttatggccttttaaggtttcttcttgattgttttaagcgtttgcgattagttaatattggttcttttgcgtattttcatgaactctagtgcctagtttctaatgttgcagcaactggttctcataccttatatacactactcaaatcaatacttatctatatactaatgttactgaatctaggttcttttgctctataaatgatgtactggtccttaatacttttcacttatctatataacttcttgttacatgtcgaagtgtatagctttatcccttgatcatcttgactacttctcttccttttcggcattgctaatctcagcttctttgtgttcttatactgattgcagttaaccaggctttgtataattaagggttagtttccaatcttgcaatggtgtctagtagtgaagttcttagcctatgtcgtgccttgcttcgagcgggacgtcaattccctgattacaacattagggagtacagtaagcgaaggaccttggatggcttccgcatgaacaagaatctcactgacccatcgaaggtgactgaggcttatgctgaagctaaaaaacagctttttgttgctgagagagtgctcaaggtttacttggcatat

SEQ ID NO: 146054 - DNA, 404 bp, Arabidopsis thaliana landsberg
gcagagtgcagacattgttgattgaagaacgctaatcgtttgtttttttaattgtttgcgttaagttaaagctacttgttgggacgtcaaagcaacgcttctttcgattctgactttcatataaatactaaactccaactttttgatttctctgctacttttgttcttctcttttacttccccagatacatcaatcgatcaatttggtactcttctctcttctctttaatccctaatcgattctgttatgtttgtgagtgcattttttttttctggcaaagtttagttttttgaggattttgttttttgaatgtagcaaaacatgtctgttgagttatgttcggtgaggcctttgtttggtggcgctatctccaccgtcctccctcaaagatttcaggttctta

SEQ ID NO: 146055 - DNA, 186 bp, Arabidopsis thaliana landsberg
tacacttgtcttaaaaaaaaaaagccaacgcttagcgtaccacacagattatagacttctgaattttttgttggcatgaagttgctctgccaaaaaagggtcatcacccttctagcaaacaatataatctcaatctctttactgaccaagcctcccatttgtgatgatggggtcaatcaggatgac

SEQ ID NO: 146056 - DNA, 366 bp, Arabidopsis thaliana landsberg
atccaagttagtttccttcttaacattttaagcatttaggccaatgcgcatactaaatagcaaaaagaataatatgagatatttgggtcaaggtgcttgtccacctgtatatttccattacaaacaaataaaatcaagtggtcggattatcgtgttggtcaaaacaaaactgtggacaaatttatactaacgcaccttaaacttttaatattcactatttaatcttatataattggtctagaagaatcgtttttaataaagcaagtagtcaagtacgaagtgtggaatggacctcgagagtgaatttgttaaaatgataatgtctagtctttaaaatcgagggaatgattgagaaccaaagcaggc

SEQ ID NO: 146057 - DNA, 380 bp, Arabidopsis thaliana landsberg
acccctcgtcgtctttctcccgtgttctaacctcattcctccataacccctttcttccttttgaatctctccttcttcttcttcttcatccccaaattcgaaaccctaaccctaaactcagtttcaaaatggctgaaccaatcaccaaggagcagcctcctccacctgctccggaccctaattccacccaccctcctccgtccgattttgattccatctcgatccctccgttcgatgatcatttctccgatcagactccgattggtgaactcatgtccgatctggggtttcccgatggtgaattcgagctcactttcgacggtatggacgatctttacttccctgctgagaatgagtcgtttctcatccctatcaatacg

SEQ ID NO: 146058 - DNA, 361 bp, Arabidopsis thaliana landsberg
actacttaaaatttatatttatgtacctttaactaagaaattatgggaaaaaaacaagtgcacaaattatgaatcttggttgacattccatcaaaatctaggatcgaaccttgtattctcccagtggcgagagctatataggcagtgagccactttctttcatatcgaatgttggactactcggtcagcttgtagtgtccaaaactaaagtaacaattaaaagaaatgactttttcttaaaatatgtttcttctattttaacattaatatttgaatttttttgggttttgtttgtttgagggtaatcttctagggtaactaagccaaaccgaaaaagttatgtgtgtttgtggctagtttg

SEQ ID NO: 146059 - DNA, 374 bp, Arabidopsis thaliana landsberg
atttcatatgggtaagttgcaacagagaaacgattaatggtttcccctcgattttcggggatgagtcgatgagaaaaagaattgcttctcgtaagttttggtctcaaatgtgaagatgagactttgcgggggagtggaagacttcatcaagtacgatttcatgaagtctctgttgcgaatgatggattcccaatattttgatagacagaggaacctcgctagggttttggcaggtgatcttatgagtatctccagaatgagatcaaggggaatcggatctgagatttctccgattgttcttggatcgtcgtagatattcttatttgctatctgtgtttccatggcggagatatacgaacgtcgcaatacctgta

SEQ ID NO: 146060 - DNA, 445 bp, Arabidopsis thaliana landsberg
gagggattcagatctatacgacgaaactgaatctcaccgtcttcttcttcttcttcttcttctagacgatccttgtgtttctcttgctctcgcatccacgcttctctggtaatgctactgatcgtcaccgtgaagctgagcttgatcgcttccccttgtgaactgatctgatctgaggtgaatctctatttcttctccttcttcattgtacgaatctcgatttctcggatcttgctgcttcttatcgttagatctgttttcaatttcacgtggattacgttttttttcttccttttgcgggtttttcgatttctatgaactgatctttctccatgattttcattctctgttgatctggttcctgtacccttgtttctgtttcgtaatctgtgaaaatgctaaccaagttcgagaccaagagtaaccgagttaagggtcggagttt

SEQ ID NO: 146061 - DNA, 963 bp, Arabidopsis thaliana landsberg
  unsure (1)..(963): unsure at all n locations
ggaaatgagcttccacgtcaacaagataataatctcttcgggactatacatttacaacaaaaagaaacaaatcttgtggtcaaagtttccatacgtagcttctcttctctacactcacgtccaccacaatcctcgtgctccttcctctaaacccgtccgattcacgtacttttactatcttttctcaatccaacagctcacagtccacaaacaaatttcaaatcgcgtcctataaaatcccctctcctctgctccacactctctcaaaaccctagaaaaaatggcaggaaccggagttgtggcggtgtacggcgaaggagccatgacggagacgaaacagaaatctcccttctccgtgaaagttggtctcgctcagatgcttcgtggcggtgtaatcatggatgtcgtcaacgcagagcaagctcgaatcgctgaagaagctggcgcatgcgccgtgatggctcttgaacgtgttcccgccgatattcgagctcaaggcggtgttgctcgaatgagcgatccagagatgatcaaagaaatcaaaaacgccgtgacgattccggtgatggcgaaagctagaattggtcatttcgttgaagctcagatcctggaagcaatcggagttgattacgtcgacgagagtgaagttctcactctcgccgacgaagataatcacatcaacaaacataatttcaaaatcccttttgtttgtggatgtaggaatctcggtgaagctttaaggcggatccgtgaaggagccgccatgataagaaccaaaggtgaggctggaactggtaacgttgttgaagccgttacactgtgaggagtgtgaacggagctattcggttacttagaagcatggnnnnnnnnnnnnnnnnnnnnnnnnngaaaaagatcgctgcgccgtatgatttggttgtgcagactaaggagcttgggaggttaccggtggttcagttcgct

SEQ ID NO: 146062 - DNA, 417 bp, Arabidopsis thaliana landsberg
taccactaaaatacatattcatgatcaaaaagaagataattaagtggattctcatgaacgccgattttatatccgattgagccaaaatcgcggcggtccacgcagaaatagcgcttttttcgacgcctagtcgaccgattagtccgatgtttagaagcgtttgttttagagaataattatgccttcatttttgtcaagtttgtttggtttggtgagtagtagttacacaattgttcttattgctttgcatatgtttatggatgtctcaagaaactttatgaatttgcagggcattcaagcctcttttagaataggtttggttcttccccgagtagtagcatctacagagagacagatttcctctacggttttaaaaagagcttctgaaagtgtctctttttcattcgctccgtacat

SEQ ID NO: 146063 - DNA, 364 bp, Arabidopsis thaliana landsberg
aatgctcatggaacgataacaaagctttcgcgtgaaggaacttcaagggcgcagagaaaagcaaatgggatattggacagactgagaaaagctatgaatctcactcatacagcctgagaaaagccttgaaatctgcaatgtaaattacctaaaatcttgtttcttttttttactttatttggctgtaagaatttttgtaaattattcatatctttaggatctgaatggttattggttttcgtatgtgagatgtaagtagaaatctgtgtgaatagtttttgcgtttgatgtttctggagaaatcaatcaataaaatcaatgttggtggctttattcagctgtgaaagccttggtcaacaagtaa

SEQ ID NO: 146064 - DNA, 629 bp, Arabidopsis thaliana landsberg
tcttctaatggtctctcttctatgcttcaaggatcatgtacagtattgaaggtccgtactcacctatttacaaacctttgaattttggtgacattattctccttaatctcaaatcccttttctaataggaagtcatctatatagatagccaaagacgattaaaggtacattacaatccccaacaccacattatcagaagtttttatatgtttgtttgaaagactcaaaaatcatctactttttactaccacagggtgcttcactcgatctatttatagtaaattcatatggttcagctttccaagtaagtgtttcaccctaaaaatttctctgtaaactatgacttgcattccaagccaagtaatcttgtctctggtggttttgtttccttaccaattaggccatctgcattgcgttgcttcttccatttctttcaaaactttggggcataccgtttaaccaactcggtacctacctaaaagatggtgcggtttgttttctcaacaatgggacaataacaaaaggatgtgatggggctccgtttttgcctctgttgtttgtgataatgaacattggctataacattgctcttttaagactcctcaagatttcatccgcggtggtttcat

SEQ ID NO: 146065 - DNA, 1063 bp, Arabidopsis thaliana landsberg
cacaacacaaaaaaaaagtgttaagagatccttctccctcttcgaagatgagcggtacggtgaaggatatcgtttcaaaggcggagcttgataacttgcgccagagcggcgcaccagtcgtgcttcacttctgggcttcttggtgtgatgcttcgaagcagatggatcaagttttctctcatctcgctactgatttccctcgtgctcacttctttagggttcgtctctgttctcttgaccaattcaaaattttatcactttcaatgaggtttttgactgttattggttttatcttcttaggttgaagctgaggaacatcctgagatatctgaggcttactctgttgctgctgtgccttatttcgtcttcttcaaggtaaagttacggttttttttgttccctatgatttgatcaaaacttaggatttagggtttttgtttttgcttaaagttgtttgtctaatttggtagaagaagaagacattgatgaagtcatacttattgattctttatgttgctttgtttggttgcaattttctgtctttatagcattgagagtgtgttcaaaagtttgaatctttgtccctatgttttgatcgaaagtttaggatttagggtttttgttttgattagtttgcgtctctgttagattactgaaagctgtttatctaatcaggtagtagaagaagatggttcgcctatccatttagctccagacttattgattctttgttttaattggttggttgcaattttctgtctttataggattgagagtgtgttcaaagcttgaatctttgtcactgcactgtaatgattgttctgaaagttgttactttcttctgactgtgaattcgttttcttattgaaggatggtaaacctgtggatacacttgagggtgcagatccatcaagttaagctaataaggttggcaaagttgctggttctagtacttctgcggagcctgctgctcctgcaagcttagggttggctgctgggccaacgattcttgaaactgtgaaggagaatgcgaaagcttctgtacaagaccgagctcagcctg

SEQ ID NO: 146066 - DNA, 131 bp, Arabidopsis thaliana landsberg
aaaaaaaggggaagctggtggagcttgtactggtgttttggatccaagaagaacaataaaaggataggccacgcggtgcttgtacccgaaccagctgcatcaggagctgcggtggctccagtccaaaactc

SEQ ID NO: 146067 - DNA, 236 bp, Arabidopsis thaliana landsberg
tcgtgctcagaatctttaacccttcggaatttaaagatttttgacgattacattcacctaagtaaaattattcaaataatattataaacgacgaaaaaacgatttcttcgtcacatattttttttattcccgatgatttcagacattgttgtcctctctcattcaaccttgaaaagattacggccacacgtgcatggtacaccacacgctcgtttttactaccctctcgcgtcata

SEQ ID NO: 146068 - DNA, 232 bp, Arabidopsis thaliana landsberg
cattgataagttttctgctgggaagttgcaactttttctagatttaggacgttacaaatttcaatcatgagtgcatcatgggcagatgtggctgattcagagaaggccgtttctcagtcaagcctccttatgttccccacacctacggaacaggccatcagagcctgttgctgctcctttgccacaaaatgatcatgcagggtatggtggtcaaccagctgggtctcgttgg

SEQ ID NO: 146069 - DNA, 517 bp, Arabidopsis thaliana landsberg
agagtgcaacgccatcaaaacgaccgtcgggtaggcaagcaaatgagagcccttcatctcttctgaagaaacgaaagcagctgtcaatggatgattatgtgagctcggtactcaaaatcatttccaaaacataaaaagagtttttcattttactggttaattcatgcaaagcagacagaccatctatttctgatcctaactaaaaaaaaactttatgtctctgcagggaaagcgtaggaaataagaaggcttgtgttgaatccatcactaagtaatcagaaagatttatgatcacttctaggtttgattccgaatcggagaattagttagaaaaagctccttagagacaaggatctaatattttgtacccgcaagcatcactgcattgtctccgacttctcttatttcttcaacgtgtattttactctattttgtttgtagaaatattcaccacattcctagtagtgcgtttttagtaaatctcaaatcaacttttgtggtcggatttgaacaaaac

SEQ ID NO: 146070 - DNA, 614 bp, Arabidopsis thaliana landsberg
gaatttcgatactcattgtttggattcgttgatatattcaagtgatagtctgacttacaatggctccagttccggatccgaacagtgttggcggtggtgcgaagcgggacgaagctacgacgaagattccttctaaggattccaagaagaaagatgataaaaaggaagaggatctggtgagttttctttatatcgatttcgattattagttggaatcgtgcttagctgagttagaaagaatccagggagatcggaaaaaacttcacgattaagctgtagattttccgagatgtacggtttagctgatatattgtgaatgtcgcattgctattcagaaagcgaggttaagaagttggttaaatccacattataactcgttctgggaagatacaattcttgttagggtttaagtcacatggagttaaattaataggaatcttttgtactatggctatggttatagctggtttgattggcagctgactcaatttgcatatgatgttattgtagtctgaagaggacttgcaactaaagcagaatctggagctctatgttgagagagttcaggaccccaatcctgagttacagaagattgctcttgaaagcatgaggta

SEQ ID NO: 146071 - DNA, 473 bp, Arabidopsis thaliana landsberg
gtcgtaaaggtcagctctccgtagctacagaggtaagaaagaaaaaaatactccggttcagttcggtttttggattttgatgaatatcgttatctaattgttatggtttggtaatcggtttaataggtgtttgaagtggcgccatcattgcatgtggtagagcttaggaaaaccggtggtgataccctcgagtttcacaaggtatgtgattcggtttgatcttcatcaaaaaccggttcggttttgatccggttaacatctctagtttagtgtttaaattggttttatgtttgaatctcttttgcagttctacaaaaacttctcatctggattaaaggatgtagtctggaatactgatgcagccgctgaagaacaaaagcaataagaaataacaagttgttcaattcaaagtttttaatcaatgttgaacatgtataatgaatagtaaacattctggagttggcaatatacaa

SEQ ID NO: 146072 - DNA, 276 bp, Arabidopsis thaliana landsberg
tgggatgaaaattataataataatttctatgtattttttttttttttttttgttaaacttcgtttgcatctaatactatgcagcccatatactaaatgcctaaatctatacatatttagattgatctttaaatatcaataaaaaatttagctaaattttgactggtttagaggatttttccgatgtgtcattaggattatacaactatggtttaaatatcaataaaaaatatagctggttttacaatgcaatatgattggagtgttaatttttatt

SEQ ID NO: 146073 - DNA, 99 bp, Arabidopsis thaliana landsberg
aatagcacgaaggtgcgtgaagggcagtggacaaagcaatgaaaatttgttttgccgtgagctctctttaataaacgacttctccttccactgagcttt

SEQ ID NO: 146074 - DNA, 1086 bp, Arabidopsis thaliana landsberg
ttaaaaaccatcagcttccactagctaggataaaaaagatcatgattgccgatgaagatgttcgtatgatctccgcagaagcaccgattctcttcgcgaaagcttgtgagcttttcattctcgagctcacgatcagatcttggcttcacgctgaggagaataaacgtcgtacgcttcagaaaaacgatatcgctgctgcgattactaggactgatatcttcgatttccttgttgatattgttcctagagatgagattaaggacgaagccgcagtcctcggtggtggaatggtggtggctcctaccgcgagcggcgtgccttactattatccgccgatgggacaaccagctggtcctggagggatgatgattgggagaccagctatggatccgaatggtgtttatgtccagcctccgtctcaggcgtggcagagtgtttggcagacttcgacggggacgggagatgatgtctcttatggtagtggtggaagttccggtcaagggaatctcgacggccaagggtaaagtttcattttctgtgcaatgtgatatacattgattgattacatgatcgtctagggttttaggagatggaatgataaacaatctctaagtctggtttgtttgggatataatcatgttagtccaagatttctctgtttattaaggttttaggatttggaatgataaacaatctctaatcctgtaatcatcaagatttgaaaattgttttcatatcgcaatttgcaaacattgctatatcaaacaactagattctcttgctcttctgctgaatctgaatgaatcaatgaactatggctccttaaacttacctttcaatgttttggtatcatttttgcagttaagctcagagtattccagatgatgcttgacctgcttgaagatagcagatattagtcgacctcgccttgaattttggatgtgtttgatagattatgcctaaattctaatgaaaaggcttcgttaaagaagagtaaaaaaaactcctgtttctctctgttaacgtatatgttattgtagcaaaaccatcattggtgtgacttagcctaactatatataatctaat

SEQ ID NO: 146075 - DNA, 368 bp, Arabidopsis thaliana landsberg
gtcttcgtgaaagagcaaagaaggatactggaatcacatgtgggacgagataaagcaagacttaaggttaaggatcctgccttacaagatacttgtggaaaagcttctaagaattcctttagaagttcgtttccttcttcaaaagatggtttctccacaaagaagcatggattagtttcatccgtaccagatcattcgaggaaacgtaaggatattgatccatccataaagcataaaatggttccacaaaaatcccagaagatgatggaagactcccgtgaagctggcaaaaacaagctgggagtaaaagaagcccgtgatgctggtaaaagcaagatttcactgggtgagaggttgtttagttatac

SEQ ID NO: 146076 - DNA, 1007 bp, Arabidopsis thaliana landsberg
ggagtttctaatcatgtctctctctgttttcttcttattcttctatcaaaccgtcaagttgggaaacaaaacaaaactcgcaagtttaacaacgcgtcttctacctcctcctcatcggactatttatctatagtcttcgttagatcaattcctctgttttactcctaagtttcgagatccacatttctttttaacctcatctcatctcttagtcgagatcttcactttctgatgacaatagggtcgtttttctcttctctcttattctggcgcaattctcaggtaacctcaatcgactattctctgttctactccttttttctttatcattttaaaaatcctaacattgaaaataaagtagttaaatagagtcaacgaaaacattgttaatgaaacagtggtgtgcttagcataacgaatcagacagacaaaaagtgtctggatccgtagagcaaagtgttgtcgtgtctttgacaaagttctttgtttgcctaaaccaatttgttcatccgatagaatgaattgcattccgttgttactatcatccaaaccggagatgtcaagccctaaccctcaagtagtatttcttagagagccatgaattgtttgtttagatccaattagaagaaggtttagttgactgtgatgattgtttgtgtttttggtggcaggaccaggaggcgcagagagggaggatgcaggagatagatcttagtgttcacactataaagtcccatggaggaagagtcgcttctaaacacaagcacgattggatcatactcgtcatcttgattgccatcgagataggcttgaacctcatctctcctttctaccgctacgtgggaaaagacatgatgactgacctcaagtaccctttcaaggacaacaccgtacctatctggtctgtccctgtgtacgctgtgcttcttcccatcatagtgttcgtctgcttctacctgaagaggacatgtgtgtacgatctgcaccacagcatcctcgggctgctc

SEQ ID NO: 146077 - DNA, 121 bp, Arabidopsis thaliana landsberg
aaatctagtaaaacagatgctgagagcaaaatctgcgatcttctgctatttccccatttgaaactccaccgttcaagccggtcactgctccaacggaccggcggaacaaggagacaaaaag

SEQ ID NO: 146078 - DNA, 244 bp, Arabidopsis thaliana landsberg
gaaaaaaacgagcatcgtccatcgagatccaaatcctcagtttcattttcatctctctctcgtattgatcagctactcgaaactccggtaacagattttcacaatcccggcggcgaaattattcttcccggctaacttttcattttcttcagattcctcgtcgtaaagttgccggtggacgaccaaggtccaactcttgaacatcccaaatcatgaatcccttttcttctggtactcgtctaag

SEQ ID NO: 146079 - DNA, 447 bp, Arabidopsis thaliana landsberg
ttttgtttcttgataatagttgaaattagaggaaagattcatgtctaatgattgactttcttggttgagttacactgtccattaattgacacgattattcagttgcagaaatggcgaaaaccacagaaagactattaactcaatacacttcaacatgccactgcttgttcttcctgagctgagtaagtttctgctcccagctttcgcctcgctcttcagcgactctcttaagcgtatcttgaatcccgggcatcattcctttaagtccgcaaaagtaaatatgagctccattgtccagaagtttgaagatttcatcgctgtattcttcaatcttgtcctgcacatacattttccctcctttcttgtttttctcttctctgctcagcgctttgtcgtacctgaaattttctggatagtccttgcggtacccggcaaattcttcatcat

SEQ ID NO: 146080 - DNA, 223 bp, Arabidopsis thaliana landsberg
gggaataagaataaaatgaaaacaatattggagatcttaacaacagaaatactctgatctaagtaatgaatttaacgagaatgtttctgaactacagtcagatttgatttgtgaagatttacagaaggagataaacctagggaacaatttacgcaccaaacagaacaaggagagcgccaagcccagtaggataaccaaataacttcatgacatcagccgaaaa

SEQ ID NO: 146081 - DNA, 408 bp, Arabidopsis thaliana landsberg
tgatgcgtctctacttccaaaatggtggcgaaaggatctggtttccaagcttccttcaaaccgttggttgtccactcattttcttccctcttctcttatctttcctccgccgacgtcgttgccttgaagaacaagaaacgactccatttttcctcatgaaacctcctctctttatcgccgctatcgttgttggtttgctcgtgggatttgacaattacctctactcttacgggttagcttatatccctgtttctactgcgtctttgatcatctccgcgcaattaggcttcactgctctctttgcattttttatggtgaagcaaaagttcacacctttcactataaacgctatcgttttgctcactggtggtgccgtaatccttgcccttactctgatagtgacaagct

SEQ ID NO: 146082 - DNA, 273 bp, Arabidopsis thaliana landsberg
ttctccgagagaatatagagaaaaaggaagtttaaggaatctccgacggttacggctatggcggcggcgaataaacaacacgacgctttctccgatgactttgactacgaaatctggtcgtccgtcacgaaagctacactaacggagaaagaactctgggatgttgtcgagaacggagtcccgccggatccatcgaagattccagatttagcagcgaagattcaacccgaagaactttcaagatggagagatctcgctgtaaaagacatgaaa

SEQ ID NO: 146083 - DNA, 603 bp, Arabidopsis thaliana landsberg
gattgagctaattcgatgaaatgcaaactcacacacacatctctgatatttgctgtttcatagggacaatataaaggttagcttctctaaactcttaaactaaatcttcaaagacatgtatacacttgtatttattttaacttgttgatctctaattggcaggtagtttcattcacagtcatgggaaactgaggcttgtgatagactcgaaatgaagttacaatgttttggattttgaccggaaaggttgtgcagaggtgagaaaaagccaagccattcttttgtttaccaagtgaggtgatataacatttttctggggtttttcttttaattcagccaataaaacgtaggaaattttggacataattttttcttttatggttcttcatgtttaaacattagttttcacgtaatttacttgcgtatttctcatcgattacatcaattctaacgattcactatataaaatgtcgaaattataaacttgtttattgaatcagttattagatgatcgttccactgaataaaaacccaaggttaagtttcatccaaaaaaagtttgagagaagaaaaaaaaattagtaactaaaagtggattgtgac

SEQ ID NO: 146084 - DNA, 285 bp, Arabidopsis thaliana landsberg
aaatgtaaagcacgttgttctctctttacatattcgcagtatcttttgttctctgtctctgtgattctgagcgctagatgggtgtttaagagtggaggagactgagtcatcaatctctaacattggaccaactcatggaacataactgattcaggagacatgaaactgtagttgtattgaattgtagtctgaacaaattccagatcttcttgtattgtattcatttcttgttttggatcactcaccattcatgatatatatcaatgttgatataactcatcaatc

SEQ ID NO: 146085 - DNA, 550 bp, Arabidopsis thaliana landsberg
tcaattggtgattatagggtttatcttcgtctttaggttttcgattatttccttttaggtatagctgtgaaattgggaaattttaggtgttcctaatttgataacaaataagtaaatcgatgtgattttgaaccaagtttaagttctcttgccttatgtttcagcttgtgttctgatattgaagtgttgttgtattgtagattgtgttgtttctgggaaggagatggcagtttatgatcagagtggagatataaacagaacacaaattgatacatcgaggaaaaggaaatctagaagtagaggtgacggtactactgtggctgagagattaaagagatggaaagagtataaccagaccgtagaagaagtttctaccaagaagaggaaagtacctgcgaaagggtcgaagaagggttgtatgaaaggtaaaggaggaccagagaatagccgatgtagtttcagaggagttaggcaaaggatttggggtaaatgggttgctgagatcagagagcctaatcgaggtagcaggctttggcttggtactttcccg

SEQ ID NO: 146086 - DNA, 443 bp, Arabidopsis thaliana landsberg; identical to SEQ ID NO: 11549

SEQ ID NO: 146087 - DNA, 106 bp, Arabidopsis thaliana landsberg
gattactagtagtagtagcagaagaagagagagctctcccgtggcgaagaaagcggaaggtggcgggaaaatcaggaagaggaagaacaagaagaatggttacaga

SEQ ID NO: 146088 - DNA, 369 bp, Arabidopsis thaliana landsberg
gtttccatggagttgcattttagttgattcttggaaggatcatttgttctaccctatcttcatcaagtcatacaacatcagtttttgttttgtattcagattttaagacgttcctctattgtctatttgtcttgatctgtcttgcaatggcatattctgctggaggaaacctatgtcaaggaaagatacacaaaatttgccggatgaaatagtgttaacaatatttttcttagagcatcctcattgctgaactatttttttgaatgtttcaaaaccaaaatattaaatattttaatatcaaaaacaaactaaccattaaaaagaagacatacggagaaaagagtctttaaacaaacgttacaaggtctt

SEQ ID NO: 146089 - DNA, 386 bp, Arabidopsis thaliana landsberg
acgttaaggagtgaacttacacataggagagagaatggatgagattctgcaagtcatcgggggagaaaccaatctcatcaagtaatacatgataatgagccggtcttgaagttccctgagagatcatagagggaaacattatatagcgttgattgtaataaaggtgcgaggagtgaagctaaacttttgtctacacttactatttttcctgcatgagcacacatgtaaaaatcgtagtttgtcgggtgtacgatcttggtgtccacaacagttcctgacaaacgacattgtttttttttgatgaaatagttacggaaagaaatggaatcctagtgacgggtgaagaataaaaagtattttttacctgcaggaacattttcaggacc

SEQ ID NO: 146090 - DNA, 640 bp, Arabidopsis thaliana landsberg
aggcaactattttcattcaacttattcttgtaaagacaatgcaaaacgatttgaaacaaaagaaggaaatggaagttagggaaaaaaaaatggtaaagaatatttacaggcaaaataaacatttcttcacattgcaagtgctcgtggtcgctacaaaagtaaactaatcttaacgtagctaacaagtaattgcttcaaaactcgtaaaagtgaaatctttggtcttctcttatgtgaactcgtatgatctcaaaacttgcacgatgtaccaagtctctgtgtgttcctcaacgtcatggtcttgcgttctgcaaaagccgagtaaagcaactcctgaaacctctccaagaacacaacccattcaacttctttcatgtcggctaacttcacaaagtttacgctaagcgggagctgcacgttcgcgctcttgtgacttaccaatgctttgtcggtttggttgtctttcggaggtttcaggtatccggatcccatggggtggcttagattgtacttcattgatgtggaaagctttgagagagatagagtaagtgttgcctgcttttcggcaccttgttctttttcagcaatgcttctcttggagctctccaagagaagaacgccccgttgaaaatgggctctt

SEQ ID NO: 146091 - DNA, 1193 bp, Arabidopsis thaliana landsberg
cgcgagaaaaaaacaccagctcaaaattacgcttggctcgagactttgaagatcatcggtttctgtttctgttggatatttcggggaagctttgggaggagaggatctcacgtttttgttcgtttatggcgtctgtgtgagacatagtggtggttctagcttttaggtttttggtgtgtgtgttcgtgttatgttaattgctgtttgtgtcgaagaagaggaagtaataaattagctcaaaatgcatttcactaagcttgatgactctcccatgttccgcaaacaggtctgtttctactacatatctttggttcctgtctatgtgtgcttgtcttgatgtgtccagtcttttagtgtcgtaggttaaaattgggtcatattaggcgagatttgttcttcaaaagttgtcaacagatactaattttggagccattaggatgtgttgtgtctggaattttgaatgtccaccgacatttatattccaaaatgtgagtggaacttcactggaaggttcgaattaatgtgtcactaagaaattggtttatctggacggcctattcacgctttaacttgttgctccatgaaatgtgaaatgacttatgatccagtgcacttgtttgggtctctgattcgtgtgtttaggatacatttgtgtccacttagctactactttcatgctcactggtttagtaggacttctgctatctaactcaacttaaatgctaaggaagttcctagtgtagctcaaattctgtccaaaaactgctctgttcgcctgaagttgatgattcttttgcccctatatagagtgcctgaatcactcaatctttggggttatccatagttgcagtttcttccataattggattgtgtctttactgttttctttgcgtttatgtatttttccttccgcagctgcgttcttacattgatatctttttcttaaatagttacaaagcatggaggagagcgcagaaatattgcgggaaagaagtctcaagttttacaaaggatgccggaaatacacgtatgctagttcaaattttcacagctaattaggattgtagctctacatttagagttttcttctggctgaaacatgtatcttttaacagcgatagattattctttctttttacagtgaagcactagcctaggcatacgatggggacattgctttagcaagtgcactt

SEQ ID NO: 146092 - DNA, 407 bp, Arabidopsis thaliana landsberg
gtgaatcgacaagataattaaaaaagggcaagagcttgaaaacttatgtacattgggattaatataaacaataaaaagacttcaagagatctttggaagaaggaaaaaaatacatccataaaaagaaccgataccagcctccgactacaactccacaccatcatattctacttataaaagagcttttcatattctactatataatacctgtaacctttttatgttttactttataatatctattaattattattagatagataataagggtgatggaagatgctaattatctaagtggccaacaaaatacttcaaaaattgcatttttaatatcttatcttaaacccatcatcccattttgctctccagtctccaccaatcgacccccatcctgctgtcattaacag

SEQ ID NO: 146093 - DNA, 242 bp, Arabidopsis thaliana landsberg
cagcagatcaagataagaaagaagaaagaatcatcaaaaaatgggaataatggaggcagagaggaaaacaacaggctgggctgccagagacccatctgggatcctctctccttacacttacactcttaggtttttaattagtttcctcttcttttacatctttgtgttttgttttaatttatttcagtttcatcatcttttgtgtgttttgattacagagagactggaccagaggatgtaac

SEQ ID NO: 146094 - DNA, 351 bp, Arabidopsis thaliana landsberg
tgaaactataaaagaaccaaaacccaatcctccattttatttcaactttataaagtggatttacagttaaatccaaccactgaccttcgtgattgtaataattctataatcaacaataagcttaataacaaccaaaaagtagtgaaatcttaaagatatgtagaaacagaaatagtatcctgttggtggaaagaagtttggtgaatttcaagaaaaaaagcaacttaacgccgtcaaactttctaaacgttcacactgcatttattagccaacgtgtacttaacggcgttatcaccgacaagaacaccagcagctttgtttccaagattgatgaacgcctgacaccgaaca

SEQ ID NO: 146095 - DNA, 279 bp, Arabidopsis thaliana landsberg
agatctcaggcctgatcgcgttgggggttatgagtttcttgatgatcatgaattgatgatgtttcgttgaccccctttttatcgtttcatagattcgtttacttttacgggatgggtatatgttgttcagataactctgaattacttattatctcataaattatcgattgtgcattttctcttaggttaggatcaatttacgtttcatcatatttcgatgtaccaaaatttatttgattaaatactatggataatttaaatgatatttagtgtttgcat

SEQ ID NO: 146096 - DNA, 92 bp, Arabidopsis thaliana landsberg
  unsure (1)..(92): unsure at all n locations
tgagagttaagctataagagagtagaaagttggtgttaattaaagtnttggttcggatattgatggtttttgtcaaaatgactgatgtttac

SEQ ID NO: 146097 - DNA, 245 bp, Arabidopsis thaliana landsberg
ggagagttataaagcttttattgattgccaagaacaggttgacatattggatatattggaaaatttacaattacatggacatgattggggaggtaggaagggcgagccagaggaggagccgttgtggcctattgaggtatcgagcttgccccgctggctcagcggtctcttgctcaaacccacttttcatgtatagactcttcgtctgcttcattggctaccgtcacatgcacgtacatatccgt

SEQ ID NO: 146098 - DNA, 792 bp, Arabidopsis thaliana landsberg
cagaagcctaaaaccttcaccaccaaatcggtgcctccttgaatagtcgccgccgtcgtctatcatcgccgcttgtgactccggtgagtattcttctgctctattgagtttattttggttgaagctctatgagatgtacgtgggtctggttttcatttctgtttcttaatcgctcgaattagcatttgatagctactgagattttgagttttctgatctgccgaataatcttcgccattgtagtgtagatgttgtgtgccttttgattagattacactgagaaattggattgttttcgtgtttgtagatgagaagctaggttattgaatcagagattatggctgcttcaatttcaagaaggatttttcgcacttttggatccttttcagctctaggacgttcctcttcaccaagtattatctcattttccaagcttcttataaaatatgtttgtttcctggatctctgattgtttctctcaacagatttgtctgcgaatacatctggaaatggtttagcttctcttactaatgatctaaaggttggtgtgtttagttaatgtcactttctcctttccttcatctgcatattattgagttctacttactactacttgagtggtcatcttcctgattttgagatgttgatttcgtatttgttatcaatgcagtatggaatggctttactttccaaccgaaagctctccacttctattttgactcctgatgattcatttccttctgatttacttaccaaaaagactgtgcttacaccagaccgaaccataggtac

SEQ ID NO: 146099 - DNA, 511 bp, Arabidopsis thaliana landsberg
tcctgaaatcactgatgctgcagtgatcccgtaagtcactacaacactcactcgtttttgtatcagaaacagtctatgagtttttaatgttttggtgattggcaggtttccggacaaagaagtggggcaatttccaatggcatacgtcgtaaggaaaactgggagcagcttatcagagaagacaataatggagtttgtagcgaaacaagtagcaccatacaagaggatacgaaaagttgctttcgtatcttcaataccaaagaacccttcaggcaagattctacgcaaagatctcatcaagatagcaacttccaactccaagctttgaaattattatgagagtcaatctccatgtattatttattgtttgtgctgtagacctgtagaaaaatctgatactatgcatccatgttgaaatatgaccatgtggtcccaaaacacagaagattacacacataaatggccattatatggtttatgtaatagagtatatgttcaaaacatgtttctg

SEQ ID NO: 146100 - DNA, 246 bp, Arabidopsis thaliana landsberg
cgaagagcattacaggagcttccaagcaactgtagtgagtttcagtctgttttgagaaagaaagggtgggtatgtaatgaacttggtcggaaccgtctcgggagcaaagagctcaataaagctgaagacgcctttgctgatgctatagtggcattcaaggaagtttgcgatcatacaaatgtcatactcatcaactgcaacttgggtcacgggcgacgagctctagctgaagaaatgattccaaag

SEQ ID NO: 146101 - DNA, 455 bp, Arabidopsis thaliana landsberg
agagtggtgaccaagaattccagagtcttaggcattgattccttaagggtcatcgatggatccacatttctcaagtctccggggactaatcctcaagctactgttatgatgctcggaaggtaaatgcataaaccaaatgatccaaataatctaaaacatgttaatgatttgattaagaactgattgtgtcagagtgttttgtgtaggtatatgggccaaaggattcttcaagagagggagatatacaacaaaacggataaagaagcgtgagatattacttgttttgagaaaatcttgatcttggaattgttttaatcaatgtatgattaacttaaagagtatgaatgtgtacatctgttcatgttctgtttctaatatgtataataatggtggaattatggtacttggggcttctagttttgcagaatttcggaatatgagtctagtattatcca

SEQ ID NO: 146102 - DNA, 1014 bp, Arabidopsis thaliana landsberg; identical to SEQ ID NO: 10825

SEQ ID NO: 146103 - DNA, 375 bp, Arabidopsis thaliana landsberg
aagaaacttgcagagctttctatctcttatcctcttctctaccatcatttctccctataaatacgccaacgcacataagtgtttgcattcgaagagagttctagcaaaacaaaacaaaacagagcaaacagagtaagtgaaacgatgtctctagttccgagcttttttggaggccgaagaacaaacgtgttcgacccattttcactagacgtatgggatccgttcgaaggattcttgacgcccgggttgacaaacgcacctgccaaggacgtggcagcgttcacaaacgctaaagtggactggagggagacacctgaagcgcatgtgttcaaggcggacgtgcctgggcttaagaaggaagaggtgaaggtggag

SEQ ID NO: 146104 - DNA, 702 bp, Arabidopsis thaliana landsberg
gaagaagaaacatcttcaaatatgcataataccaaatccacaagtcatcatcatcattacaagaacagcaaaaccctaagagacaacagattataataaggaagtaaaaccaaatttctcaagcctcactcttctcctcctctgaaccaggaccagcatcatctttagaaacctcactagcatcagtattagcatcctccacacttccatttccaacactagcattagatctagccttaacagattcaagcatcctcttactaatctctttagaataaagctcaagaatcttaatcccatcatcatcactcgacacagcattcgaagcaacaccataagcctcttcttcgataagtttcgcgacggtggttgcatcgtcagatttaagagtaccgtatctcttagagaggattgattcggtggataaggtctcgatcaggcgattcagaacggcgtcacgagttttctgagtcggtggccagattcggagagagattcctcctggtttcttctctgattcggcttctttcgtcagatctgtgtcttttgaggctgcttcttgagatgttggatctgtcattgcagaaatagtggtggagctttcggattccggtggcggcgatgagatcgtggtgttgattgtctcggcggtttctgccattttcgaagtttagggattttggagattctttggaaggatca

SEQ ID NO: 146105 - DNA, 332 bp, Arabidopsis thaliana landsberg
tctaaatgttaatggtattaaaaattattcaccttggttgttattcttatttctgcaaaaccagacaacaattcagtaatcaaaaggacacatacgtaagttgaaattggaaagagttcttcaccaaagctaacttgatcctcacgaacgtctcctaaaatagcaattttcagctgaagaacaacacacgcctcctaataaactcgttgtctttctcacatacacaaaaccaaatttagcaaaatggttattattacctttctccctcctttcggaaatggccaccaccaatcatacaatctaccttcttcgtcattcatcattcacttctc

SEQ ID NO: 146106 - DNA, 192 bp, Arabidopsis thaliana landsberg
aattctctcggaaaaaaatattggagtacaataagtctcatatattgttcagaatgaactaaaagtgttgggctttgggtttttagaattaactaaacgtattggtgtttagttaattctaaaacctcttctgatttgggttttagcttaaacggcgtcgtgttggaagcatatcttgaacggacggcaaaa

SEQ ID NO: 146107 - DNA, 514 bp, Arabidopsis thaliana landsberg
aatctccgtggaaatccgtaattgagattgatattatccaaggttggtggaagattcttctcgctcgagtaatgtcaaatttccagaatttggttacctgcttctccagaaatagtctctgttccttctcaaagactctccggtcattttattcggttatggtcatattcctttggtggtggaagcgtaaccgaactcgccgacgacttgaaaaaggtgaaatcatcgctgctcatctcagagatacaatcaaagagagagacgaggtttgtattctcattcttgctctgttttttttataattcctaccaagtgttcgacgaaatgtcaatgaaacacctattgttactaacaagtttcttatttgtgtgtttctgcagagaatagctcaactcttgcatcagattactcagatgaacgagttacttgtaaaaataacacattccaattgatcacaatattcttgtctcttgccttgccctcttcagaacccatatttttcgtaaaaatcaaa

SEQ ID NO: 146108 - DNA, 68 bp, Arabidopsis thaliana landsberg
  unsure (1)..(68): unsure at all n locations
cagctcccaaatgtttcttattatcgcgatatagaatcctgtcacaccaggcaggaatcngcttcttt

SEQ ID NO: 146109 - DNA, 251 bp, Arabidopsis thaliana landsberg
ctcttatttttttcacctttcccttcttgggaattatcagcactctgcttcgattttggaatgtgagattatatgcgtttgtctaaaatgtgtgtttatgtgatctttcaatttcagcttctgcttattgctttgaattacagagtcgattatttatttgtaagtgtgatatttcactgttaatgatcatcccctgtctgtttgcaatttatgctgcggcgttaaaagttgtattaaatgatgacgttttt

SEQ ID NO: 146110 - DNA, 147 bp, Arabidopsis thaliana landsberg
attcaagagaatccaaaaagtgtcaaataagattcatatcctgtcgtctgtcggtcattttttttgggtttgttgtctccacatctaatgtaaaaagtttctttattttggtcgcttgcgatatgggtccaaggaatcatccacagt

SEQ ID NO: 146111 - DNA, 146 bp, Arabidopsis thaliana landsberg
cctcaaactctctctttctctctctctctctggttccctagaatttgagcaaaatttctaccataattgctaattattaaaaggaaacataagtaatcgttgcttcgatcctttgttacatggatggatcctgaacaggtaatttc

SEQ ID NO: 146112 - DNA, 720 bp, Arabidopsis thaliana landsberg; identical to SEQ ID NO: 12599

SEQ ID NO: 146113 - DNA, 174 bp, Arabidopsis thaliana landsberg
aatcgacttcagctaaaccctccaagagacacaaacagaagaacgagaggttaatctatcttaactttaccattcacaagatcgatacacaagatcgctctcgctctacaagttgtatacctgcaggtttggcaggtttggttgaagtgcattgaatcttaagcgttttgtgac

SEQ ID NO: 146114 - DNA, 406 bp, Arabidopsis thaliana landsberg
gttagtaccagtttataattgaaaatcagccaataatgtaaaagaaaagcatctcaaacagagaagaataagacaaggctataaaaaaagagaccaagttgtgggactttggagctaaaatgggtcatcgaaagatagcaacttgtattgattcgtgggtccagtgacagtgtaattgaaggaaggttcgtagtagcccaccacagcttaaaataattttttaaaaagattgtgcacttaatggttatggtacatccctctcacgtcctactcaactacacacacttgtcacgtgacagtgtcacggtgacactctgtaatctgtacaattaagtagactgacgcgtgtggctttcaagcgtaggtaaaagtatctcttctggggccaacccaaatcctgctacag

SEQ ID NO: 146115 - DNA, 389 bp, Arabidopsis thaliana landsberg
gatacttgtaaactttactaaggtcttgctccactaaccactattactgccaatttttacaactatatattgccagtcctaatcataatagttatgattatgctaataattttacgaattctcaaataacccacttatcattgcctaactgtgttttcctttgtttattttagttctttttagtttttaaaaagaattagtgtgcttatgttttgtatatatcaaagccagattttacaatttgagtaggaaaacgaactataagataacaaattttacccatgcaaatttaatcacacaacacaatcacaagtttaccccatgaaattattagtctaaaatatgatttacgttgaattattaacatgataatcttgtctagttattat

SEQ ID NO: 146116 - DNA, 415 bp, Arabidopsis thaliana landsberg
aacaagcatccataactcgatccaaattcttataagaatgtaactacatatataaggatacaacattagtcaaacatgtaatctgaaatggtatgattataccaccaccatcttgttcctctataaccgaaatcgccacggacacataccggtttagagtttctattttgttattccctttctgttttaagatatcatccaaaacgctccgacaatctctgatatgtacacaattaaaccagagaacatcagcttccgatgttttacgggagaagaaggcgggagcggaattactcctctggggcatggggcatccatcgcctttacatgccctcgtacagtacccggggctcgagaagatcagacagaacatctctcatgttgtctagtgatacgggtttgagcaacacaccgt

SEQ ID NO: 146117 - DNA, 407 bp, Arabidopsis thaliana landsberg
ttttttgcattctaaggagaagaggggatctaaaccaaccacacgggaggagctaatgccattttcctccccgtggaaggtctaacaatcacacgtctcctaatctcgtacgtcttcttaggtatgttctatgcatgttaaagaaactgtatcttcaattcttgtcattacatgataatggttttcttatacatgttttgctcataccttataggttttgaagaatggaaaatttaaggaggttgtcaaacccgggaaatttcggattcattggaagatcacaatcacgagttccccaaaaaaacatggaaaataacatttctcctcctaataatatgcaccaccatagtgcttctttagatgatctttttacagaagaccaaccagcttggctcgatgagctccta

SEQ ID NO: 146118 - DNA, 481 bp, Arabidopsis thaliana landsberg
cgagctcagtgccgctagcagatggcctgtaagtgtctctaaaacactcttcagtttcttgtttaccgtttacttatttcttttggatcgattttaaccccgaggacttggctgcaatgtttcaggtatgggcttcattgctattgtacaggagaatactggacgagattgaagcgaatgattacaacaattttactaagagagcttatgtggggaaagtcaagaaaattgcagctttgccattggcttatgctaaatcagtactaaagacttcaagttcaagactatcgatatgagagcgagaggaaagtggaacaaaaacaacctaagagcgctttttgtgattaagaaaaaactagggtcgaatttattatgttaactaatatatacatattaatggggaagcaaattcttataatgttacattatctttctgaatgtaaaaaagtattttttttttaatttcattttagttatagtt

SEQ ID NO: 146119 - DNA, 330 bp, Arabidopsis thaliana landsberg
gtttccgataaccgatcctgtcgcggctagctgagcgtggccgcggcaatgagaacccgatatttcttcctttgggttgtgattgtaacttaaaaggagactttttgtttttattcttagatttgtagctctctgcatagtgagcagaaattgatgtaatatggtttaagagattcggtgttctctggtgtgtgctgcaaccacataattggtgatagataggtttagttatataagcaaatgtattagagataaggggagacatatttgatggtctttcgtttcgtaaacacacttttcttatgtgatatataaaagaagatttatcac

SEQ ID NO: 146120 - DNA, 251 bp, Arabidopsis thaliana landsberg
tcctatcagccttctcctcctcctcccgctggctcagatcaaaacacccatatctatccacagcctcagccacggtttgatagctatgtcgctccatgggcacagcaacagcaaccgcaacagcctcaagcacagcagggctattctcaacatcaacagcatcaacaacaacagggctattctcaacctcaacattctcaacaacagcagggctactctcaactgcaacagcctcaaccacagcagggcta

SEQ ID NO: 146121 - DNA, 420 bp, Arabidopsis thaliana landsberg
gaatttaactatatgcccttttatttcatataaattccaattagaacccatacccttaaaatacgacatacaaggtagtttttttgtaattttacatatatccatacatggatagatttctttactctcaagcaaccttgagaacttgcttaccaacgttttttccatgaagaagtcctacaagagcagcaggaccattctcgagtccttcaacaatgtcttccacgtacgctaatttctcttcttttatgtagggaagaacaaactccaagaacaaaaggaatctatctataaagtcataagaagcaaacccttgcatccttatcttcttgaatatgatgtcaggtagattttgtaacctgtctctggtttcaagatggtactgagatatcatcccacatacagcgattcgtccatacg

SEQ ID NO: 146122 - DNA, 243 bp, Arabidopsis thaliana landsberg
tcttcttcgtacgttaattaaaatctgaagaaagaaacaaaatcgtgaaatcgatctctttaagcatcatctagggttcatcactgaaataaaaaatgcaattaaatctctacaaaatctctcagatctaatcccagatcgttgttggtttcttctccgtaaaccaatcccacatatgaattaaagattcgatctcgaaatcgttggcttttgttgttgttgcattcttcggtgatggctccg

SEQ ID NO: 146123 - DNA, 114 bp, Arabidopsis thaliana landsberg
ccacggacgagtaggctaaaactttgaagaaataccagttgtaccatatgtatcaacaaggtaatttttttgggaccgtgtaagatttgctcttatatagtttcaaaattttgc

SEQ ID NO: 146124 - DNA, 158 bp, Arabidopsis thaliana landsberg
tgtcatatgtatgtatgtgtaaacacgtgtgttctgatgaaaacagatttggctctttgtttgcccttttttttttttctttaatggggattttccttgaatgaaatgtaacagtaaaaataagatttttttcaataagtaatttagcatgttgcaaa

SEQ ID NO: 146125 - DNA, 205 bp, Arabidopsis thaliana landsberg
atcaagtttgatcatgcatatttgttaaggcgcctctctcgtattgtctccaccacttttctacgtgttttgttttctccgatgttttactttgaaaaatctatttcaatcaagcaatatcgtgtaataaaagcaaggttctcgaacctgcgggtaaactttttattttgaataatttattttcaatcaagcattcttttgactt

SEQ ID NO: 146126 - DNA, 246 bp, Arabidopsis thaliana landsberg
aagaaaacaacaaatccttgagatccatgtcgagagagaggatcaaacgtgaattacctcctgttcaagaggtactactactcgcatctcctttccttcttcttcttctcaaatttcgttaatttcactcgataagagataacacagatccttcaaatttgacaaattcttaaagcatattgataaattgcggaaagtgatagaggaaggcaattactatggagctttgcagatgtataaatctat

SEQ ID NO: 146127 - DNA, 337 bp, Arabidopsis thaliana landsberg
ttagataaataaaatgtattagtatataaaatagaaatagaatattttttaagaatattctttttagagtagaaaatagagggataaattgtatagagtaactctattttcgagtaagatatagagctatacattggagatggtctaataaaactcatatcttggaggcatcagctgtgatacgacggttgagggcaacggcagccttcgaaccattgggacgaccgagatgcttgctgatgaaatctccagcagctataagctttcccaagtcgacattggtgtggacgcctaaaccgttcaacatgtaaaccacatcttctgtggctacatttcc

SEQ ID NO: 146128 - DNA, 442 bp, Arabidopsis thaliana landsberg
gcataaatttgtcttgagtacttcccttgtagatttttcttatttgcctagcgcttgtttgtttgatgatgcgcacaatatcttttttccaattttttggttttttctttaacagctttacacaagtttgaaccttcagaaaccatttttgctcaatctcatagacagagagagacaatttacttagctaggttctaatagctcactgtagagttgggttttgactagcagaggaaatttctggtgaagtgtgacggctctcgaaggaaaagctctttatacagatccgaacaagtttgcatttttgtcatctaatcagataatctcgcttatctggaatttgcattattggtgatctgggttttatctgtttagtgttgaagcctgttgtccgagtatttagggttcaaattatagtacagtgttgagtgatgtgtggttt

SEQ ID NO: 146129 - DNA, 382 bp, Arabidopsis thaliana landsberg
caaaaacgccaaagtgatctgcaatggagatttagtgttgtactttatgtccacaagctttgatgatgtgaactagtaacttgtctccggttatgcttctgactcgttggattagttcgctccgtgtaattctcctattctgttaaatccaaaggaaagcaacaattagaatgtgaaatgaaatcacctcaaaagataatggaagaggaaacaaaaaaaaaaaaaacacttacgtgttgatctttgtaatgtttctgaatgacaagtatttgagaaggaggtagaaacttggacaatgttttgatcaatacaggaaatgccatccatggtgatctcaatctctttggacttcctgcaaaaacagttataactatgtcaaaaa

SEQ ID NO: 146130 - DNA, 1437 bp, Arabidopsis thaliana landsberg
cagaaccctacagatcatcccctacctcgctgcttcgggtcgaatcagcgagtcgggtcaaaattcacctgagaaaaatgttcgcgaggcggttcacttcgttcttcaaaggatcttcaacctcaaggtacccaaaaatgatgcaacttctctgatttttctgcttgaatttgcaattcttgaccgtgaaaaatccaatttcggattttgatttgcgatcttacaaattagaatccgatcgatttctcttcttcgcgcatctgaattcattccatctctatcgcgatttcaaaatcgacctagtttttctagttggtgaaatgatctatatacccatttacacctattgacttgagcttatatggattagattcaaaatttggatgatttatgttatatatggtcgtttaggagtgaaaatgagctgaagaatgtttttgaaacagctcggaaaaggccgtgaaagttgggacattgggctcttttggtcgcaaggcagtgtctttcgtcttgattacagtcactggtggtgttgctttgagtgctctcgatgatctttctatctatcgtggatgtagcaggtaatctcccatcacatattcgtttcattcaaaattgcatttatctttccattgaagtttagctattgcaatagacatactatgtgtgtaaccttcactgatagttgaattgtgaatcgattcggagtcttgacaaggctttattagcaagagactcgtttggacaacaggtttagataatgtttaaaccattttgttgaagtggtggctgagaccatcaattctttgaccatattttgttatcaatgggttggggtttaaaggatcaacttggaaagacaacaaacgaaactcaaattctcctgctagtgatacatgtacgtgaattgatactgtctccatatttcgattttggcttcaagctttagtgaaactggttaagcaaacgaagagaaagatgttgagtctggtagtctatcttgtgcttgtgccgccactttacaaagtaatgatacttcttctacctgggctggttaggaatcgagtgaaaagtcagccgtaatatccagaacaaacatattttttttggatttctatacgcaccattttgttatttgttgtccattctgtcatgaatttctctatgatcttctccttgtatcatcaaatcaataacatggacatgattttcaagaatgtagtatctgcattggcgattactcaaaaagtctttgtatgcttaattttcagcaaggcgatggagaaggtgatgatatagtaaggcgatgattgaagccattggagagccaattgagaaagggccatggtacaatgcttcactagctgtttctcaccaaaggcactcagtgtcttgttcattccctgtgattggaccacaaggcacaggaatcttgca

SEQ ID NO: 146131 - DNA, 260 bp, Arabidopsis thaliana landsberg
tgaccacaaagttttctactttgcaatttagataaatctttctatccactttgagaataaattaagggctctcaatttcgaattctgcttctccaacgaaaaaaacgaaatctttaatggcgaagaaaggaggagcgacgctagctgaggatgcaccatggcgagtttcgtcaggaagaccagtgcctaagatcagtcgctctccggttttatctatctctcaaaacccagaaaccgattacgccatttacgtcatgaaa

SEQ ID NO: 146132 - DNA, 539 bp, Arabidopsis thaliana landsberg
tgtaattatcattacacaatttgatcacaaatctcaaagcttcaagcatttatagtaaatggtaaaattcaaagtaaaaagcagaaactttgagcctataggcacaaagtgtggaacctaaacctaaaatcaaaattacaattcagacaacattttctctgatttaattctacccaaatttcaacgatctggaactacaatcaagatcactttgaagaattgaagaagcatacaaaaagctaatcactttgaaaaacccgaaatttcaaaattcggaatccataatagaccttagaaaacaaaaaaggcgggaatgggttagaaaagttaccggattggaagagacgacggtagaagacaagaaacctcgagacgggaggtcagaaaggaacttggaagcagtttgatcagaagaatcggatggttgagatgatgaagcctccattgacaaaccactgataaaccctagccgaggaaggcgaacccagaagagcaagagagggcgagagagcaaagagagaacagacagaaaatcgttt

SEQ ID NO: 146133 - DNA, 479 bp, Arabidopsis thaliana landsberg
ccttcaccaaatccgttacgagcttcttctttcgccttcaaatctaattttccttctgttccgttgctgttgtcagccagttcttgatttgaaccgggtgggaggaacacaccagtgcctgggatgggcattcgaggttgtggtgctgtctggtgtcgtggatgaggtggcagcagtggccagacaggcggcccggttggtacaccacctgggaacggcattggagaggcaagtggaggagaaggagggatgaaaatcggttgaacagctccgtttggtgggcggtgagacggagtgggcaagacaccagtggacgggataacaacagggtagtgtttaggtgggccggttgggtgacggatgtgctgatttggcgatctgctcggcggtggtccccagttagagtttctcggtttagatttgatgaagctaatgagtatccgttgctttcgggttgcgtgaattgcatacttagcaag

SEQ ID NO: 146134 - DNA, 678 bp, Arabidopsis thaliana landsberg
ggattcaggacatggctaaccgaacagacaactcgaatcgctggttagattcaccaatatcctgagctcattgcttgattcatgtgttaagatgatcacattagaaaaatgaacttgtatgttacttccttttgttttgcagttcgaatggtaaaaagccaaatgatggaatgagactcattatagcgacattcgtaggaatagttgtcggtttcttcttggggatatctttccctacactatcactaacaaaagtgagctatatctttagctttttgttaatattttatgctctcatgactttatgcttaatgtgttgtttcatgtggccaacttgtaaactttcagctaaattttccctctggcattcttccctctgttgatattacttacgtagaagatgagacacccagaaacatcgagtgaaacgcttttgcatacattgtcatataggggtccgttacagggggataattcaagtgatgcaccgcattggaaggcatatttctttctctttgatataatagtgaagtgaaaagatcttgtatactaattttgatgaggcttatgcagatttgggttccatcgaatccccgaggtgcagagatgctgactactggtatcattgcacctgaatcagaatactacttacgcagactttggggattacctgaggag

SEQ ID NO: 146135 - DNA, 514 bp, Arabidopsis thaliana landsberg
tttgggagaatagctgaatattattgaccatggtttctattgtaacatttttcagagcttcattaatggagtctaattgcaattctcacaaaatcaagaaaaagaaaaatctttgttctgcttgtaactgttttatacacatgaactcggagttcaaagaaagccagcctctgttcttgggcacaatcattttttaacaaatgcagattcagccaagtcgatggctcgagcaagaccagcggctttgttctggcactcacagtgttcgtcttgcgggtcactatcagctactacaccagctccagcttgaagataagccacccactcacgccgtttgttagcatccttgtaagagtacattgtattgtattgacatgctgtcggaaaaacgattgtcctaagggataaagcaatgtccatgtcaccagtgaaggagactccaccaaaacctccactgtatggtccacgtctcgttggctctagctcatcgattagttccatagctttgaccttt

SEQ ID NO: 146136 - DNA, 97 bp, Arabidopsis thaliana landsberg
agcagctgaacattttctcaagtgcagaagacaactgttgatagaaagtgtaagttctcaagtcgacctttctcagatacggagcaccatccatgct

SEQ ID NO: 146137 - DNA, 604 bp, Arabidopsis thaliana landsberg
ctcggtgatcaataggttgcttgaagctagagaaaaaccaggaaagattgttcagttgtctgaaacagagatcaaacagctctgtttcgtctctagagatatcttcttgagacagccaaatctcttggaacttgaggctcctgttaaaatatgtggtacgtttctctttgtttctctctgactcttttctgagattgtgctcctatgtaatcttttggttaaacaaataataaacaggggacattcatggacaatatccggatctcttgagactattcgaacatggcggataccctcctaattcaaactacttgtttcttggagattatgtagatcgcggcaagcaaagcctcgaaacgatttgtcttttacttgcttacaagattaagttccctgaaaacttcttccttctcagaggaaaccatgaaagtgcatcaatcaatcgtatttacggcttctatgacgagtgtaaacgtagattcagtgtcaagatttggcgaatcttcaccgattgcttcaactgtctcaccgtcgctgcactcatcgatgagcggattttttgtatgcatggtgggctctccccggagctgctaagcttaaggca

SEQ ID NO: 146138 - DNA, 441 bp, Arabidopsis thaliana landsberg
aaaagtagttattaaaaaaaaaagacaatgtaaattcaatttgattttccattcaaagaaatataaattttgagaaagtctactacttctctgaagaaaaataactaataatctcaaataaaattggttattttcttaaaaaaccatcccataaatgcatgaaaggatgtgtacctaccaatgatcaatccaactcaatgcaattcttacaaccatttatacctcacataaccatctaaatcaaatgtttttggactcatttaactaatgttttttgaattttattccaagaatttgtgtaaaccagtaaacaccaacaaaaacgtatgtttttacaatctattttttgattgatttcttcacatggagcacatatatacattaacaggacaaaaaagggacttagttcttaatctctgcatagttctttttacatcttat

SEQ ID NO: 146139 - DNA, 193 bp, Arabidopsis thaliana landsberg
cttttatgtattttgtctgaaactataatcaggggaaaaaaaaaacagaacaaaaacagaggaaggctatagagatagatggacaaactgtgtctagggtgcttcatcatctttgtttgtttgtaaaactcttgtcacacacactgttatgagtcattttctgctgtgtgtgttttgttttgtggtgatgtaa

SEQ ID NO: 146140 - DNA, 481 bp, Arabidopsis thaliana landsberg
gattatttccaaatacaggaagtagaaatgcatggtgatgtctccaaatgggaaggctacgctgactggagaaacaaagccgccttgagaggccgtcacggcggaatgctcgccgcctccttcgtcttgggtcagtctcaaaattccaaatttacccctttttccttaacttctctagtcttgattaatcttttgggaatcatgtgattgatttcttttattttgctttttcttgtgtatgtgcatgtgttttcaagtggtggagatattggagaatctagcgtttttagcgaacgcaagcaacttggtgttgtatctcaagaacttcatgcacatgtctctagccagatcgtcgagtgaagtgaccactttcatggccacagccttccttctcgctctcctcggtggcttccttgctgacgccttcttctccacattcgtcattttcctcatctccgcctccatcgagtttctggtactt

SEQ ID NO: 146141 - DNA, 418 bp, Arabidopsis thaliana landsberg
ctcacaattagttatgcttttgggatattgaatcatgaaggttctttgatcaagattactgtgttatctaatggtactcttagatcaagattccaatcttgcttcttccccatggggaaactcgagcatttctcccactcatgccctttgacctcgccggagattgtagctgaaggcatctgcaacatttgcttccaagaccaagttgttgaatacgcatgtaagccttgcaattttgatatatgtaagacttgctccaagctgccgcaaaaggtttcccatggttttcactcacaacatcctcttgagttttgtctattccaatatgatcgaaaacctggttacattgtctgctcttgttgtgggaacatgtcttcttgctcattctatgaatgtaaagaatgtgagatctatcttg

SEQ ID NO: 146142 - DNA, 332 bp, Arabidopsis thaliana landsberg
aattaatataaacataaaagatatgtaaccatcattattaagcataccacaaaatggaacaaaaggactagagaacaatgcaagctctattactgattctgctttggtatcaaaaagagacttaacaagacattatgggttaagacagataacgctttataggagaatgataagacataacataagactccacgaaattggaaccgggtgagcatgtgggacgaacagaaacgggcattcagatactaacatctaacattaggacaacctttttgggaccatcttatggttgtggctttggagaaaaaacaattaaaacatcaacatcccct

SEQ ID NO: 146143 - DNA, 353 bp, Arabidopsis thaliana landsberg
cttcaagcctcttatgcatgttgggtttaatggaagatagttagagacttctagtactgatcaaatcctgatgcaggttgttgaagatggaggaagtgaagaggtttggcacaggaggaagacttgatccctttatttacaaggtatgaaacttaaaattgcacatccttcattgtgatatatattctagcaataagtacatttaaattgatctttttgcctccttatttttctgtagattgcatgaaagattaagacattaatgctggaggcaggtaacacttatatcccctttcccactatctagttatatacagtttggtttgatcctgatatgggctattggaaaacgt

SEQ ID NO: 146144 - DNA, 157 bp, Arabidopsis thaliana landsberg
cacacttctatttctccctctccttgtcacaaggaaagggcgtagaagaaaccaaaacctaaacaaaagagcaataataactcattaaaaaaccaaaaccaaaaaaaaacaaaatgggtgtcaaaatgttattaatctttggtctcttgatcttagc

SEQ ID NO: 146145 - DNA, 226 bp, Arabidopsis thaliana landsberg
atcttaaagtaaagatgtaaccaatagaaatatattaaatctagggtgaatttggtaggtagcctaattttaagtataatgtcattttcatcaatttcagtgaaggtccaccctagattatattcatgtcatgttcagttttttgtcacaaagtaatctcaaatgctccaaatgttgaaaggcaaccagccaattaacaacttaatgttaaatttacaaaaaggaa

SEQ ID NO: 146146 - DNA, 558 bp, Arabidopsis thaliana landsberg
tgttcattccctgtgattggaccacaaggcacaggaatcttgcatctcaaagctgttcgcaatggaggtaaacattctcaaacccgaacagtcactcaaagacaaaacatatgtgttaggtatctgcatttgccatttttcttactcattggatccccttttctgcttggggatagaagatagcatgttcgggtttctccagcaaagggactgggacattctgataatggacgcacttgtccatgtcccgtcaaacgagggaccccaacaaaccttgagaatcaacgttactgacatcgttgatccttcgcctggtacccacgataaacctttggaaccattagagccagagaagagctaaaaagagaaagagagagagagagagaacgcttggtggagctcctggctagggttttattgcattccattatatcttgtggaacaagagagagaattgggtcttttatttactaataatgaacaattttttaggagtatcaaaagttgaatcatgattgagagtctagtgaatacagcattgctatatccgtgttgatt

SEQ ID NO: 146147 - DNA, 783 bp, Arabidopsis thaliana landsberg
gctgggaagttaccaggagataccacctctgttctaaagcttggtggcaatctcattccaaatggccttaccctactgtgagttcactcatctaacatctctttataacttcttcaagttcattcattgagccataaccaaatattggtttgtaggaggaagataaggcgaggttggtgcaagagacaggtttgcagctaaaacagataaacaattggttcatcaatcagagaaagaggaactggcatagcaatccatcttcttccactgtattgaagaacaaacgcaaaaggtattattatactttaatatagtcttgtaacataaccgaaaaacttatggatcggactcaaagaagactgaaacttttgtttgtctgatgaaagcaatgcaggtgacaatagcggaagagagcggttcgcgtagaaacaacaaacatatgatgtgaattggggaggtggaagatgggatttgaaagcagggttttagggatttaaagttgagaattttatggaggagtttgggttatacagagagaggggacagtattagaaagtaactttttgtgcaattacatagtaacgtagtttggttatgtgattatgcccatatattttattaagtagcacacaaaccaaaaagaaaatatgaaaactgaagatgcaggcttttgtttaatgttttttgtttgtttgtctgcatgagttttttttttatgaaccatcagataatcatcatcatcatccataatatatcttgtgaataaagatagtgagagaggag

SEQ ID NO: 146148 - DNA, 382 bp, Arabidopsis thaliana landsberg
agatcttgtttgaagaaccagaagataaactgaaagaacttgctgcttgaacaaatcagtacacataaatggaagaataaaacagctttgcaaaatccacgataatattaccttgcaggcaaactttatttgctgattatcctcgtttcctgagaacgaattacaagcaggaccagcaagaatgcaaggttcgtattcctgaggtgtaattttgggcagacacaaagcacctcggtgagtcggtttctctaactgcggactatccaatgcctttcgagagtttattttgataaacgatgctgatgtcaacacaaagctattttgctctctaagaaacaataaagcaagggactgaagatgagtttgtcacttaatgacaagc

SEQ ID NO: 146149 - DNA, 91 bp, Arabidopsis thaliana landsberg
atttaacaaacaaggaataagatagatagtgagaaaaaagaataactctagttacaaaagcatttgatcataatctatataacttacaaca

SEQ ID NO: 146150 - DNA, 311 bp, Arabidopsis thaliana landsberg
gaattgataatgtatttttgaacgagtaaacaatcaacgacaaattacaaatctgaatctaaaaatgtatcgacgctggtctcttcgaaacacgagatacaatatcaattaagatgtaaagtgagctgaattacacttccaacaggaacttcatctgtgtgtgcatcaacacttgcttgttgtgagctctagagagtcgacagcatttacataatagtaaaaactcctgttgaggaattacttatgtgcttcgacggccttagagtaaaactcccatgactcgtgtgtctcagttatggcagtttgaccga

SEQ ID NO: 146151 - DNA, 400 bp, Arabidopsis thaliana landsberg
atttaaagaaaataatattattagaaatacttttttccacgtaaaaacagcataaaaactacttttaccatcgagtaaaaacaaaaaagtgcagtggaactcatacgtccagatccagcaattacgcacacgacacaaactagttttgtcatccagtcatcaccaaatctagaacacaaactagaaaatacgtatcgtaaatgacctaaacgccattcagattcaggggtatttaccacgaaactacaaattggaaagcgagggaaagacgattccgacaaagggtaaaagcgtaatcttcacttaatcgttcttgagcatctctctgtaccttagaaacgaatctagcctctgtagcttaagctgttgcttaaacttgttgatgaaatttgaagcttta

SEQ ID NO: 146152 - DNA, 548 bp, Arabidopsis thaliana landsberg
gcggtaagagctgtacctgcaagtccagttggagtgttggaagcaacatgtttgagctataggagtgaagagagaacagttgagtcatgtacaaattcctcacagagtagtccagacaacaacaacaacaacaacaacagcaacaagaggaggagaaaacaatgagagagaataaaagagtcatacattgctttttacaacccaaaaccacaagtactcatgacatttgaggttcttatttatttttttggttttttttttctacataaattttctttttctttctttgatttctcattttcaatctgaaaattggattgaatatgagagttttgtgagaaaggaaaaaagaaaataagagagagagagagagctctttggaaggcggcaaaattaataagtcattattgatgatgatgagagacatccctgttcttgctccaagggacttttttttttctacataatgtcagagatataattaaaaaaaaaagaaatagaaagagaattaattttatgattttttgtgtcctcaaatatgcactata

SEQ ID NO: 146153 - DNA, 395 bp, Arabidopsis thaliana landsberg
tctgagttatcgaatattctatatatgtaaatggccagtttgacaattacctaaaatcatatgatagacataaataattctacaaatttttaaaataaatttaaactaaaagacaataaaattaccattatgttcacatttagtaaatatttcatggacgaatttctccacgtcgattttcgaaatctcataattttccggcgccggaatatacggtggtcgtgataccttaagcaccaaatcccaatccaaccctttaaagaaatcatgtcccttgattccttcaacattaatcctacggctaggatctttctccaacagttttcttaccaagtctcttaacgatgtcgtttctccgaccaaactcggcggttcagttaatatctttaaaaaag

SEQ ID NO: 146154 - DNA, 164 bp, Arabidopsis thaliana landsberg
aacgccagctgaaaggtatctagtatttcccaaaaaaacaaacaaaaaacaacaaggcctatcaggggtactacagtcatttaaatatatacacaagctgaatggttcccaagtatgcttgaacaaacaataagcaaagatatgtttttaagaccagagaccaa

SEQ ID NO: 146155 - DNA, 391 bp, Arabidopsis thaliana landsberg
tgagttgcagaaattgcataagcaatttgtggaaagtaaagtcctgacggaagacgaattctggtctacgaggaaggttggttctttgtttgtttccttgatgtttcagttttgctcttctcgtaagtctcaatcgtaatagttatcaactgtgttctgatcgcagaaattacttggtaaagattccattagaaagtcaaaacaacagatggggctcaaaagcatgatggtttcaggcatcaaaccgtctactgatggccgggtatggtataatacatccatttgctgataaattttatatgacatttcatctggtttaacctctcttcaatttttgatctttcagactaatagggtgacgtttaacttaacgtctgagataatttttcag

SEQ ID NO: 146156 - DNA, 726 bp, Arabidopsis thaliana landsberg
caggagtgttttattgcggagtaccggttttagggaaggagcttagcaaactatgtaacacattcaatcaaaaaggttcaaccaagtttgaatttcacaaggagcatttctaaaagacaaggaggaagaagccaaaagccctctagattctttaatatctcaaatttagccacttatagtataaaggcaatctcttcactatttaattcaaagtgattaaacgttaacacactgtcaaaagtgagtgtgttaacgtttagctccacacgttctaggtttatatacaccgaggcatacgtgtaaatatacgagacagaagaaattcaagggggtttgatagaagcatatagtaaaagtttaaaatttcttgtatagtaagcaaatgagatggagactctagaagagaggtgaggtttggtgagggatagcgacagtaatacgacgtcgtattcgattgtagaggaagtgcaatacagctgcagggaagataaatgatggaagcaaataatgcgttgataaggtccatgtgattaggaagatgacactctttttgggggttatttttttctatttttttttttagtggagtcggtgaaagagagactagagtttttagaatattggaagaatatttgggaataagggagttataatatttttgtatcattgtattatataactaatgtaaggtgtacaaagcataaaatttgatagtttctttcttct

SEQ ID NO: 146157 - DNA, 417 bp, Arabidopsis thaliana landsberg
tgggaagaagaagctgaaaagaaaagagagagactaatcttcttcttcttcttcctctctgtatttttctcattctcttcgatttgtttgcttgctagtgactagtgagtgagagagtatggagagaagtactccggtgagaaagccacacacatccaccgcagatctacttacttggtcgcaagttccaccgccggattctccttcatccgcttctcgctccgccgttcgttcccaccaggtacttgcaccgtttcgaaattcatgaaatttcactctgattttgatccatctggtaatagtatttgtttcaattttggtttaatgtgtttgtagccatcggatgggattagcaaagtggtgtttggtggtcaagtcaccgatgaagaagttgagagcttgacccgcaggttaaac

SEQ ID NO: 146158 - DNA, 507 bp, Arabidopsis thaliana landsberg
tccttctttggaattgcctgatgggactgtgttgaagggagctacgcttgtggcgattaggccgagtgagtcgaagaaggaggtgtgtgatgtgtcttgggtttcttctgcgtttgatgagccttatggggtagctgctaagatgttggttaagagaaggacttattgtcttgaaatgaattcgttctaaagcttgacgatttcgctaagtcggatctgaggtattaaaatactctgtttttaaagtaattttgagtatctattgtgagactaaggaactagtattggtttattgattctaggaattagaacgaattcattataaatttgactttgaagattgtaaattttatgttttggacaagtttcattgtcacaaaccttattcttggttctttcttgtttgataggtgaatgaatcacaaaggctaaccaggttttgaaagagagagactacaatgcataagatcagttttgtatgcagagtgactaatcttagattcacca

SEQ ID NO: 146159 - DNA, 177 bp, Arabidopsis thaliana landsberg
catctttaatctcttccatttggattcggagagagaataaaaacgaatagacaatttgattctctgtttctctctcacctatttttattgggttccgatctgatcggatttaattatcacgttcattttcgattttaatttcgattcttttttttgctggtctcaacggagaaattt

SEQ ID NO: 146160 - DNA, 98 bp, Arabidopsis thaliana landsberg
aatgtttcgattttcaggtcggaccggagtggattaaactggatttaaaaccaggattttgcctttggcgtaacctttcgaagaggaatgtctgcaaa

SEQ ID NO: 146161 - DNA, 355 bp, Arabidopsis thaliana landsberg
gtggggtcagtttgggataacgtcaaacatatagattctaaagaaaagataaggtataaattcttagaaacaaaaaaataaaataaaagttctaataggatacattgtatagtagtgaatgtaattagataagtttatctaaaaacttgagaacatacgaaaatgtattgatttttttttttttgggacaaacgcgaaaatgtattgatttgattgtaattataggaacatttacgaaactaaaatatcatgaattttttttgtcatcattcaattgcaagtgacgaaaaataaataaaaatttcaagtatgaaattttcatggatgcgggatagtagattttaattttttattt

SEQ ID NO: 146162 - DNA, 277 bp, Arabidopsis thaliana landsberg
cttcaccatcttgtggggaaaaacaaaacttctccggccatggatcctggcgacccaacttcaataatcttttcaaagatcagaactttagaacctgagaacgcttccaaagtcattggctattttctcttgcaagacatggaacaaagagatttgattcgaattgcttttggtcctgactctctcatacagactttctgtcagaaagctaaagtcgatttaggtttttcctcgaacggtttctcgagacccatcaatatccatggccagtcattgt

SEQ ID NO: 146163 - DNA, 636 bp, Arabidopsis thaliana landsberg
agttaagagatccagccatggataagagctccctcgtctctgatttcctctcctttctcaatgcttctcccaccgcttttcatgccgtcggtatcgtcaatcatcacccatctcttttccttttgagaactattgattttctgctcaagtctcatcatcgttgttgatccagttctagtattgattgattgatctactatttattatgtgtagacgagtcaaagagacggcttttgaaggctgggtatgaacagatttcagagagagatgattggaaactcgaagccggcaaaaaatacttcttcaccagaaattactccactattgttgcttttgccattggtcacaagtaaccatcttttccttcttcttctgaaaccaatggttccatctattgctacaatgttagagctaatcttttggaaaactttgaacagatacgtagctggaaacgggttccatattattggagctcatactgatagtccgtgcctcaaattgaaacctgtatccaaggtgattttggattttgggatctttttgacattttctccagcgggtttacttaaattttttttgactagaaagtgaggattgtgttgacagataacttaaggtggatgcttggaggttggt

SEQ ID NO: 146164 - DNA, 237 bp, Arabidopsis thaliana landsberg
agtgctctgatattgtcatctcaaaagctttattgaattctttgcagagtttttttgatcgttggatctttttgattccggccttcttctttgtgttggcctctttttgtcccttaaatttatgcggagacttgcgatacattgtttagataaatttatcaccaatgcatgaatattgggagtggctaataacagctggcgcaaaatcattggattaaaaaataagagctttgtttt

SEQ ID NO: 146165 - DNA, 751 bp, Arabidopsis thaliana landsberg
ggttccaatactaaacataactttgatagactgctacaagaaagggaaagagagagcaagagaggagaaggcaaattttgtaaagaagaaccaaaggtatacaaatcatatacttgagaatatatttgcttagttgttgttgtgtgattggctttgttgtttcttctacttgagttagatcatgttagtataatcttggacaaaagggcaaatgagctaaaaaatgcataactaaagaattttcagacaactattattcccttggtcagattttagacacaattgatgaatatatacacttatgcaacccttttcttttttttccgcttctttatacaaacagaattacacgtgaccgatccttctttatatggtaatagggagcttttttctcacttccctgaatccaatctgaagcctttttcctatagagatgttaccctcaaatctcaaacattaccaataggcacagtttgtatcgagtacccaaaagcttcacaatagcttttttagctgattctcagttgcagccacagctcttttgtagcgcaataccatctgttcttttgctttaagccagttggtgaatcctggttagggcgcagaagacaatgtccaccaatagccagtatctaattaaggtaggagcaatgagccaaaatgtgtgttctcagcttttacccgtcgtctgtacctgactgatcacctgaagatgtcttctggttcgctggcttgtcagatgaagccagct

SEQ ID NO: 146166 - DNA, 64 bp, Arabidopsis thaliana landsberg
tctctctctctcacactcactgtaataaacacaaatgacgagttcttctgaatcaactcgcaag

SEQ ID NO: 146167 - DNA, 165 bp, Arabidopsis thaliana landsberg
atagaaaactcatctctcgcctagtttttggttttgttcagcccaagtcttttggtttcaggtgtaattagtcgggttttttgtagcttgcttatattacctttgttatttccgagtttcaaatgaagctaagaaatacgatcataataaaaaagttcttttgca

SEQ ID NO: 146168 - DNA, 191 bp, Arabidopsis thaliana landsberg
atagttttgttgcttgtattgcttcagtatcaatcaagtttcttggagatgtggtctggttaatgatattgataggttttttgattttcacgtgttttgttttgtcgtctagtagcacgatgatgtaaaaatttggtcattacttacgacttacgaggtttaaaatctcgtgacggtactacatgttatcc

SEQ ID NO: 146169 - DNA, 372 bp, Arabidopsis thaliana landsberg
  unsure (1)..(372): unsure at all n locations
gaagaaactagagagggttttttgacctgattatttattttggctgactcattcttctcacatcccaacaaattttcgttgatatctgtctctgtcttcatttccgacatggaatttgttcaacatcaattcttttctttagctttatgatccctcacaaataaataatgtccctctctcaatttgcagcaaaccgctgacgatcaaaaggtgagccaagtcttttacatgtcgataattaggtttggtcaatgaaatgtttgaatgtttcattcttggtttctgatacgatgagaagaagttnggtttcaacacatttttttgttgtggtgtgatatctaaattctgatcatttcaaattgatcaaatgat

SEQ ID NO: 146170 - DNA, 102 bp, Arabidopsis thaliana landsberg
agtatttgctttcaccaacccactcgacggagctccaacgccttcctcctcattctccactctcacaccaccaacttctgattccagatctcaacgatgcaa

SEQ ID NO: 146171 - DNA, 177 bp, Arabidopsis thaliana landsberg
attgtaaatgctaaatcgtatttatcgtagcttaagttgttacagcaatcatcatacttagaagggtaccctacttagaacaagaataaaaacagacaagttcaatgggggaaacaagagaagaagattgggaagatttgtggttggatcaccacataccatagacagcgtttgaac

SEQ ID NO: 146172 - DNA, 649 bp, Arabidopsis thaliana landsberg
tattcgtttctctcctgtgtcgcgtatgtcttctcttaatggtgataataagcttacatttctccgccacagtttttaaatgccggcgcgagtctccgtcgttttgtggctccggggaagtttccaagtgtgagacttagggttttgacgaggtgcgagaaagaaaatgcacccaaaggtgggattgaagatgacgcggagcgatttgcgagacgagagagcacgatgcctgatagattcagatatttgaccaaagaagctccagatagtccaattatatggccatggtttgttggtacgtttctgcttacttttggcttcgttttagttaccgtgaatcataagtcttgtagcaaaatcaaatttttggatttgaaattcattattggtgctgtttttgttctcaatcgctgaagcatttctgactcaagaccctgagattggaatttagggactatactctggtttagcatttgaatagtagtctagtgaattcgagttttgtataccttgttgcatagttcgaataagctttggataaatgaagtaacatcttgatcttctgttgtagcgctggggtttctcgtttatgcgtggagagctgttttgtttgagctatccaactggagaaaagcggctttcgctatcc

SEQ ID NO: 146173 - DNA, 132 bp, Arabidopsis thaliana landsberg
gaaaaaaggaacagactttttacttgtgccattgaccaagaaccacaaagaggaggaaatcaaatggtttttgggagtttgatggattgattgattattcagcaaatcccacagaagaaattagaagctgcc

SEQ ID NO: 146174 - DNA, 279 bp, Arabidopsis thaliana landsberg
agtacttggtttctcaaggtgttctaccacaaactgtgctttccagtaaatggcagaatggtaattttaggaagcaagctggagagtttcagagttccaggtctcaagaagaagcccgaatggatgtttcagctccagctgcagagaaaaggaggtatattgatggctatagctcagctggatccaggaatagcttgaaaggaaggagatcccaccgttatgactcggattttgggaggagcggatcttggtcagagagaagtaaagcttttgagactg

SEQ ID NO: 146175 - DNA, 250 bp, Arabidopsis thaliana landsberg
tgctctttgtccaaatatcaggagacttggaaagcataaccgcagctattactacttgccacgacgatgagaaacagctccctggtaatgatttttctttgttttaagtattgtgttctcaaattgttgatttagataatctgagtttgttgtgtcatcaatcattttttggtttcttctctctgatgattgtgtcagtttcttcagggttggatactttttctcgggagagtgaaactaatgagcccgc

SEQ ID NO: 146176 - DNA, 501 bp, Arabidopsis thaliana landsberg
atctttcttctcttcttcaacgactacctctttacccttgtttttatcgatatcgctatccttagacggcacaacaaccggaatctcctgaggtatctctttatcttcctcctttaatttcctcgccgctaatctagtcctcggcctctctgcaactcctgtaactccgccggcaaccggttttggagctttaacggtactcttcttcggtttcttttctgtaggtgtttgcggaagctgattgggagctacagcatcagtaacacggccacggcggactccacggcgaagctccggcatagctcaaaccccatgcaatcgagacgggacacgaagagtccgatcattatagtcctccgaaaacgagggcctgggtcatgtcggatttggtaagctatttgatatataatcggagattcgatttgccgatgatgaagatggcgatttagggttacgacggttcaagtttgcgatgagaacaatagaagtttatggatgaaa

SEQ ID NO: 146177 - DNA, 495 bp, Arabidopsis thaliana landsberg
ctatgcgtgtggtgtttggtggtggattggagcaaagcagaaacagaggaaagtgatggaagtcccatggagaaaacagagcaagctgctctatactctaccattcaaggctttgttggtgaatcttggaatggctcttatctttatcctgacccttgtggctggactcctatccaggtcctttctctcatcactattctttgattatcaataaaaaacaacaaaaaactatcttagtaatgttttaagcctatcaagattatgattattgaattcggaagccgttgaaaatgttgagtagctgatgtaattctctgttgtttaactctgcagggtgtgacttgtgatatctatgatgagctttggtatgtaactgctctaagctttgggactatgaaagacaactctcttgcttgttctgaaagtccagtgatcagaccacaactctttgagcccaagcccctcaagtctctctctcttttcaaaagcttaaca

SEQ ID NO: 146178 - DNA, 221 bp, Arabidopsis thaliana landsberg
gaaccctccataataggtctaggaaaatgtatatattcagtttacatttctaataagtatcatttctttatgtcgacagtaagattatttctacatgtaatagtactatagtaaaaaacgaaattttaaatagtgatatgaaatttgttcccgtatataaggtgatttcttttgagtaataatatgcgaaatctagtgcaatattcctaaacaaccatacc

SEQ ID NO: 146179 - DNA, 473 bp, Arabidopsis thaliana landsberg
ggaaatttagaatgttcttatcacattattcttaaaatgcattcgttatgttatgtgaatgcactagccaaaaataaataaatgcaactaccatcattggttaatattcatgaaactttttttttttttcatgaaacttatatatctattaaaagtttaaaaccttattatacgaaatgtttgagaatctattatctgtcaccacccgtttgtgaccagagagtagatttctaaagtgttttggataagtttagtgttttattgtatttaaaaatttagaagcacttttcattagactctatatatgacatatctataataatattcctgaatttgaatttagcatctacttatatcgcataactcatttatggtactgaaatttagtggaaaacagctagtaaaagagaagtattggtgtgataaataaagctcagaggctcaggataagtcaggattccttaactcatttt

SEQ ID NO: 146180 - DNA, 59 bp, Arabidopsis thaliana landsberg
ttatagttttgagggattataaaatttatcttcttatggtaaattctttttaacacatc

SEQ ID NO: 146181 - DNA, 379 bp, Arabidopsis thaliana landsberg
gcaaatcaaaagagtttaaaaaccacttgccaccgtatgagaaccttgtctctgacggtcgattctccgctcgccacgacgacgccacgtcagcatccacatagattcctctaaatctcaccaataccatcaaaccgattttcgaagattcgaatccaattcttctcctcctcctccttcttcttctaaaaaatctcatcggatttcatatttttgtcctattgactattcaacgtgacagatggaatacaaaactttttggtatgttttgatttgcctttgtattcaaaatttcgcttctaccgattcgtctgaatgtgaaccgttttcattgtcacttcctttaggttttgaatcggggattgttgcgactgagacg

SEQ ID NO: 146182 - DNA, 466 bp, Arabidopsis thaliana landsberg
gtaaactctctcttattctctctttctctctttctctcgctctctatgtctctctcctctgtttgttatatcaattaatcaagaagatttcttgtgtttttttttttctgttaaagaagatttcttgggagaaaataaggtggattgaaggattagtctttaggaatggtggtggaggaggagaatagaagcatggaggaaggacttcttcagcatcaaaacgacagagatgatcgtcgtatcacagcttgtgtcatcctcagcacttttgtcgctgtttgtagtgccttcagctacggatgtgccgtcagtttctaaaacttcttactttagtcttaatctcttaatttcttcttaattattcgaacaataatcattataatttcttggatttgataggctggttatacttcaggcgctgagactgctatcatgaaggagttagacctttctatggcacaagtat

SEQ ID NO: 146183 - DNA, 396 bp, Arabidopsis thaliana landsberg
tgggtgtagtagtacaagtttcagtgaaacttcaactggatatgcctcactagaagatagatcatcaggccgctctattttgtcttggcaagacgtttattcccctgctgtcagatggagacaaatttcagagccttgtgacccagtggtgtgggttaacaaactaaggtacaagttccatttcccatgatatgtcaatggttgatgtctagtgactcttgcaggctcagcatctgcgagtctatgtttaagtagaacttcaattgccgaactttagtttcatttgattacttgggtagttgagattgtttatactgattgcagtgaagagtttaattctgggtttggttctcatacaccaatggtactcggtcaagctaaagtagtacgctattt

SEQ ID NO: 146184 - DNA, 360 bp, Arabidopsis thaliana landsberg
gatacgaggtatatggcgaatggtaagtactattacgaccttgacgatgacagaaaccacggccgtttctaccagaatcattactacaactacaagcccaccggttacaatgagaagaagtccaacttcaagaatccatacgattccaaccaacagtccgagatgttcggggaagagcaaggagatcagatcactccatgagcatcaccgcatgaaacaataataagtatctgcttttgtattctcgatttttgtttcaagtggtttaatcatcagtcaaaagtataattttaatttgcatataaaatttggaaaaaaaaaaatatatatattatatggcgatgcttgttaattatgata

SEQ ID NO: 146185 - DNA, 251 bp, Arabidopsis thaliana landsberg
cgcagatcacaaatctcatccccagagagagaacccagagagcgatattgaaaatcaaaactctctcctttatatataatcccaatttacaaatctctttccctctctaaaaatttcttatctttgtataaaaagccttctcctttttcaaatcattcaccttcctttcgccttttcgggggaatttcttccaatctgttgggtttacgaaaccctagatttcgaaattccggattgctaactagcgaaag

SEQ ID NO: 146186 - DNA, 163 bp, Arabidopsis thaliana landsberg
aaaagaaaagaaaaaaaccctaattccacgccattgatggctgcacactttttggggtttgttttgctatattgatatgatttttccaattgaagagtgataattaaaagagattcaaatcttatggcattggattatttttaatgttatcttccagtacaag

SEQ ID NO: 146187 - DNA, 631 bp, Arabidopsis thaliana landsberg
gcatttatgacggtggctactgtaagcttcgactatcatactctcgtcatactgatctgaatgttaaggtacataagatttgttgcttttttgagatgtgtacctaaaaaaaaaaacaattgtgaggggaagagaatagtatcggaattgcgtatgcttctttcttttatacatttcgcagcaaaatattaaatcaacgtctaattatcttcttcaattttcctgtgattgaatgaaggcttttagcgacaaaagcagagactatacacttcctgatctaagcctacttgtggcacaaaaaggtcccgcggtgtcgggttctgcaccaccagcaggttggcagaacccgcaagcgcaaagtcaatactcaggttatggcggaagcccatatatgtacccatcatctgatcccaacggggcttcaccctcaggtcaacctccttactatggatgagatattcgtttactaaaaatttcggattttgctgccactggggagtatttccatgtttaggtttgtttgaggttaaaagtgtgattgttctttcttttttgttgttgacataatttaagtgggaagaccaataataaatcgaatatgttgcgcttgctattatactcaaataaccaa

SEQ ID NO: 146188 - DNA, 417 bp, Arabidopsis thaliana landsberg
gaaatattaagcataaatattatcattcatgtgaatgtcaaagcatccaaattgtattcagtgctacattcacatcgttaaacatatcttctaaaattaatacccggataaccagcaatctaactaacaagatacactttaaaaattggatatgttgaaaacaaaaatgctacaatcaatcaacaaaaccgtataaccagtttgagaatgtattacgaatttttctttttttataaagaagaattattttggtattcctatttatcatgtaaaaatataagttatttaaagaaattgagcttagtattaagaattgcgtatgtcaatattttgatattttttaagtcgcatattttacattatggggaagaatgttcttttatttgcagtgaacgtctccattagcaactttacgca

SEQ ID NO: 146189 - DNA, 274 bp, Arabidopsis thaliana landsberg
ttacctagaaaatcaattataagacgaccgtctgaagcacgaccggctggtttcttgaaataagtcattccccatggaccagattgagcaggaaaagcagcccaaaatccgccagtgtccgaattcgagtctccgaagttgaaaattgcttcgaaatcacattttgaatcacctttatgcccataaagcatcacaataatcaagactagaagagagaacgatcttcttctgtttatatcggaagccatgtctatctctgtgtgaacaaaatgtg

SEQ ID NO: 146190 - DNA, 242 bp, Arabidopsis thaliana landsberg
aaaagctttaagacatttgcaccaaaaagatctcaaattcacgttcacatagaaaaattaacaagaggcagaaggaaaaaaaatgtggaggtcattcgcaaggtaaacacactctcaagacatacgtctaatctcttctttattatctaattatagaattagtctccatctcaatttcttctccgtggcttttctctgcagaagcttcaaactcattaattgtaccaaattgtttgatatcc

SEQ ID NO: 146191 - DNA, 605 bp, Arabidopsis thaliana landsberg
  unsure (1)..(605): unsure at all n locations
tgattgggttgtttanagtaaaggaaaagcaaagagaacaagctcaaaatgctactagaggaggagcttctgttaagaagcaatctgctggcgaacttcgtcttcacaaaggtatataaatgccttgttgatcttttttttgttcttgcatctccaagtttcaatttttggtgttttttccgattttgaactgtgcagatatatcagagttgaaccttcctagctcttgttcaatatcttttccaaatggcaaagatgatttgatgaactttgaagtatccattaaacctgatgatggatattaccagttaagtagtgctttttttcccactgaaacctgcgtttttgtctcttaaaaactttttggaaacttatttgtttctttcttaccaaataaacagcaatggtacgtttgttttcacattccaagtctctcctgtgtatccacatgaagctccaaaagttaaatgcaaaaccaaggtaggcctctcctccttttacatgccttatatagtttacagcttctacttcaaaatcgtttgtgatgtagaagctctttgttggttttcttgtttaggtttatcatccgaatatcgatttaaagg

SEQ ID NO: 146192 - DNA, 140 bp, Arabidopsis thaliana landsberg
attgagctcccgagctggagctcttagacaaatgctcctggatcttttagaggatccccatgaaatacgccgcatatgcatcatgggaagacattgcacacttagaagaggagacgatgatttggagtgtacattaccct

SEQ ID NO: 146193 - DNA, 80 bp, Arabidopsis thaliana landsberg
gggaaaaatggcgaaaggagacgataatgtgcagaggaagaagaatgaagtgacgaggaagaagatgagtaggaagaacg

SEQ ID NO: 146194 - DNA, 506 bp, Arabidopsis thaliana landsberg
aagcagataaagttgatcggatactagaatgggaggaggatttagagttttgcatttggtgaggccattcttggcttttctgcctgaggttcagagtgctgataggaaggttccattcagagagaaggttatctacactgtcatctctctcttcatctttcttgtctgcagtcagcttcctctttatggaatccattccaccaccggtgcggatccattctattggatgcgtgtcattcttgcgtccaaccgaggaactgtcatggagctcggtattactcctattgttacatctggacttgtgatgcaactcttggttggttccaagattattgaggttgacaacaatgttcgtgaggatcgtgccctcttgtaagtgttttcgtttcccattatgaagtattggcattacaatacgtgtttggttgaactgtttcaatgtctggtttgaattgattgagctgtttttggaaaccctagggtgtggtcgggtgagttcttattct

SEQ ID NO: 146195 - DNA, 122 bp, Arabidopsis thaliana landsberg
agtgagcactctctctagccatacttgtcagaatctgagtgtaaatttcgattgatgggaaaaagtctggaagtagaactgtttcagagtccctcataactgtagtatccaactgttcaaaa

SEQ ID NO: 146196 - DNA, 408 bp, Arabidopsis thaliana landsberg
ctaccccggtaactaggatcacctcttgtagaattattacgcggaagtgctagtgttggacaatccactttgacatcgtttttatagtttacacacttttgtattacctcttcttacggccgtctttatgttaatgcatttcctaatgatacgtaagcaaggtatttctggtcccttataaataatatagattctaggtatttgtacttacttattacttggtgaaggaacgatagtattttattgctataaatatggattattaaaaaaataaaacatgtatttggatatttcccttcaactccacaatattttattatttttttgacataaaaagttgaagggaattctatgaagagataatggattatgggagtgtgtgacttgaactattgatcgggccgtgca

SEQ ID NO: 146197 - DNA, 341 bp, Arabidopsis thaliana landsberg
tcacacgcggtggctgatacaataacggcactcacagctgacccgaatttcacggcggctcttgcagccgttatttcttctatgatcaatggtacgaaccaccacgtcggcgaaggaaacaacaaaaatcaatagaaaaatattacattttttttggggtatctacattttttttccaactgggttataggaaacagagagtttatttcattgattcacatttgttctgtttcgtaccaaaatcccagtaaatatacaaaagcaaactatactcaagttcatattcgtaaacactataaatagttacgtaacttaattagcattgcctttaaagctttaat

SEQ ID NO: 146198 - DNA, 124 bp, Arabidopsis thaliana landsberg
ctgaccgagtcccgctgactgctgcagccattttgccaccttttagtgcaaatgtttcgtgtgcagtgctggacgaagaaccacacacttcccacaaagcattgaatagatctgagtagtagct

SEQ ID NO: 146199 - DNA, 409 bp, Arabidopsis thaliana landsberg
  unsure (1)..(409): unsure at all n locations
cactaagagtctcttcaaagtttatctggtcgggttgggaaaaatccaactagagaagagcataaaagtagacatctgatcaacccgacccataataacctttttttgttggccgcgtaatatgttcgagcgcggccatcacactaagaacattcataaaaaaaaatccacaggattcaaagcccttaagctttgatcatagtctcttaaagaggtagtaaaaccataaactagagccccaatttgcattcacaagccacctaacacattagcttctggtcatttctgctttatatacacantcaagtaaaaaatggtgagaagaagagaaggtcttacattgccaatcataaaaccggcgcttccgaggncagatcagnannnacaacgccggtggcctcacagaaac

SEQ ID NO: 146200 - DNA, 68 bp, Arabidopsis thaliana landsberg
ctactgatttcatggatcattgtgattgaagttatgagagttggtgaatcagcaagcttctgttacag

SEQ ID NO: 146201 - DNA, 339 bp, Arabidopsis thaliana landsberg
aagagtgatataaacatattctatcatttcacaaacttatatttatgcaattacatctttatttcaatcttcaaaagagaattaggatctaatgaatctaccagagcaattgaaagtgtaatgtgaacagttgcttactgtgagtttttgactgtttttgtctgctctgcttccagctacgcctagcaatgtgtagagaatgtacggtggttgaaaggccgatgcacagatatattatatagaaagcctagcaggcagccagagtcgcatttgcggttttcgtctctagaggtaccacgttattactttggcctttacgtgctatctggtttaagtgat

SEQ ID NO: 146202 - DNA, 383 bp, Arabidopsis thaliana landsberg
ctctctctatctctctcttcttcgtgttactaaaaaggacgaagcttgttgcataatatgttgaggtaaattactaattactgatccaaagttcgaatctttgctccaactccaggctagctgattgcgtagcttccgattgatttctacctgagttttgagttcctttgtggccacttcgttgttcttctgctgggttttttgctcgaggatctgatacttctgtttggtcgatgatcgagtgatcttcgttgggttttggggatctaagtcgtctatatagctaatggtttggatttgagtttgaatggagcgtttaggattttggggattgctaatgggtagtgtggaaaagtcattggattctggaaattcgttggctt

SEQ ID NO: 146203 - DNA, 293 bp, Arabidopsis thaliana landsberg
acgggagctcccgcgacgccgcaaacttgttctccgacgtattactcgtccatgtttaagaacgcttgtcctagcgcttatagttacgcttacgacgacgcatcgagcactttcacttgtaccggatctaactacttgatcactttctgccctacccagtcttaaaaccggagctccggtttagatttgggttgggtttctctctctcacgtttcttttgcttgttatgtacggaaagagaaataaagaaagatatgataaggaaaagcgactatgatccatttttaaagatt

SEQ ID NO: 146204 - DNA, 367 bp, Arabidopsis thaliana landsberg
gccagattctcagtgatttggatatttcgaaatgcgcaatctcagattcagggattcaagcattggcctcctctgataagctcaaactgcagatcctatcagttgcaggttgctctatggtcacagacaagagcttgccagccatgcgtcgggttgggttccactctattgggtttaaacctccaacagtgtcgatccattggcaattccactgtcgacttcttagtcgagcgcctttacaaatgtgacatcctctcctgatcaacaattccactgtcgacctctccacttataatgtaaggtattttagtccgtccaagttcgtttatcaagtgtcaactctttttcaggctctgtgatctacgcg

SEQ ID NO: 146205 - DNA, 184 bp, Arabidopsis thaliana landsberg
gcctctgttaatggaatctagctgtttcgagttttattgtatatatttttttatccttttgcccaaacttttttctgggttttgctttattttttcatccccctttctgataattaatttgcttttttcatgtagtaaaaaaaaattctttttttaagctattaaattcacatcttcccattcc

SEQ ID NO: 146206 - DNA, 235 bp, Arabidopsis thaliana landsberg; identical to SEQ ID NO: 19274

SEQ ID NO: 146207 - DNA, 851 bp, Arabidopsis thaliana landsberg
attggaagaccagtggtattctcattggcagctgaagtagaggctggagttagaaaggtgcttcaaatgctacgtgatgagttcgagctgaccatggcactgagtgggtgtcggtccctaaaggaaatctcccgtaaccacattaccaccgaatgggacactccacgtccttcagccaggttatagagaggaaaataaccaacaagcagagaacagcagcaacacagaaccaaaatattggctaaacttattcatactctgattgtacttggcttctactctgctaaatatctcaagacttgtttctccctctatcagatcacaaaccaagcctagtgattctgtaatactatttggctacttctttcttaaggccattcttatttctaaattccatgtacttacattcccacagatcaatttcttgtgattcccagataatacgatgaacatatgcatagctataaaccaagtgagagtagtagatgaaaccaaacttttattattaatcaaaacacaaacgaaggagaattacattgacctattgaacaaactgaaatgtacaagagaagaaagataagcgttcattgacgtatacaagcacacaagtcctacagaaacatgagtagtactcaaatcagaaaccaagaactaaccattcaacacaaaatcttcttcttatcatttaaaacggccagatgtcagatccaccgggtttctccacaagaatccgattatactccggcctcgacgtctgccaaaaaaaaagaagcagatcaacatgagaaaaaatgcgatccggagtcgaaatcgagctgattcaaaagaacatagccccgataatcagatga

SEQ ID NO: 146208 - DNA, 238 bp, Arabidopsis thaliana landsberg
ttacttagctgtttgtctgagatgccaagtgtacgcctggtggtggtatgaagaaaactcatcttttgttattcttttgaggattatgactacagtttccaaattaattttgtcttctctctgttcgtgatacttctcatgaccaagtaggttgttggagggttaaatgaatctttaccctcgcttccctcatcatcaggagtgaaagttgtatcctattcggtgttactgaatcagg

SEQ ID NO: 146209 - DNA, 611 bp, Arabidopsis thaliana landsberg
cacacttgaacactactttcgaactctctctttatctctcttgcaatgaagctctctatgcgtttgatctcagctgttctcatcatgttcatgatattcgtcgccactggtttgtttctcataacctaatatctaattttcacacataacccatgttttatgataacatattttaacatatatagatagtttcatttttttataacattctgtatttatggtttctatcgattattcttgtgaatgctcatttaattatagttaagttcacttcgaaagttaagtaatatgcatcaagcatgagacacatgaaactaagctatggtctaaacgaagcgttcgttttgggttttgattttgtctagggatgggaccagtcactgtggaggcacgcacttgtgagtcgcagagccataggttcaagggtacatgcgtgagtgcattaaactgcgccaacgtgtgccacaacgaaggctttgtcggaggtaactgccgtggattccgtcgtcgttgcttctgcaccagacattgctgatctacccattctcatgcataattcaagctttgatccatcgtcgcgcgtcacttccttcttatctaatcttccgaca

SEQ ID NO: 146210 - DNA, 407 bp, Arabidopsis thaliana landsberg
gcacgttacgcgtgggtttgcatttcattcgctatcttagtccccaacattttcactgccttgaaaagaacaagctttctctaatggctgctttgaggtacgagcttccatcacaaggacttctacataaacgacctcttatagtcagaggcgatgatatggaattcagcaagtttggttcagatacagcctatgatctgatatacgcaagtgcagtctttctccacatgcctgataaactcgtgtggactggactcgaaagattagtagacaggttaaaaccttacgacgggagaatcttcgtgtcacataacgtaaagttttgttcacggttaggacaagacaagtgttctcagaagctagcaagtttaggacttgagtatcttggaaaacaaacacatgatagc

SEQ ID NO: 146211 - DNA, 307 bp, Arabidopsis thaliana landsberg
ctcttcgccacatcacagattttgttttcttccgtttctcgaaattcagtttcatcatcatcctctctggatttataaattttcaatctacctttcaatcgccgggggataatcgaaacccgatctgtgtaaaaaaaatgatgaaatcgacggcgagatttgcgtctgattgtcggtataatgatcacaaaagcataaaagcgtgacgtttccgcgtcttcgcgtatctcggaaactttaatccgtatctaaagagctaaatttgaagcgatctttctctttttctttgtaatattggtttatttcc

SEQ ID NO: 146212 - DNA, 385 bp, Arabidopsis thaliana landsberg
cgaccacatcatcaaccattaccttctagtcccaaggtagataaccaaaatatcatttccctttctttcataaatcctctttttttacagttgacgttgttatgtgtagggttgctgttttcctccatggagccgaaagggaagctaatgaagatgatcatttccctttcttacataaatcctcttttttttatttgcttctgcctgatttttttttaataatatcttgttattcttatggagatgtaaggagtagtttttgctaaaacattatgcaacttctgttactctatttgcgtttttttggaacaatactcagattcatttataggggtgaatccttttattcacctcctattataataaacaaaaattaaatttactt

SEQ ID NO: 146213 - DNA, 400 bp, Arabidopsis thaliana landsberg
caggccatgcaggagcagttaactgcgtgagctgaagccttacaattctacacatgttggcttcagcaagcgatgatggaacaataaggatatggggacttgaccggattaaccaacaaaaccagaagaagaagctagtgcaaggaagtagcagtaatggtgtgattcaccgatgcaatgggaattgattatgataaaaagaaaaaggaatgaccttcttaaaactatttaacagttatgttgtttcttctttcttcatcagcctctttttgtttgcttcctttggtatggaaagcaaacgaaagaaggtaaaagctgtttttttttttcaaattctgaacccataactggaaggaacaaaaaggaaaaagaaaatgcaatttgcaacataattcttcta

SEQ ID NO: 146214 - DNA, 109 bp, Arabidopsis thaliana landsberg
gaagaaaaaaaaaagactaaatcgtatccaaaatgcttactctaatgactctcatcgttcttgtcctcttcttctttttctcttccccacctccttttacggcggcaga

SEQ ID NO: 146215 - DNA, 427 bp, Arabidopsis thaliana landsberg
tctctccaaagcaatataagagaagattcagaaaagcaatgacaacttacttcctcatggtccctgatcaatggtctccgcctaatgttgttgcaaataactccaagtctgatcaacctgaagaaacctctcaagccggtacacaagcagagtgatacaagaatcattataatgtaagtttattttttggtcttgtatagatttttggcatttgggaacacattattattcgttatttctttctttattggaaggttgggtttctgtcagatatcgattttgtttgcgtcttttagattttgggtcgttaaagtagagacttaggagattgtctgaaaaattcctcagaaagatagagagacatttctcttgtgtatagcttttgctttaatgtgacatgatttatgaaagattcttttgtttatat

SEQ ID NO: 146216 - DNA, 809 bp, Arabidopsis thaliana landsberg
aaaacacaacaatccgatcagaaaatatgagcgaagaactaagtcaaaagccatcatcagctcagtctctgtcactgagagagggcagaaataggtttccttttctgtccctgtcacagagagagggcagatttttttcttctctatctctttcagagagagatggaagaaagttttcttttctcagtatgttctcttttctcatgccactgttggaggttattaagattattattgcttctgtggcctccgtaatcttcgtcggtttcgcctgtgtaaccctcgctggttctgccgcagcattagtcgtaagcaccccggttttcatcatatttagtcctgttctcgtaccagctacgatagccacggttgtcttggcgacaggattcacggccggtggctcttttggagtgacggcacttggtctcatcatgtggcttgttaagtaagattattataacagcttatattgagatcactcgagatttatgcttaattatataatattcataaacctatagtttaaaagtatattgaacttcatttgttaacgtactttatagatattgaacttcgttcgttttcttaattggtctctaagtatatatacatacttttttgtgtgatgcagacgtaggatgggagtaaagccgaaggataatccacctccggcaggacttccaccgaattcgggagcaggagcaggaggagctcaaagtctgatcaaaaagtcaaaggcaaagtctaaaggtgggcttaagagacttggtgtaagaagatgttaaaaagtaaattcggtggtagaaagg

SEQ ID NO: 146217 - DNA, 382 bp, Arabidopsis thaliana landsberg
gtaaattaggaacaatctcttttacgttatgtctccaaatctaaactgatctccgaaacacttggtaaatggtttagctggaaatattctccttttcaaatttatttttagagggcaaaatatatataattcaattatcattagttttcaagtatcaccgatttctcttagttgagttattgctcaaatctgtttgtacacctttagtactatccgagttgataattcataatacactattaacggtataaattctcctatattcgtttgttacgaactaattattgctactaacacgtcattaactaatacatatatattccgatgtaattattatttcaatccataatataatgttaccgtggattatcttttatggata

SEQ ID NO: 146218 - DNA, 431 bp, Arabidopsis thaliana landsberg
atggctcggaagacagggtaggaggccaacatcaggggcaagtttacggagaaatgataaagcaacaggcgagtaatacattttccttgggctgcaggtgtgttattttttgtctgcatagggccaaaagaaaagtatgtgttgaccataaagggtaagagaagcatagaaaagggtcatattcacaattattagtaatcgctgaaatggacatcagcctgtcataagaaaacacttttcacgtgagactgaattcttggggatcaacctctagactatcatattcaaaccatcacacaaagctatgattgcatacatagaagacacttgtaaaagataaataataagaagagaataggcctgaattttgtacttgctgagaaagccttgcctttcaagaaaaatgaaagggagtccagataaggaaaacc

SEQ ID NO: 146219 - DNA, 392 bp, Arabidopsis thaliana landsberg
gcctcaaccgcagcaacttgcataaatattaaacaaagctaggaaaaaacacatagataagattcgaaacattaagcagacggaatttgaattttctagaacttaaatcccaacaaatcccaatttcatcttaaacttgtcgagtctcagtgtctctttagtgtcctgcaactgttggtagcatactagtacccatggaactgcaactaggtatgtttgaacttgcaacttgtacacatggaggatcaggagacttctttttcttgaatgcaggttcttcattaagtgagattttgatgtcggagaaggtaggcaatccgaaatcgggtaaaggtagattactatcagcactcccaggagctgcaaagtgttgctctaagtacatgcggatt

SEQ ID NO: 146220 - DNA, 572 bp, Arabidopsis thaliana landsberg
gttggtgcctataggattaaggcagtgtctgtcgaggagaatcctcacgccattccaactcgtaaggtacaatagaattatactcacatcgtgcgatattatacttatattcaacgtactagacattctttcatttttagataattttatacattcaattaatatactacttaattaattaaaccgtttaaccaaaaaaattctttcagttttttttataataaatttatttgtttattaataggttttctaaactgaattgtgtcataaatattgacttttttggggctacatgaaacactaaaaagaaatggacatggcaaataggtatctctgtgtagttgtgctatcttatgtggatctgataaataaaaaccaaatggacagggcaaagagaagctgggaaggtggaagaagatcaattgatccctaagaaagagatcttactgtttggtaagagtgttatatgtgtgatctacaaagagtaaaatgattatcttcctttatttgctctatgtatgtttcaatgttgatgattattatgagtaacaataatgtttattatcaaacaa

SEQ ID NO: 146221 - DNA, 587 bp, Arabidopsis thaliana landsberg
agtagaatcacgagtcatgcaattcttccagaactctcgtagaatcgctacggtcttaaaacccattgttaccaccgagactaatctgagattcttctcctctgcttctcaaatctcaagatccttccaatggcggagtcaagcatcttcgtcttcctctgtattaaaaggttcttttttttgccatttcacagttcctattgcgaaattaatcatccccatctttggaaatggagattttttttgtcctacgcgagataacttaacttgtgtaacgttaggaaatgtagctagtgaaggtgatgatcctgaaaaattcgaactttaatcacttttatgcaagaaaggtgatcacttttagcttaagtagtgttccaattttagcttgtgtcgagatacgtacttatctttcaatgcctagcttaggatcaatgtaagtgtgtaaatgaattagctttatgtcattggtgtgagttattaatataatgatgtgttgcagggattgatagtagtagtcacttgtcctctatgagcttgttgatccccagatcgagctttacgtctgaagcggaaaagcttcaggaaat

SEQ ID NO: 146222 - DNA, 637 bp, Arabidopsis thaliana landsberg
ccctctttgttctgaaactcctgtcctttctctgccaatttactttacaaagttgtcagaaaggtactaacgaacgggatcttatatatatatatatatatatatatatatatatttgttactgcaagttttgcttgtgtatggataaatttgaagctctagagatatacctaaggacaatcattcgatcttgctaggtccgcagcttctccagcgttagagactggaattcctctccctccccaagatgaagattacttgattaatttgggaaatagtgtggagaacaatgatgaattagtcccacatctgagtgacataccagctgatgaacaacctttatcagattcaagagcgctggttccagttttggccatggaatccgacgctcttgcacttgttccagttaacgagaaacctaagcgtacagagctttcacaacgcagaaccaggagaccattctctgttacagaggtagaagctctagtaagcgcagttgaagaagttgggactggaaggtaaaaagactggtttggttgatgagggttattaatacaataatttggttatgtggtcaaactaatgatagatattcttatttcacagatggcgtgatgtgaagttgcgttcttttgag

SEQ ID NO: 146223 - DNA, 201 bp, Arabidopsis thaliana landsberg
agtgtacttagcaagtcacctgtttttggcttaagtcctacaaggaacggccacttgtctggtttggcttctgctctaaattcacaaggaccaagctcgaagcttgcacccattggcaggggtcaaattggtagcaacggcttccaacagtcatcacatttattccaagagcctaagatggataataagtacacaggaaat

SEQ ID NO: 146224 - DNA, 216 bp, Arabidopsis thaliana landsberg
aatccttttaaaataccttgtaaatctttcgttatgccacttacatatactttaaacgattgtaaatcaagttaaacacttttacaagcttttaacttgaatcttttaaaatgtcttgtaagtcgtttactaaaattactatcaaactttacaagtaattttaatagtaattccaataatttacctttttaacatattttgtaaaagcctgtttaa

SEQ ID NO: 146225 - DNA, 514 bp, Arabidopsis thaliana landsberg
gccaaaaattatccgaaccaaagctcggggatgtcgattcaacgatgcactatctccacaaacggcaatgtgattgctttacgtatcttggccggccgtggaaggagttttccacgacggttattatggagacggtgattggagcagtggttcgaccgtccgggtggatgtcatgggtttctggagttgatccaccagcaagtattgtctacggagagtataagaatacgggcccgggttcagatgtaacgcagagagttaaatgggctggatataaaccggttatgtcggacgccgaggctgcgaagtttacagtggctacgcttttacacggagctgattggataccggcaacaggagtgatcaatcagctatcttaatatagtgacaatacaattggattcgtagcttgtttttgaaaacatccggttgtgatctactttatatttgtttgacacttttgcatgatctgtaattttttccaacatagttgtattttgtgtatcccctaata

SEQ ID NO: 146226 - DNA, 245 bp, Arabidopsis thaliana landsberg
gattgatctaaacgataaaaagattagtaaacattttgagattaatttgcttgatctattctatgctaattttgttgaattttggtactttatagtaatattctcaaatatgggaagaatatgaaatacttccaaattcattaggtgtttgagtggaaaaaaataccatactttgattgattcgaacctaaacaaaagtgtcatttttcttcttctttctaattgcatgatttgatcaagaagag

SEQ ID NO: 146227 - DNA, 714 bp, Arabidopsis thaliana landsberg
taagctcaaaagatctgatattatgaagctgaaagattgtattcgagtagtttaagagactcacaacaacataaatactgataatccaaagcaaactgttttaacagatccaaaataacaagttatatattgaaatcaaagatcagttactgagctttttctttgtcttgacttttaacgccggtcactgcgttcgaaattgatcttggttcgaccagaaccgccgtggtcatcgtcccttgaagagctaccaccaccgccacttgctctcatagttccaccagatccgatcttgtccaaaggtttcttacccttctttaaatcagaaacccacttctcaagaccgaaaggatcttgttcctcttccttctcaaactcaacaggtcggtctctcttactacccaccctctctgaagcccctgtgaaagctttgtcaggcttaaacctctcagtattcttgatcttatcgagctgctcatcagcgtttccatacatttcttcatcgttatccttctttggcttgtacaaagtcgaaagagttggttgtgcagtgaacaagcctttgtcgtataagttgtattggtcatcagcagcgaaaccagagtccattcctttgtcttggttaaacagacgttgatcatacataacttcaccaccaccttttcctccagtagatgccattccaagagcaactttctcactgatgtcacggta

SEQ ID NO: 146228 - DNA, 52 bp, Arabidopsis thaliana landsberg
tagagtgaaatagtacttatatatcttctgattatgcacataaaagataccc

SEQ ID NO: 146229 - DNA, 805 bp, Arabidopsis thaliana landsberg
ctctctgtgcccttcgcttaaaaaaatatcgcttctctcgagaggggaaggaaagttcatttctttttgtccaattctttcaacttctcgttccaatcccctcaattctccgtttcaccgaacgcacttcgaacccttaattgctttttgcgggtcaagtttcgattcgagcgttttagggtttcgtatctgaatcggtcgacaagataaacccttttgtgggggtttcctctagatttcgaaaacagaggtatgttaaacgtttctgccccttttgaatctcgttcgagcaattattgagttaggcgttcgatgatgaaccttgtgatagctaatctgcgaattgagcttgagttaggccgttctggttcttacctaattcaacacccttactgttagttttaggcacggaagtcttaaatagggtttagggaatggttaaccgaggttaggatttagggtttcgaaaaaagtgttcagcttccgtggtttcgtgaattagggggaattgtcttgtcttgtttatgcttctgcagcctttattttatgtttcctttggattttgttcaattctaaagttcttcagtagttggctgataaatttgttatcatcagctttctaattactgatagcaactgttttccacatgactgtaaatctctaaaagggatagctttcgtttggatggaaattctctgaaactaaactacatagtgatatggagacacaaattcatcaacttgagcaggaagcatataccgctgttttaagggcttttaaagcgcagtctgatgcgatttcttg

SEQ ID NO: 146230 - DNA, 89 bp, Arabidopsis thaliana landsberg
aaacactttcttttttctttgctcaagtgttttaaggatttttgagattgtaacttcctttaagtttgtaagaggagcttcttcagata

SEQ ID NO: 146231 - DNA, 356 bp, Arabidopsis thaliana landsberg
agttatacacaacaaaaactaacctctttattatgtataacatccaaatttcgaccatagtttcttggagttataagagttacccttttttttgttaagtaggctcaaattttaccaaatgatgcattcatcattcgttttggaaatttcaaatacaagaaagtagaagcagaaaatcattacataaggtaaaaagatactaaaagttaagcgtagatcgattagaaaatgtaaaagaaaaaacacaaaaacaacaagaaagataatcaaaacttccacctccaatgcatggagatgagatctttgtttaagtatctttcttctcttttgggacttggatcaggtactggtaacca

SEQ ID NO: 146232 - DNA, 335 bp, Arabidopsis thaliana landsberg
acacccaccaaaatgtagcaaatactgaatctgttaacagtttgaaaaactcgtcgatattcatttttagccaaagaccaaacccatcaaagacaaacatcaacatctataccaaaaactatgtaatgtattaaccaacactatctcatacaagtgaacctgcttgttcttcatccttgtggtgataatatgtaatgatcttatttccaaatgatatcgcccaagaagcgcagagcagggacacctctgatctccatatcaaccagcggagcctccatcagtgtcaaagcagagagttctgaatcctcccggatcatatcaagagcccgcatttg

SEQ ID NO: 146233 - DNA, 335 bp, Arabidopsis thaliana landsberg
cacacaaccgttttcatcggaagaagaacaagttggattgattttgctttggatctcacatctgagatcagattaatctctctgtgaagtcgaagaacgaaaccctagttcccatggatctctcttcacgcttctcatcgatccttatgcttctcttgatctccatctccatagcttcggctgagattcgtaaatcagagatccgatccgatgatcgaccaatcatccctttagacgaattcggtttcactcacagcggtcgtcttgagcttgacgcttccaagatctggcttttcaacagcaatcccgatctcgatctctgcaaagtgggcttc

SEQ ID NO: 146234 - DNA, 412 bp, Arabidopsis thaliana landsberg
ggattatcagactgctgcattagctatcgtcaatggggtctttaggatattcgatttcaatgatagcttcgctgagtccaactttgatggagtcaaggcttatctcttcgatgggttgtgtctcgatgactgctgctcctagtttgtcttcagtctctgtagtttcttcttcactagggacaacaaggagggaccgaactttaaagcttagatcttccatgtctccgggtatggtaacaacgctagattccgatgttggcgtcgggtcttctgcaactactaaaaaggtttctccttttttcttgttatctataactaaaattgtccagcttgtttgtgtagagagattgagattggagataactgagaaactatgtaggtgcttgttccaattggatatgggacggaggaa

SEQ ID NO: 146235 - DNA, 401 bp, Arabidopsis thaliana landsberg
agatttgaagtaaaacataaaagaaaataaaccctaagaatatatcgaaaatgatcaaagggttcttgttggtttttttctttttaatcactgcaaagacttctgtttcacgtccgtttgcatggtcgagaggtaacatgccaggcgaaagtgggtcgggccgtgggccgaattgggagtacaattggggttggggctctgctccaggatctggatggggttacggggcaggctcaggtagatcaccaacaggatggggaagaggatccggatacggttatggatctggatcgggatcaggtaccgggtatggatatggttctggaggtggtggagcacgtggtggtggatatggttacggaagcgcaaatggtcggtctggtgtcggtggtggtggtggt

SEQ ID NO: 146236 - DNA, 333 bp, Arabidopsis thaliana landsberg
caccatcctcacaccactatcattggccactaactccaaaccatcattccccgccgtcttcctcctccgtagcctaccggaaagcatcggctgctccgtcaaggctctccctaaagattccttgatccacccggcgactaaccaccctctctcaccaccactatcacctgcttctttgtaatacgtaactatgttaaccgttcgccggaatattcctactccgacgggatctacgacggatacggagcggatttcccggtgttgcgtcacttccaccggcatgacagtctgtactccggcgatcattgacttagggattttggtttccatttt

SEQ ID NO: 146237 - DNA, 1036 bp, Arabidopsis thaliana landsberg
aaatagagctcttcttctgtgttttccgtgtcttttccattttgcaggcctgagactgtctcgcatacatcatttacaatgcctgtagtgattcaaccactggattattgtaaagcattggacaaagtcccaagatcactctgcttatacaaatgaacaccatagacattgaaagaaagaagagtagctcactaacctttgcttttcatggagaatgctcctacaacgtgtttgcttttgatttctactatgacctgcaaaagagaaaccgagcaaaattcaactctagaattcaaccagcatataactttgttagcttcaatgagtattcgatgtttaacctgagattttttgttgatgtacacttttacatgcttccaccgcagaacacctggaaagtccatgagtcaattcatcaatctcgtggtaagtgaaatttttttgtttccaattgattcttgaattataatatcatcatcattcacaacaattagtaaagaagctcttactgaaacattaccgtttcgtgtgcactgcattagctctccagttgattcttcaactccttttgcagatatgagttcatcggtcgtgctagtgcgatcgagctcagaagagcaactatgagtctctggtaaaactctctcacaggggcttatagctgcactgttcttagcttcctttggtagtcttaccctcaaagctgcttctcctctcaatgctacattatcgaaaaaccgagaatcataattgaatgatcaactcaaaactacaatggactagtcaaattcaatagagcgaaacaatcaaggattgagaattgaagtcaaacaatcaatgtacctgttgcagctgcagcagttagagtcaacaaatcgccaggtccacgaacatcaacagctgatcggacagcagagacgacgcgatcgtgatcggcgccggcaagctccgccaattcgaggcagtgagaagctaacaactccgacgccgaggcaagggctgagctcatctttgatccagcgaagccgtcttgatt

SEQ ID NO: 146238 - DNA, 352 bp, Arabidopsis thaliana landsberg
caaaaccccaatggtaatattaataaatatttatccaaacacaaaactttagctcaattttctttattttctgcaaaagattccaacaccactgctggatccaccggtgcaatcaacagtgttttgattcagcaacaatggctcaatcttgtccaaacttcttgagccaccagagtaaacacatgcattacaacttgtttcaagaagtgacgctgttctgtatttatcttcgccaccaacaaccggcatagcaacgccaggtttcgccggattcttgaaatcttctttatacgttcttcctaaaacaccttccacgtttgatgacaacttcaagaaccggaactgaacctca

SEQ ID NO: 146239 - DNA, 371 bp, Arabidopsis thaliana landsberg
tagcaaacgtcgccgtctggtcgatgagcccatcgattacccggatctctccaacccggcttaccaggttctctccactccgcttttcgcctttggaattgggtcgattcgcgagcttctgtcgtcctctcctccgccgacgacgtcttctcagcctccgtctgtctcgattccaccaccgtccgctccaccgctcgttctcagcgattctaaggatgccgaacccgctggtctcaccaatccgtctgctcctccgtccccgttggctcccaaaaacatcactctggttgcttcaccggtcgcagacgtcccgatgcctgatcctctgatttcgcccaccgttgagactgcagagggtgctagtgtgccag

SEQ ID NO: 146240 - DNA, 384 bp, Arabidopsis thaliana landsberg
tagtttaaaagatgaaaagttaaaagagttaaacaagtgataataataatcagacacacaatgatttacatgtgaccttttagaaactctaacaaaattaccaacaaacaaacctccaagataagaatcaattgatacattatgaggaatcaaaccggtttttgtatatagatcaaacatcattaaacaagagttgtgtttatgatcacacttcttattctgcatgcatgtccattgaagaatcaatagaacctggagagttagatcccctgttcacttcactgcttctggtggttccgccggatgtgtagcctccctgcggaatttggtagttctgaagactacgccgtattgggcttgaaagtgcgtttgagaaaaccgagt

SEQ ID NO: 146241 - DNA, 374 bp, Arabidopsis thaliana landsberg
tagaagctaataggataaaaattcaagataataagacaattgaaataaatattttactatactatttgaagatgatagagacgggatatacgaggccgcatggaagaaaggaatagaaacatgaaaaattgatttatttaaacgatgattagaagcttttttcaatacatgcatatgaaattaatgtgttctttccaaaatgcgcacaaataaatttggacagatgcttcttgggaaatagatatcaaaatactaataacataaataaatatgagttttttcgattttggaaacggacccatttgtcgaaaacttgaaatctaatccagagaatccgacagaaagagaagcatccggatccataaaattttagc

SEQ ID NO: 146242 - DNA, 606 bp, Arabidopsis thaliana landsberg
tgcagaaaagtacccaaatatattttcccagagttcagtttttgggaggtagtttattaaactattactatttggctccatccattttcaaatgctagcaaaaattgtttcctcaataggtgctttggtgttgtgcattacaggtttccatattttctgccgagcttagttatatccgtctatgctactgcggttctcatcgcttgctggtggcttcctgtgagtatgttaacataaaatagtgtacttgtacacaaaaaccataatcatattttttcatcaacaagttttactatatggtaatatttctttgcaatacttatgatcataaatgagttcttaagaattccagagctattgtgtgtatgacttgatcatattaagatttgaatgaagctaagactgcaaatattaactcacaaatataagcttataatctatataaatatatacaggaaactcttcatacacgttgtagaattgcacaagggagacttaatccaacagagctaaacgatgatgaaagtagaggaggaggacttgatgaacagaaaataattaataagccaagtcaaatgaggaatcgtccattgatggctatcatca

SEQ ID NO: 146243 - DNA, 124 bp, Arabidopsis thaliana landsberg
cggttgttaaatcgtacgagaaaactattcgtgtcggaactttagatccgatatttatagaaagcaaccaaactccggctccggttactcgggagttcaagttttggactttgatgggtcatgc

SEQ ID NO: 146244 - DNA, 391 bp, Arabidopsis thaliana landsberg
aaaacaagtttcatgtttgaatgggcgatctagcaacggtgctgctccagagggggcactcaagtcttctcggaaaagatttctagtattcgatcagtcgggagagcagactcgtttgttacaatgtggatttcctctgcggtttccttcttctatggatgcagagcgagggaacattctcggtgccctacacccagagaaagggtttagtaaagatcatgccattcaagaaaagatattgcaacatgaagatcatgaaaatggcgaagaagactcggaaatgcacgaagacactgaggaaatcaacgcgttactgtattctgatgatgacgataatgatgattgggaaagtgatgatgaagtaatgagcactggtcactctccattcaca

SEQ ID NO: 146245 - DNA, 412 bp, Arabidopsis thaliana landsberg
cctcacatacgcgacgccttccaattcttgaaaaccgaggctgcgtacgttatcgtcatagtctaagcctacgcctatggttacttctccgcgtaccactatcatcagaccgctgcagcagcagctgccaccgtctacgacagccgtggaaacgacaaaacctcaagtttgctcaatcgacaacttccgagttacgactccatgcggcaatcttgttccgccggaattgattcgccagactgttattgaccggatctttaacggaacttctccgtacatcgatttcccaccaccgcacgccaagaagtttctccggccaaaaagaatcaaaggttggggatcatacggggccgttttcgagaatctaatccgccgagtcaaacctaagacgatcgtcgaagtcgggagtttt

SEQ ID NO: 146246 - DNA, 310 bp, Arabidopsis thaliana landsberg
gaccttcgaagtttcaatgtgattgcagtaaaaacaaacagtgttttcaaccgtggagattgcaataaactgtatcatatcaaacagaaagctttttatttttctcataacataaaactcaacatcacttgcaatgttaaagacacgacttaagcttatttggtaaagatggtcctaactttctgaagacagaactcaactcatgtgtcaaagatttgatctttgatgagatgtttttcatttggagaatctgtgtcgatcatgaggcgaagtgtaatcgatgtttggtccatgagggatgatcccaaaa

SEQ ID NO: 146247 - DNA, 460 bp, Arabidopsis thaliana landsberg
cgtctactggtttggttgatatgccttgtgtgtttactaaaggggacgggccaaacggaagacgggttgatgggattctgtacaagtatggaaaaggagaggaagtgaggataatgtgcatttgccatggtagtttcttgacaccagctgagtttgttaaacatggtggtggtggagatgtggatcgtcctcttcggcatatcgttgtcaacacctcttcttcgaccttttaaatcgaagaatcggtgaagaaaccggaagggtcttgtgttctctgtttcattttttttcttgttgttttatcttttggatctctctggtttttggctataaaaatgaatgccaaaacctcaaatcttgatgaagatcaagattctcatgttgtcttaggtctaatacttgtgaacatgaaagtatcatcatcgaatgattctttctcgagctctcgcgtttaatataa

SEQ ID NO: 146248 - DNA, 408 bp, Arabidopsis thaliana landsberg
taaatcacaaactctatttcttgtaatggttctgaacatacaattttgatgaagaaaaagaaaatgtaaaaagcctgaagacattcctcttgtttcaccagttacaaactgtgaacaatctacaaaactcataaagcatataaccaacacacaaaaactattgtttcaatctcgcaaaccgaaagaaaagagaggttaacctcccagggaaaatacaggtaaaagaaagacacgaatgaatcaaatcctccatgaatctgataaattacagtatatgaaccaattaactctctggatagtatgtagtatataatatgcaaatgttacctatgtagaagtcttcatctttctatatagtgagggatgcatgcaggagaatatggatggctttgctctcttttgtttgga

SEQ ID NO: 146249 - DNA, 231 bp, Arabidopsis thaliana landsberg
atttcttcattcgtaaacaaacacacccgaagcacaaacaaaaatgaaaactactcatttctcttcctcttcttcttccgatcgcaggatcggtgctctgctccgtcatctcaattccggctcagattcggacaacctgagctctctttatgcatctccgacatcgggaggcaccggtggttctgttttctctcatcttgttcaagctccatagggtcctattcttggggt

SEQ ID NO: 146250 - DNA, 1089 bp, Arabidopsis thaliana landsberg
tccaacttttctataacataaggtaaattatttcttcaccttttcatgtcaacattttacaagagaagcataaaacaaacaaaaaatcctctcggcaaccatatgccttttcaactaatgaggatttgtacttcttttttttttttcttttttcttttttttggcacagagccacaaactaatgaggatttgtacaaaagctaaatgaaaagagctacaaaactaagcccatacacatatatctcatgaagccactccagatcacctgatgctacatcaaactaagaatggttttaattaatatatgggcctcagatgaggaaacaaaagcccattaatttgcttcaatattggtttacccgtttattctacatgccacgtggaagaatatgagtggtcacgatattataaaatgcgtcaaggtaaacaacaaacaacaaactcgttttcgagcaaaaaaactttgaagattgatttgaagaagaaagctctctctcaggttcttgttctcaaccagacattgatttcttcgatttgcatatttcccttcttcgtcttacgaattttacttcctttagcgatggatttgatactacgttgacttttatcttccttttggaaatggcagcgtcgtcttctcttcttcttcttcttcactatcccacctgcaatttctactttgactcttcctcgtaccttaaaagatcgagactttcgagctatagttcgattatctctcggggtctccttgggtgtctctagctttggatctatgaccgttaaaagattctctagcagagacggaagcaggagcaatgacggtaacgaacaatttggagcgttggagcaagaatctttcatcaacaactcatcggagatacggaaagacttggtcaccggcggtgggattgaagccattgttaatcgtctggttagttaatggaaatcttattcatgcacgcaatgtgttcgatgaaatgtttcttcagtatcaatgtgtgtttctttctgaccggttttaattaatgatgacagagcaaatgggttgtgtctgttctatttgggtcaatcattcttttgcgacatgat

SEQ ID NO: 146251 - DNA, 682 bp, Arabidopsis thaliana landsberg
ttgacctacaagcaagggctggtacaacaaaatctcccagacccggtaaaacaaaacccaaccacaagcaaatattagcagagagagaagcatattcacgcaaagcttcttagttctgctatcaaaattcaaaaacccccaaaaaaaacaaatgaagaaggagagatcttcatttcagatatgaacatcatcaagccacactgagaagacgagactaatactttctcccaagaattataccgatgataacagagatcagcgccactccagtgacgatcttcactgtcatgagatgtgaagttgatgctgtttgagtaggagtagtaacattgcccgaagacgaagaagaagaaagagatgcttctggcttcttcttgctcttacgtttcgttggagaagaaaaggataagtcaatgtctcgagatttgacacctacatccattgcctccgtttcctgcaagtttggtttttgattataagcaagtatgcgattgagattttgacaaaccataatgcaaggtttctgtctctaattttatggatcttatgtcattttgtccctctagatgttataatatatgcattgcatgtctgttatcagtcaatcaaagttctgatgcagagatattatgactaaccttagttttagcatctgcgagctgcactttctgttcaagatctt

SEQ ID NO: 146252 - DNA, 515 bp, Arabidopsis thaliana landsberg
ttttgtgttctgattttttatttcaagttcttaaaatttgactttcaatttctatcttctttgaaatttgttactaaattggtatatgggtagttgttgttagctcttttgtttggtaatctagggttttgacatccatcaattctttatctctgtagctataaaatgcttttaaatgtgtgttgaatccattgttatttccaacattggcgtaggtactgaaaaaaacaatgttttgattttgttgctttagatttttgtgaagattcaacaacagatctgtgagtccattggagtatatcactattcatagtggttagacatctactagcattttctgtcttttattttgtttttgtctaaccatttttggttttgtttatgaacagatacaatgacaagggttacacgcgattttcgggattcattacagagagatggtgttcctgcagtatcagcagatgtgaaatttgcttcaagtagatctcctaattatagaattggagctgatgatc

SEQ ID NO: 146253 - DNA, 523 bp, Arabidopsis thaliana landsberg
attggaaacatatctcaagcttcttcttcgtgttacgcactttcttcttcttcttctctctctctctttcttcttcgtcttcgatcacagaagacagaattcaatgtcgtcgacctacaagctcaatcacactgtacttcaatctctccttctcttgccgattctgttatactcactctctttgctctgttttgcggtgttatttcactctgtggtccatgaattgggcttctatgattcatttttcttaaatctctctgcttttttgtcttcttcttcaatttgggggatttaatagcgaatttgttgagctggtcaacaaaaatctttcatttttggatttctgatcgtgtagtaatcgccggagatttcgtttattgaaattgattcggaattgagaatgtgaagagactcttttgagtttgtgtgtgttttatatcaaaaaggttttaactttgtttgatttcttggcaggattcatttgcaaatggagatgcaaagagtttgttgccgaacccagaga

SEQ ID NO: 146254 - DNA, 527 bp, Arabidopsis thaliana landsberg
tatcatcgctttttggaggttttgggttttggttttttggttttagggttttagtagaaaaaggttcaagtgatttgtcaatggttaaaaggttatgtggagttagggtttgaggtaatagtgatgatgaagtttgaaactttcttctgccttgggtttttcgtagagctaaagaagatgagtcttgagaagggcttgttgggttttggacaacatcaagatcatggtctgtaaacttggatatgaacttgatgatgttggtgtttctatcactagccatggcttgttcttgtgctctaatctctacctctttgttaactctctcaatctcttgcttcttccaagcttcctctctcgctatcttctcttcttccttcttcaccatatcttccaggagtttcatatgcatctcctcttgttgagctatcatgttcctcactagaccctcacaaaacccttttaacacaccaaacctctctttctctttcgtcctcttcttcctcttcttctccttcatgatcatcatc

SEQ ID NO: 146255 - DNA, 573 bp, Arabidopsis thaliana landsberg
tatcctgtcagtgcttgatgttccaccagaaaagatggcacgtgtgattggaatgaaaggagcatcgatcctcgccattaaggaagcttgcaagtatgaaccatttcgttctaattacagtaatgcaagcaagacatttcatatctgactgtcatataacacgagtgattttttttgtctaacaacgcggaaattctaattggaggggcaaagggtccacctgataaggttagtcttattccataggggtacacaatctgaacacaattccattatttagctttgaatgagagattggtggaaccgaaagatgtaaataaggtagtgtttatgtggaaacgggttttggtgcagatatttgtgattggaccggtgagagaagtgcgtaaggcggaggctatactgagaggaagaatgatagactattgaaggaaatgagggtcctttgtaatctgtctcattgcccctataaaaaaaattactaaaaccctcttaaaacttggaaactccatggttcagtacggacccgagagagtcgtcccctcttcaataaaagttacatcattaacttcc

SEQ ID NO: 146256 - DNA, 512 bp, Arabidopsis thaliana landsberg; identical to SEQ ID NO: 75547

SEQ ID NO: 146257 - DNA, 449 bp, Arabidopsis thaliana landsberg
tctttctcctgaaccatggcggcggcaacaacaacaacaacaacatcttcttcgatctccttcttcaccaaaccatctccttcctcctccaaatcaccattaccaatctccagattctccctcccattctccctaaaccccaacaaatcatcctcctcctcccgccgccgcggtatcaaatccagctctccctcctccatctccgccgtgctcaacacaaccaccaatgtcacaaccactccctctccaaccaaacctaccaaacccgaaacattcatctcccgattcgctccagatcaaccccgcaaaggcgctgatatcctcgtcgaagctttagaacgtcaaggcgtagaaaccgtattcgcttaccctggaggtgcatcaatggagattcaccaagccttaacccgctcttccttaatcccgaacgttcttcctcgtaacgaaca

SEQ ID NO: 146258 - DNA, 390 bp, Arabidopsis thaliana landsberg
aatcacaagccaatcttattggaattattagcacacagtaagttacttgaacttacaaccacgtattaaaagtaacatagtaaagagaacacacacacacacacactccaatcttattggaagtttcatgtagtatatatgactaactggttttcactcggtggtggtgatgggcactatagtgactccgatgctgtgaacaacatcactagcttgtccatggaatccaacgatcttgtggccttcctctccaagcgagaacttcttaccagaatccattccaaacggcattgactcccttttgttggtcttaaactgaagacatacaattattggttcctcaactccgaagatcttatcgtagtagccatctatgttcatgagatattc

SEQ ID NO: 146259 - DNA, 296 bp, Arabidopsis thaliana landsberg
aggatgagaggtttgaagcatacaaaagtcaggttttgagagaaatcgcagcccttgaacctcgagatcttgcttgaaccaactaatgcaattcatccttgcttcccttttaaaacactcgaaaagacatttttgaagcatcttgttgtttttttacattaggtaaccaatcttgctctgactttgtcaccacacacacacacacacacacacacacatacacatacgagatatctattcgatatatgtattcatatgtacactacttcactgtcgatgaaataaaatggtttgtc

SEQ ID NO: 146260 - DNA, 312 bp, Arabidopsis thaliana landsberg
ggatggagactctcgttccatgtttctgtaatgcatgttgggttgtttcatgcaagatatgctgtatataaacactcatttgtgaaagtttctaaactgtgaatcgcgctacaggcaatgctccgaggagtaggaggagaagaacgaaccaaacgacattatcagccctttgaggaagctcttagttttgttattgtttttgtagccaaattctccattcttattccattttcacttatctcttgttccttatagaccttataagttttttattcatgtatacaaattatattggcatcaagaagtatcttt

SEQ ID NO: 146261 - DNA, 195 bp, Arabidopsis thaliana landsberg
gccaattgcagcaacatgttatatgcattcttatacacaacatttccaatttaagacactcacacacaaaaagttaaccaaaaacaagtcaagaacgtaattccatcaagctactggaaagttgacttgtttatgaacgatcaagccatataaaacactctgccttgttctgattgcttgacgagcttcataggt

SEQ ID NO: 146262 - DNA, 485 bp, Arabidopsis thaliana landsberg
atgatttacaacaagtatgatgaagttggaattgttgtctttggaactgaaggtctctctatctattcttattactgattaaagtaggaagttaggaatctatcctctttagtactgcaatggttctttcttggagtattatcggcttgctgatgtactttgataataatgtttcatgtgacctctgcagaaactggaaacgagcttgctagggagataggtggatatgagaatgttacagttttaaggaatatcagagttgttgatgaattagcggcagagcatgtgaagcagcttcctcgaggaactgtagctggagactgtatcctgctagctagtttaccgcttatttttactgtttcgctaccattttcttggttctttaactggcttcagttcttgatgctttaattgttgggatggatatgcttataaagatgtatggtaatgcacacaaggggaaaaaacggatgtgtctcatcacg

SEQ ID NO: 146263 - DNA, 369 bp, Arabidopsis thaliana landsberg
catagctgtaaagttgcatcacgatcaacacagcaagagattcccagacattatccagcaatggggctttagagttgtaacccaaataaaagtagagatcaataaatccagataaccaaagctgcaagctgacaaagctacttaagcagtagataaacataaacaccaaaactgcatatgctttcaaagggaaccacaagcgtctcttagtttcttcaaacagttgtcttccagtaatccacagcaagagaaggaaaatatatccaaatgatacataattgggtttgaccagctatacacttatgagaatagcgatgaaagcaatgtatgttccacacgatcggtacataaacagaaacttttgcccaa

SEQ ID NO: 146264 - DNA, 420 bp, Arabidopsis thaliana landsberg
tggcatgcaaacaaataaacataggaggatggagaggatggagactgaagatgattgaagccttcattatcattttgacgttcacgcagcttctctacctcatgttgatccatgccggttcactcagcagcaaatatggtcctggatacagagaccaagactatgctacaggccaagctcatggtcatggtcatgtaccacacactgtgggagagcacaaggctggtgttggatctaccatggcagtctgatgaaaatctgtgtcttttaattgtgttttgacgtttggttaagaagtacttattatagtttatgttttttcaagttatgtaataatgtaattcctatccatctgacaaacgaacgaatcttgtgtgttcttttgttaattagttaaatggagatgtgtttctttgtgtt

SEQ ID NO: 146265 - DNA, 373 bp, Arabidopsis thaliana landsberg
gatttggtagtcgttttgttagcattgcctttgtttagtttttgttgatactcgatgtttatcgcttaagactgcgacaatttgggttttaggcttttagggttttgcattgtagctttgtcgtgtacgcgcgtgtgtgcttgtatcatctgtcattgaagattgtttatcatgttcgaaattgtgagatatgcttagtgatttaaagaaatatcttttgtggctttagatctaccaaagtgatgattaggccactagagttaatttcatatttattgtgtttggatgttggtaggtgtatttctttattcttagagagtatagtaacatttaagtgtatgataatgtcggcagaggcaagctggggctcaca

SEQ ID NO: 146266 - DNA, 368 bp, Arabidopsis thaliana landsberg
agaagaagagaagaagaagaaggttctaggtcttgtttgctttcccctcctgctaatcgaccaagcgaataatctccagctaaccaccgatgaagcgaacaatcaacgaagtcgtcggatctacctccgtcaatactctcgattcctccattgctaagaagcctgtcttcctcaccaaaaaacagcgggaagagttagccctaaaacgccgccaggatcaaatctccgagcaacgtgtccgtcgtgagcaacttggtcgccccgagcccgagacggaagatgtctccaatggagataccaatcgggataaggatcgagatagagatcgggaccgagaccgagaacgtgaccgagatagggagagagat

SEQ ID NO: 146267 - DNA, 1793 bp, Arabidopsis thaliana landsberg; identical to SEQ ID NO: 7981

SEQ ID NO: 146268 - DNA, 636 bp, Arabidopsis thaliana landsberg
tttctttcttcgatctaaagctctcttcttcttcttcaaacggagctctcttcttcttcttcaacctttgttcttcgatctctgtcttttttttttttatctcttcttcgattgtaagaaaaggtatgatttgtctctctatacatttcatctttcttattttgacactttgatcgattctctattttttggaatctgattcatatgtttggggtttaatagtttcagctcaaagaaatctgggttaaagtgtgtttgaaattgtggatcgattcatagattctcgataccaataggtacttgtgaatttctaagtttttgggtttttatctttccccttgttgtatatgatgtgttagaattcataagctgcagattctatctttttggttggatatgtctctgtttgaagttatatatttatagttttgaattcataggatgtggtgatacgtttgtaatctcgtgccatatctttggtttgtcaaagagagtgtgttttaatgtcaatttctgggtaaccaagtttgagcttattccttttgattctgcccggctctctgattttttaaggtgagattcctaagcatgtcaattacttttttttttttttttttaacattctcaattctctcg

SEQ ID NO: 146269 - DNA, 358 bp, Arabidopsis thaliana landsberg
ataagcgacttgtgagggcaaaagacaaagttgtttttttccttcttctctgtctcgcagcagttaaataattcaattgttttcccgtcttttttggaagagagtacgtgaaaaccatatatcgcatcttctcattcttctttcattgccctcattaaaacacacatcatatcgcccccaaaattttgatttgattagagaggtgtgtggaaaatggcggaagagtatgccgagtgtttgctagagaagaacttccatgaggattgttctggctgcaaggttgatcagatgaagaggcttcgccgtggatttcccttctgggagctttttaccgtttggatcatcgttctttgcaccg

SEQ ID NO: 146270 - DNA, 327 bp, Arabidopsis thaliana landsberg
ttaatttataaccaaaacagccatccattaaataatattcatacaaattggataaaaattacaacgaaaccggaccaaactccaaacaaaacaagaaagatcgaggcaaagtaaccaaacacagaaacatgaatcaagaatcatcacttgtttccttagaaatcagcagaagcaagaggaacatgttcggaagaacccatgaagacatttccgtagataagtccggcaagtccaccaccgatgagtggtccaacccagtagacccagtgaccagagaagtctccggcagcaacagctggtccaaaggaacgtgctgggttcatggat

SEQ ID NO: 146271 - DNA, 463 bp, Arabidopsis thaliana landsberg
cttatcaattcatctcacactcttcttcactctcttctctctacacacacacacacacacacacacaaaatggattcttcgaatgttgaagaaaacctaaacccagaaacaaaatccgcagaagaacaaaacccacttgccattttccattcttctctaccaatcgcatctctttctctgaccttgttcccatcctcgactcaatttctcaaattgtttgctcatcatccaaacaaggttaagatccctacgcaggcctcttctctcactcatctctctctttcttctgtctctccttttccttcttccagaatctctttcaaatccaccatcgctgctaaccctcttcaatcccctctctccatcgtccctcgacgacccagtgatccttcctccgccgccgccctccgacgtgctgctgtcgcctggttccgcaatgacctccgtctccacgacaacgagt

SEQ ID NO: 146272 - DNA, 70 bp, Arabidopsis thaliana landsberg
ggattttttgttaaactctccaagagaaaaaacataagttccaacctttttagtttccaacttctcttga

SEQ ID NO: 146273 - DNA, 112 bp, Arabidopsis thaliana landsberg
tatttctccacttgattcccagaagacaaaaaaaaaaaaaatcagaaagaaagaagaagagagaatccatgtcttcgccgagcaagcgtagagaaatggatttgatgaaact

SEQ ID NO: 146274 - DNA, 98 bp, Arabidopsis thaliana landsberg
gattttggcaactttcgtatcacatattctaatacaactatacaccaaaactgacggctccaaacgcaaaaagaaaaaagaaaaacaaacaaaaaatc

SEQ ID NO: 146275 - DNA, 916 bp, Arabidopsis thaliana landsberg
aaaatcttttaacatctcaccatcttcttcttcaatggaaactccggattaaatgacacttctgtaacttcctatatttactaaaatgccatctcgcctctctccgccagatattccgccgctgcaaccgacgcctacggttagtgacggccatcatcgtttccagactcttccacttatcatagccggttctctgactttaaccggagttttactcatcctcgtcactttacttatttaccgaagactctaccgaaaccgtacggctccttcagatcttatctccaactccaagtctcctcaacactaccaatgtcgacgcttctcttactctcagctccgccgcgctacaaactctttctccgagtcgactcacctcggtcacggcggattcggctctgtttacaaagctgatttcccgagtggcggcgattcactcgccgtcaaagtcatggatacctccgctggttctttacaaggcgaacgtgagtttcacaacgagctttctctctcttctcacttaattggctctcctcatgtcgtctctctccttggattctcctccgatcgtcgtggtcggaagcttatcctcgtctacgaacttatggctaatcgtagtttacaagacgcgcttttggatcgcaaatgtgtggagcttatggattggaacaaaaggtttgagattgccacggatatagcaaaaggcatcgagtttcttcaccattgttgtgatccaattataatccatggagatattaaacctagtaacatccttctcgattctgatttcaaagccaaaatcggagatttcggtctcgcgagagtaaagtcggaggatttagatactaggattctgattgaggaagaagataagagcaaggatgttgttgaagataatgggtcgattcttgaggag

SEQ ID NO: 146276 - DNA, 579 bp, Arabidopsis thaliana landsberg
ttatatataatttcctttcaaccaaaaaacaaaaaggaaagaagaggattacataaggaattgtgatgaagtagagagattacaacaacataacagaaagctcagttaaaaaactttggcttgagagtttgatccgactaaacataataaaatgtatgttccaaaaagaaactcattacaaacccttccatttgtttacaagatttcagacatctttttttccggtggtgacttttcaggtgtgagctgacgctgcagtcattcccatggatgattctgggctaacgtactcctcgcttgcgtgccgtacaaactcctccggtgacatgtgcgagccgtggcaagcgcatacgattttgatctggtttgcgttgtaccggtatgtgacacctgagattgtccgtccgtgtgggcctgaaccagtggttgagacccacggtaagttgggacgtgccccggatcctccaaacttcacatctgctgccattccaggttttatggcagaaaagtcgaaagagaaagcggtttgagggtgcttgatgcttcccgtggtcggtctgatgccatcctccgatgaac

SEQ ID NO: 146277 - DNA, 274 bp, Arabidopsis thaliana landsberg
tctcggttcagtgacttctgcaaaccgtctagacccatgtgggttgtccaaactctatagcttgaggctatttgttctatattcaacttattatgtggttatgtttcttttatgttcttctctgaagcttcctttgtggacttctgctgtttttttcctaactttggaatagtttttgtttatctctggacacagagatcgcaaattcttttttcttaaatggaaggttccatgaacaagcgaggatacgaatgcagtcaagaggatactgaca

SEQ ID NO: 146278 - DNA, 1160 bp, Arabidopsis thaliana landsberg
cttctcctatctctcattttcgtgggttttgtttttgatatcttcttcgcttggatattattacattcgggactcaagaagaaatcgaatctatcgcgcgtgtagattgcttctatctatctcttatctcgctacacaacaatggctgcttacacgtgtactatccgtccgccgatttctatccggtcagagatgagaatcgcttcctcgccgacgggttccttctctactcgacagatgttctctgtgttgccggaatcgagcggattgaggactcgcgtttctctatcttcactctcgaagaattctagggtttcccgattacgacgaggcgttatctgtgaagctcaggacactgctacaggaagtatgttctctcgtctttgtaaatcaatgctatttctcgattatgcgttttgtttctgggaattcttatgggttaactctaatggggctctctcttagtgtctatgaaatgacttccatgttcaagtagtgaaattggaagacaactagaaaaaggtttcttcggatttgaacctctttgtcatgttatttatgcacatatgtattaggatctctaagtatctatctatagaaactcaagatgcttgtttgttggatttgttatcccttcattcataattctacactcatggtgagtcattaatcttggtttttttttgctatatgatccatgcagttccagtggtcaacgattcaacatgggactctctagttctcaaggctgatgagcctgtgtttgtcgacttttgggcaccatggtgtggaccctgcaaaatgattgatcccattgtcaacgaactcgcgcaaaagtacggccggccagttcaagttctacaaacttaacactgatgagtctcctgcaacccctggccagtatggtgttagaagcatcccaactatcatgatctttgtcaatggtgagaagaaggatacaatcatcggtgctgtctctaaagacactttagcaaccagcatcatacaaattcttgtaatgaactactagtcactgttctcttttctctgtatctctcgactctctaccttttacctatctactcatcactgttcatctagacttgtatgataatatgatgtctcaggttttcagaatttgaagtctacgaaaacatttt

SEQ ID NO: 146279 - DNA, 74 bp, Arabidopsis thaliana landsberg
atacaatgctttatccaacatggaagcttttacttgtttctggctatatatatccttcattacaaggcccttcg

SEQ ID NO: 146280 - DNA, 517 bp, Arabidopsis thaliana landsberg
gactttgatgcatccgtacgaaaatggagctctgcaccaggtctaccacaatcatcactcatctccctgcgagcttcaacggccatggatatctagcgggaaaatctgttgatagaatctcacttcctctccagcgaaacgttgcgtctctcgttcttcaatcccgtacgagaatttgagaaaccctgtttttgcttcgtgctatgtgattcactcacttttgcgtaattggatttttcaaaaccctaaattgatgagtaatttcacttttttttttgctatttcgaattggattgttttcggattttagttttctaattagtatagatgatgattcttgattccttgcgtttcgtcaatagtttgattgcttgcttaagtacaatttcatggtgtttccatggtttttaggcacgttgcgttgtagtagaaagtttccaggagaaacagttactgaagaaacatcaacaggagtcaatgagtttggtgtggaggatcgtgatggagtatttgccgc

SEQ ID NO: 146281 - DNA, 211 bp, Arabidopsis thaliana landsberg
aaacgctttttggaacggaaactccacacagttcggtggtgatagcggtgaagacagtaatgatagacgatgaaataagagaagttgaaatctgtgtggatagatacagaaacagctcgggtgtttactttttatacttgactctttatgaaccatttaagagaccagctgcaaaatgtatcctgatgcgtttccgttttttcggttgctc

SEQ ID NO: 146282 - DNA, 223 bp, Arabidopsis thaliana landsberg
aaagaaaggcatctatattatgatataaaacatacctctccatctataatactctacagcttgcagcttgctgtctgcaagtgttctgtacaacgttacaaatacgaatccacattcatttaaatttttttataagttcataaaacatttctttgtttaccaagatcaaattacaggaagagatttgatattttgaacctgagattcacaatctaattagtca

SEQ ID NO: 146283 - DNA, 337 bp, Arabidopsis thaliana landsberg
attttttttaagaaccatgtttacttatcgactcatggttcataatacttattttctattattgaaacaaaacaatatgagccgatcgatgattatagtatagatcggtaaaagcatgttttcaatgattcaataaagaagagaatcatgcttatcatttgtttctataattactatcgcatgattcaatgattctacaaagaaaatcgttaaagaagagaatcatgcttgttaattgttaatttttgtgatttactattacaatattgaatatataaattaccaattttataattatataactaattttgtaactattcataacccggtggtgggt

SEQ ID NO: 146284 - DNA, 344 bp, Arabidopsis thaliana landsberg
aacactcataagctagtaaaacacacaagaacaagcaggggacacaagtctattacaacacaagatcagagcacaacagctacacaatccattatgtgaaaattcccactaagcacaacattacaccactccactttaccccaaatctctccaccctcgcgtctttccactgcgatttccgcacaccaaatctctgttttctctgttttctgcaagaacagaaccaatttcccaccggtgtaactcacagttttggaccacttacaagccacaggcaacaatccttcaaaacctttaacgactccccaagctctctgctttggatcatataagctctcaaaaat

SEQ ID NO: 146285 - DNA, 171 bp, Arabidopsis thaliana landsberg
aattttccatcttcctcctcttcctctgccaacttataatcccgtcaaagatctttccttttttcttcttctggtttctttgtggtttcctggaggctctcagcatcttcgagtcgttgcgaggatgcgttagaagagagtctcctctcaatcttcgaatctccaagtaat

SEQ ID NO: 146286 - DNA, 269 bp, Arabidopsis thaliana landsberg
gcatttttgtaggtaaaaacgctgaagaaggataaggagcatcctttttcaacacaaaaataccgtcactctgtaccatccctccccaaagaagatcaagagaaagatagaaagaatcccaaaagattgaaaacaggttctgcaaacaaattccatatatatgtgcatcaaatcagcttgctggatagaagttctgctgctgcatgccttagatcttcgtactgataacatccatcgaagaattctgcaagcttcattagttcttgatc

SEQ ID NO: 146287 - DNA, 246 bp, Arabidopsis thaliana landsberg
tgcaaaacccactaagtgtaatgagatgactgtgacgtaagcgacccaaaagctgaacttcctcatcaaacctttctcgtccaagatcaagagcagtgagttctttgaccaaagcaacctcaccacctttgaatttagctctgtatgcagacccgtgatagttggtgtaaataaccttacggaaaccttctgttgctttgattatttccttgtatccaaatcgtctgataaactctattcttcctg

SEQ ID NO: 146288 - DNA, 1417 bp, Arabidopsis thaliana landsberg
caaatctgagccgtccggtgtgatataagtctttttaaagagagagagagcggttcgtttgtctgcaacggcaccaagtctttgacaatggctgaagatgaaatagtagtcgaagaagagcaatcacagccacaggagattactccagttccaccatcttcttcgtcttcgccttcgttagtggtggaagacgacgatgagatgaagctcaagcacttggaattcattcaagtcgcggcggtttacttcgccgcctgtttctcgaccctctacgagttggctaaagacaacgctggtccactcaaactcggcgtcgagaacattgaagattgcgttcgaaccgtgcttgctccattatacgaaaaattccacgacgttcctttcaagcttctccttttcgtcgatcgtaaggtaacaatcagaatgtaattcttaacttgaatatcgcttcggtttcatgagtgagaggcaaatgatttgcttggttttcaggtggacgatgtgttcttcgatgttgagacatatgttccgtcattggtgaagcaagcttctagccaagcgctcacggtggccacggaggtgcagcgcaccggcgttgtggacactaccaagagcattgcaagaagcgtccgggacaagtacgagccagcggcagagtattacgcagcgacgctgtggcgtttactgaatcaactgccgttgttccctgaagttgcgcatttagtgatccccacggcgttttactggtcagagaagtacaacgatgcggttcgttacgttggcgacagagactactttggggcagagtatctgcccatgattcctattgagaagatctctgatattttggaacaagatcagtgtcgagctgattgactatttactcttctgaagccaaagattccttcttctatagagtatatatactgtatgtactctgtttttctttcctttctgcaatttgctatcccaagagatgtaatctttcttcaatatttcatttaaacaactttgccttttaataataacaagaacaagagacataaaggaaactgtcctcttcagtctcaacttttataaaagacacaagacccaaaaagtagtatctgtttactagtaaggagagtgtctgtttttcttgcggttccttggaggcttaacaaccaactcacttgaagtccaagaccggttaatctcggtagcatcctcatccgacttccagcaacatagtcgcccatcttcaccaccagtccatccaaataaccctgcagctcctccatactcgcatggcatctgcagaacgctccttactacatctatgtgacctccaccaagaatagcttcagcggtaccgattgatccaggctgtttgtagttcaccggaaaataaccaacggttcctgcgcacgttccaccg

SEQ ID NO: 146289 - DNA, 816 bp, Arabidopsis thaliana landsberg
tttacattatggatcgaaagaatagctttgtttatgatcctaaagaaggtacgttggagactgatgagttgttggacacacaatggagtgttggttcttgcgtcattgatggaaagatttacacttttggtagcaagaatagaatatgggtgtttgatccaattgccatggtttgggatcgcttgaagggtctcgacgatcttcctgacaagcgtgatggctcgagaatgtcgaatctcgggggaaatcttgcgattatgtttaaccttgagaagggttcaaccaaaatctgttgcacggagatcagattggaaaggagggaaggaggaaagatttgggggaaggtcctgtggtctaatattgtcattaccttgaaagaaccttccaccattgtacgatgtctaactgtaacagtttgataaaggtatgcttccgactccaatgacattggctttgtgatgaattcataatattaattttggattgatacttgttctgaaatgtcttgtaacaatggcattcagatattatccttcttagattaagtgtgatggtatatttttgttgagatgggcattcataagtcatgttcttgtatgctgcaggtataagcttgaaaatcacatctgtaaacgtgtaccggagcagcttgttctgttcaagatgaaacaaacaacatacgaggctttattggattggtatccagaacctaatatagatatcttttgaatctttgggctaagttatgcaatatatttctctttgtttctttgttgtacggctcttatgtatgcaagtatattgtatgattaatag

SEQ ID NO: 146290 - DNA, 648 bp, Arabidopsis thaliana landsberg
agaaaatcatctctttgtattagtgaatgtctgaatgactttaattacaaaatttaaatctattcagacaaagagaaacagatcaaacgaaacaaaacagagacaagactatatatattggaatcttgtctgcgtcgaaaacagaatcagacccatgaggttgatgaagatccatgtccattgctaacgaaacaagcgtaaagctcgtcgaataccaccacttgatcatcatgatcttcatcacaagaaccaagattagaattatcaacaggagaatcttgatttgtgaacagagcaagctgattccttgctctcttcagctcatcttggagaaactgcacttgatgctctaactttgccttgtcggagagagctgctttgagcttggactgaagagtgcagtgttggacctcaagagactgagtcttggacctggctcgcttgttttggaaccagactgcgacttgtctttgaggtagaccaagctggttcgacagttgaagtttcaggtctggctcaagcttcttgttcatagtgaagcacttctccagttgtctaacttgatcttgtgttagcctcttcttcttgtttttaccctgactctgagaattctccatttttctcttcttttttgttttttcttttgtt

SEQ ID NO: 146291 - DNA, 219 bp, Arabidopsis thaliana landsberg
ttttctttttttaattttgggttcaaaagatgttatttgggtggttaggtggaacagtggatgtatgttttgggagcatcggtgttagttaaacagctgagttggttctaataagctgcacttttggctctctctagttgttgttgttgagaaactaatgagacatctctctcttttgtctttcccatttttaattaattttgagatatttcatcttaa

SEQ ID NO: 146292 - DNA, 299 bp, Arabidopsis thaliana landsberg
aaaagacagaaccaaagcttcgaaaatcagacaattcaactaacaaaaaaatgtcagtagcttcaccgattcaatgtatcaggattctaaatccatcatcttcatcttcttcttcgacagcttcgtcgtcttttagattctcaacaacgactaagccatgtgtcttcatcatcagatgctctcagacagaaggtcctttaagaagaccatcggctcctcctactctccgggagcctcaaaaacctgttcctccatcacagccatcttcctctcctcctccttctccgccgccgcagaaa

SEQ ID NO: 146293 - DNA, 190 bp, Arabidopsis thaliana landsberg
tttaaaaaaatcctttgtgtaagatgtacatagaaattgcttcatcttcttcactttctcttccattattacccttaaccagacctcatatctacacttccatacccttctccaccattcctgaagctagacaacgcaatctcatcttcacagtctctgctttttcttcttcagaatccacacaaaacca

SEQ ID NO: 146294 - DNA, 346 bp, Arabidopsis thaliana landsberg
attcagtctttaaagtcttaaaggatcttcattgtactttgaagtatagtttctgtaacaacaatggccaaaaccagagggtcttgttgtctcgtcaacgctctaatcgctatagcttttttggcgacagcccatttgtgtgaagctggcttgtctcagaaagaacaggacaaggtctcgaaattgcctggtcagaattttaatgttagttttgctcactactctgggtttgttgctactaatgagcaattgggaagagctctcttttactggttatttgaagccgttgaagatgctaagtctaagcctcttgttctctggctcaatggaggtttgttagacaaaa

SEQ ID NO: 146295 - DNA, 1027 bp, Arabidopsis thaliana landsberg
aatctttacctagagaggatcatgaagggttgcagctgtagatcttcacctatctccaatggcctctacgcttcaatcttgtcatcaagattctacgtgagttttatcatccaaatcactctactttcatatttaaacctcttaaatcgttttgaaaatgaatttttttcatatagagttaatgatcgttcttcaaccataagatctaaggaaatcaatgcattttatagtgggagattaagtgagtacgatcttgtagagatccaggtacattttataccttttttttttttcttttttttttcgtttttcgcttttcgtaatcaattataatattgatgagtgaaaattcaatacatgaagatgagagcaataatagagatggcgagcaaggatcgtgaagtaacagcgttagagttagtgccggtgagactggaatcaccgttaggatgttcggtgaagagatctgtgaaaaggttcttggagaagagaaagaagagaagcaaatcttttacacttacacctaattacacctctagtacttcctcatcctcctcctctcttcataatttctaatcataattttattatgttttccttctagttatcaatcaaaacaaaaaaatctttgtttctttcttttttcttttttccaatatgggtttctatagctctcatttatctcttgtaatttttcccgatactcgacgatgaatttcgagtttttttttttgatctgttttaaatcaagacattatagtaccattggagtctgtataaaattcagatcatttggatcgttatttttttcctaattcatgtatgaagtgtcacacttctcctacaatgaattatgaggttgtccgtttattccaagttagctctatgtactttgacgtaagctaatgcaacttgtaaaatgttgggaactcttctattactttttttcctttacaaaataagaaaatgcacgcatttaactcgctggatccaccaaagaatagaatgaacaaagtatatcactagc

SEQ ID NO: 146296 - DNA, 642 bp, Arabidopsis thaliana landsberg
atcttcttgtcattctctaaattaactcaaaggagtaaataaaaatacaaatacaaaatttatacagaacaacccacaattctgtctagtttagttaaacgtgttaaaatagtcacgcaatgctttttctatttttaaaaattaataagctctgacctgtacgcaaccaaataaaacactaaaacttatctgtgatcaacttagctctgtataaaaatcttcctcctctttctttctgtccaattctctacagagaagtcttagcttttgcaaaatcattaactaatctctgttttgatgactagataacttggatgtaggattattatacctaaattctttctttccatgcatttatgtcggttttgacatctttgttctcttagtttaaaagatatcaatattagttatcttctattctttgaacatttgtgtccatctcatgaagttcaggaagcgtaggcaatactttcctgcttgttcgtctcatcgccaagtaatgatctcttcgtcatcttcttcttctccaaactcatatcaaatttgaatcttatcatcaaattgagagtaatcaacgacaccactgcaatcttgcatatacattgttcttgtgtattccacccgtttctttaatcttcaatg

SEQ ID NO: 146297 - DNA, 557 bp, Arabidopsis thaliana landsberg
tcacaaaacgcctaagccaagttctaaggcgtcataaaagaaagctttccatgtttttactcttccccaagactttctgtgtagcggataagtttccttgggagaaatatttgttttcatgttcttcaaaaataaaagactcagttcttcagattctgggattttattataaccagatatgttgtaaaaactacaaattcaaagctcacttcactggagttctgagtatataaagatttcatttttcctcatcattgagtacacataaaactactgtgtatgaatctcatatgcgtacacaaaagtttacttcaaatcatgttttaccaacaaatgggtacacaaaagatcaaatctttacttcataacaacataaaatctccaacagatgcattatcagaaagtggaacagaacctaaatcaagagtcagatgattgaacagagacattgttgagacgttcaagagccaagagaagagcttgagtaccaagatcaccttcaccatgagccttaagagacaagtaaagctgttgagcaagagctaaaccaggcaaag

SEQ ID NO: 146298 - DNA, 357 bp, Arabidopsis thaliana landsberg
gaatcaaagagtaagtaaattaagatcaaattcagtagtcgaattcaataggattcaatgaacagaatcaccaaaaattgaatcaaaatcacaattcccatatacacatgtctatactttagaatacatgtaagaaaaaatatctatgtacctcgttgtgaacctaaattagcagttgtggaagagacccatctgctcattttcccatgagctctcctaaactagcttcttgaatctccaaattaatcagccaaaaatatctcattctttcttgattcgcctgccatttggatcgttacttcaggcacgaacccttgaccccatagacagagaatataacatgtctgctaatcattc

SEQ ID NO: 146299 - DNA, 694 bp, Arabidopsis thaliana landsberg
gggatacgacactatacttgtggatctagtaaaaaacatcatataaagattagaaatgaataaattttgtgggatatgacaagctgtgggatacggcagagagtaaaagtcggaacgagtcggccgattggaccgcagcactatttgaatgtaccaaatttaccgattatgtaatgttgtcacgcaatatatctcaattgtataagggatttttagctttttaccaactctacaaaactacaaattcacacgtaagtaacagtatcgattatcatcgaatgtattttgtttttatcaattttaaaggcattcttgcaattgtttttgttcgaacactccaatactttgtcaaagtcatcaaacagcaaagaatgacgtttcaaaattctatcttttcggttccagttttgtttttcccattgtattattgtttcttatatatcctctttcacatcatatattacatatttttgtatgatatattacatactttaagaaagctaaaccaaaattaaatgtgagagtatgaaagaagagaagacgaagatggggttgtttgtatttagtttttttttttggtttaagggttgtttgtatttaaatgagcaaaaccgaaatgattgatgaaaaagagaggaaggaggagtaaatagctttctgtagccaaacatactcgtctgaaattgatggcatt

SEQ ID NO: 146300 - DNA, 92 bp, Arabidopsis thaliana landsberg
tagaagcctctcctacaaacttttttatagcaatcacctcaacaacagaaaaaaatgatgtgtttctttttttctaggggaaattcgaactc

SEQ ID NO: 146301 - DNA, 413 bp, Arabidopsis thaliana landsberg
ttgaaaaataaaataatttagtatcagaagattacatgacccagaaatagataaaagaacgaaaaaaaccattattataacccttcatcgaatcacagaatctggtccgacattgaaggaagtcgccggaaaaagttgaccggaacggaaggcatatcgtctctaaacctcggatgtcgaatgtagtaaaaaccagagcccaaaaggaaaactttaaacggaacgatgtagaacaaaaacgacgcgaaaagacagaacactacgaatatacacgtggcgcgtgggtctctccagttgaacaacgcctcaacacgctccccttgagccgccacgtcacctaataaagtctgtgcccgaccggccaatgcccttaaccggtcataccttatacgtacgacctccggttgtctcgt

SEQ ID NO: 146302 - DNA, 311 bp, Arabidopsis thaliana landsberg
atgggatcataaggggcttaagacgctacccaaatacatgagggtttgttttgaagctctagatatgatcacaacggagattagcatgaagatctacaaatcacatggttggaacccgacatacgctcttcgacaatcggtaattatcattcaaaacgtaatgtgtatatatattttgtatcatatagctcaactggttcaaaccctactaaaaatatgatgtctttgtttctcagtgggcaagtttgtgtaaagcattcttggtagaagcaaagtggtttaattcgggttacttacccaccactgaagag

SEQ ID NO: 146303 - DNA, 1039 bp, Arabidopsis thaliana landsberg
cggcgctactgatccaaaataggtcaactttatacctaatcatccctcatgcttgagctctttgtacagcattaatgctctctttgaattttttgtgtgaagatacgtttcttgctagccgctacctttagttttgctccataattcccatttgcctcaaaagacttattataggtgagaacagagaaaagcaaccaaaaaagaaaaagaactcataaaagttcttaaagagtgatttgaatcttgtttgcttttgtttgcttctctgtgttgagtttcggattttttgttgagtgtgataacataaatgaagaactccatcttctgatttttttttttacataatgagtcttctaattgttacttgttatctcatattttttttcttgctttcatatatatttgatacctaagtttcatacccatatgaaacaaaaccaaacgacccaaaacaagaccaaaaacaaacaagcaagaataagataaagtgaacaagcattgatgaattctcttgtcttattaagacaatgttctgaccggagcttgaagtctgaaacctccgtgactgaggtcaccttacacatggttaatatataaccggaggtggtcttttccctccttttcctccacctcctccaccaccacctcctcctctcttgttatcaaacccaaattctatgtcccctccgtttcgaccagtgggtttgctcataggaccaggccgcttcatatcgaaaccaaactccacatcacctctttctcttggttcacgctccacaggtctaatctcacggctcttctttgacgatggtttctcatgcttcgaagctttgttgttgtttttgtctttgtgttgctttccaccgcggttgcatagtcttccaaacacacaagccagtgctgccagaacaagaattgcggctagaactatgaatgctgtaccaaacgagccacttgaaccggaggatgaaggcgagaaagaagatgaagtagaagaagaagtagatggatacacttgccgttgctgaaactcttgtgg

SEQ ID NO: 146304 - DNA, 479 bp, Arabidopsis thaliana landsberg
agacaaataataataatattatattattattgattatattattattgatattcgaatgagtcaaattcaacagcgatacataatagagagataaaagacatcaaacataaccaacatgaaatcaactagaactcaaaacaagaccagacttaaacatcatcaattagttgattttactttaaattcatttaaacataaaaagcaaagaagaaacttcttaaaagaagaatccaaaggccatcaccgctacggaggcgaagaaagtagggataaatgaggaagcatcggaggtagggctaggcgcgggagcgtcaaccgctgcaaccgtctggtgaactgtagagaacgctatcactgccaccaaaaccaccacgtaaagcttcatcttcattgcctccattgttagtatttttcgatttgagactcaaatgaagagaagaaaagaggttttggtgcttattgttgtgttgttgtttttg

SEQ ID NO: 146305 - DNA, 243 bp, Arabidopsis thaliana landsberg
gtgaatcgcgtcaaaatctgcgactatctcaagggtttggggataatcaccgatgaattggagagtattgagctaccttccaccattgaagtcatgtgtgagcgtgttgagttcttacagaagctagggttaacgattgacgatataaatgagtatcctttgatgttaggttgtagtgtgcgtaagaatttgattcctgtcttggcttacttagagaaaattggaatctcgagatcgaaatta

SEQ ID NO: 146306 - DNA, 723 bp, Arabidopsis thaliana landsberg
aaatatcactaacctcattcaaagagagaatggcttgtaaagaaaagcctcgtgatcttcaagttcttttgatcatatctatagttttgagttgttcttttgctgtttctgcaacggtggaagaagctaatgctcttttgaaatggaagtcaactttcacaaaccagacaagttcatcaaagctatcttcttgggtcaatccaaacacaagcagcttctgtaccagttggtatggtgttgcctgctcactcgggagcattatacggttgaatcttactaataccggtatcgaaggtactttcgaagattttccattctcgtctctccccaatctcacttttgttgatctcagtatgaaccgtttctctggaaccatctctcctttatggggacggttctcgaaactcgaatacttcgatttgtcgattaaccagttagttggtgaaatcccacctgagcttggtgatttgagtaatttagatactctccatctagttgaaaacaagttaaacggatcgattccttctgagatcggtcggttaactaaggttacggagatagctatatacgacaatcttttaaccggaccaataccttcttcttttggaaaccttaccaaactagttaacctctacctctttatcaattctctttctggttcaattccttctgaaataggaaacttacccaaccttagagagctatgtctagataggaacaacc

SEQ ID NO: 146307 - DNA, 147 bp, Arabidopsis thaliana landsberg
aaaggatattgagatgaacacaacaaggaatacgattttgcatcacattgtattcatttttacttggttctcaatccccctttagggaagaacttaagagtgtactcatttttttctttatatgataagatgatctttgccatacat

SEQ ID NO: 146308 - DNA, 319 bp, Arabidopsis thaliana landsberg
tagagtcaactgtgttgatctaaggtcttggactatctgagatatctgcaagcaagattcacatcagtgattcaaattattatgaaaacatcgagaagaaacataatatttggtacaaaccttgatctccaaaatagttggtactatacttctaatgtcgtttaagcattgctctaatgattttttagctctagaacctcttgcgagtatagcatctcctgttactgcctgcagattgaagcatagtattaatcacattagaccacatagagataaaccaagggattagtaccaaaaccaactatgaaaatgtattgaa

SEQ ID NO: 146309 - DNA, 197 bp, Arabidopsis thaliana landsberg
aaagacatatgtggtaacacttcttcaactcattggcttccctgtactgattctcttccgcttcttttctcgaatcaggcaacccaaatcaacagatacaaatttcagtcagtcaccttccttcaccacccttgcatcggtttacttgtgcactggactgctagtgtctgcttatgcttatttgtctgcagttgggt

SEQ ID NO: 146310 - DNA, 72 bp, Arabidopsis thaliana landsberg
tcagtgagctatacagctgttcctctctttgttcttgctgctgtttggtttcttgggtttggcatttgttta

SEQ ID NO: 146311 - DNA, 437 bp, Arabidopsis thaliana landsberg
acaagtcaaacaacaaacaagagcttgcgttaaaataaaatctgcaaagcactaaaaatttgatacaaatgcacagatttactcatcatgaatatttatttcaatgggaataaatcaagcttttaaaatgtaaaccgaaatcacttatagaaattgaaacaaaggtcttgtgtccagaaaatacacacacagacaaaatagagctaagactgactaattcgaaaagcgttcttaagttcactatgaaaagctctaagatcctaaattttctgatgtgaagcaagagaaaaaaacaaagtaaagaccaattagcagctatctcacacttctgaatatttctataagcagatcagattctgaacgactatagtgaagatcaattgtaccttaagattgggagctcgagaggcaaggtactcagtgacggagaaaagcaa

SEQ ID NO: 146312 - DNA, 558 bp, Arabidopsis thaliana landsberg
ctctctgcttcttctgaatttttttcatgtaatattaatatagcttcttctagtgttcgttcgtgtgagatttgctcataaagcactctgcagtttgggctagtgcgcagttgttgtacttggtagcagtgatagtgtgtgttttttgtgcctcaaagtcaaaattgattgatcatccaattatgtatcactcatcacatgtccttgtctgaaactgggttcttgtgattgaacaaatcagaacagcatgcattattaagtaggataattaccggttataatacagcacggaaaggacaggatatatcttgataaacagtgaaatgaaccacagaaaatagcgaagctaagctcatgaggtagatgagccaacctaaaggaccttgttgccatcgcacataatgtaaaacagcttcccaaagaacttgtttagtggcttgaactccaaaacggtgcgttgcttgagagaatggggggcaaggcgtctcttgaggctcaagttctcgtctttgagggtctcaagggttagagaaagctgtctgatgacctctctcttct

SEQ ID NO: 146313 - DNA, 619 bp, Arabidopsis thaliana landsberg
  unsure (1)..(619): unsure at all n locations
agtgttaaatgagttattgctttgaatataacacaaaattcttcaacgatcttaccattctgaattgttgtgcttcattntttattggtttccctaaccagaggagttgaagaatatgcctgcaccggatatcgcagtaaaatactatacgggaggtgacttgtacttatttggtgagtttgtctttccaggaattatcaatatcctccagagttgtagagatgtttttacctatgattagtagtcttttaaactggccctgtattgtctgcagatgagttccaaacatcaagaactcccaatactcgaagaccagtaataggtagcaaatctatttcatatccgtttagttctttccatctctgattccgtcgaaccacaaaatgctaaaaaaaagtttatgatttatccatggttatgattctgcgctctataaatgactgagattctgtcttatgtttgtatggaggaagcattattcacagtttgtgacttactttgatgttaaattaagaatctatataacgtttttgttgttttgtgattacggtaaggcaaagaatctatacgatgtgtttgtgaacataagagatgatgaagcagaacactgcaagccaat

SEQ ID NO: 146314 - DNA, 513 bp, Arabidopsis thaliana landsberg
tttacaaaccctaaattttatttaactttagatacaagatatacctcttggtcatacatacacacacatatatacatcaaaatttcggaagaaaatagaaataaataaaagcaaagtaaaaacgagtgctttgatcaatctgctagcttttgtctatctctcgcgatcaaacttcatcgccgggttcaagttttgtaacaccgatatgatgttgctaatgagagccagcaagagaatgaagcctatgatcattctcatgagatagatataccgtggattgtgcggtttctctccattgcttcctctgtaataaaccagctcttcttctctgtcttcaccatagatgactccttgtctatggatgtatcactatcaaccgctcttgatgtatcttgtttcacctgtgaaggaaagttacataatcattatctttatatatccaacatatgttgaaatcatatagaatcaacataagagcaacgcaaaacctcttgttttggtcgtatgatgctt

SEQ ID NO: 146315 - DNA, 187 bp, Arabidopsis thaliana landsberg
caggattttcgttctgaagagctagagaggttctacaaaaggctgttcgataaggccatgaagaaggaaagcgttctgattcataaggaagcgtccagattcgttaacaatagcctttacaagatgtgcacgggaaggagcttttcagtggagaataatgaagtggagagaaaaatggaacttactg

SEQ ID NO: 146316 - DNA, 405 bp, Arabidopsis thaliana landsberg
aaccaatcacaatcgccttcttccacggcggctctccgtcacaggtgacaggtcccaatctctctctctcgcggcgccggcgaagacggctggtacataatgttgaagctttggagatggtaccagcgatgcctgacggttcatcctgtgaaaactcaggtcatcagttctggatttctttggggatttggcgatgtcaccgctcaatacatcactcattccactgcgaaacgtcgtcttcttcgtctcaccgttagtcattttccgatctccttctctctctctcaccttcgattgaagtttcaaattggagtttctctccgattcgtgcggattgatgaaattagtttttaggtttttgaatttgtatctatgtatctctgagtttcatgatatgtccttaga

SEQ ID NO: 146317 - DNA, 913 bp, Arabidopsis thaliana landsberg
agtccccgcaaatatgttgtctagagttaagaactcaggagctggagataagaacaagaaccaaggaggcaatgattctaactctacaagcaaattgcatcaactgctcgatacgaagcctcgagctaaagcagtagctgcaggctgatcgatggtaattcatgtcgatttctacttaatttgtcgacataaacaaagaaaataagtgctactaatttcagaaaaacttgatagatagtatagtagagagagagagagagagaggtgtgatgattattgatctataaattttcggagagagagagggagaaagagaagcttttccttcagatgaaaatttggtgttatggtttgttactgttaatatagagaggcttttctttttttataaaatggcttcctttgttgcatttccttgttttagacctgatgtaattttatgaaatcggtgttattgctttgcgtaagcttttgtttcttttgtcaaggtttcatgcataaaggatctttcttttcaggtttcatacatctctctccgaaaatttatagatccaataatcatcacgaataacacaaacattatgagtctgtctttgggtgattttcttcgctactcttgaggactgtcaatcacacaaggcattcttttctacaaccgagtttattttataaaagctgaatattaatgctcgctcacacatagagcaggttaattaacttgtactgagaactctggaaatgaaaactaaagattctgtcaaatttcaaaagctttatcatcaaggtatttgtattggtagtaaataaaaacatgaaaatgttaaaagagagagaaaacaaaatccggaatgggagactttttcaaagattctaaaaggttgatgttcaagtagtcggaatctaaatcttgatg

SEQ ID NO: 146318 - DNA, 263 bp, Arabidopsis thaliana landsberg
gctcaagccgcttctatctctctacatttctctttctgcaatggcgagattagtgcgtgtggctagatcctcctccctctttggctttggtaaccgtttctaccctacttcagccgaagctagccacgcgtcgtcgccttcgccgtttcttcacggcggcggagctagcagggttgctccgaaagatagaaatgttcagtgggtgtttttgggatgtcctggtgttggaaaaggaacttacgctggtagactatcaacccttt

SEQ ID NO: 146319 - DNA, 200 bp, Arabidopsis thaliana landsberg
atctaaaacctgcctgataagagcattcactgtaaggaacaacacattgagtagcaaatggaacatctgaaaagtctacaaactgcaaagtaaaaacgaacaagaagataacaaatattgctagggacttgactagatgaaaattcccaaaatatgtttttcgatttcagatgtgcaaaaaccctcttcacagcctttgt

SEQ ID NO: 146320 - DNA, 364 bp, Arabidopsis thaliana landsberg
cgggtatttataacatctagtttaaaacctctaagacgtaaaatttcctttctcttcttagacgtagtcatctgagattctgtcacgatagctagacccatatctctttcaacgttatgtaaattataatataagtttctaatttttatttttaaatgattattacttttgatccctcattgttttttaaaagtttttttacaccttttcattcaagattttattttaaagttgagttttagcatttaagtccaaacagaaagttttataatactagaaacttggatgataaatttgcaatacaatataaatataaactggattttggatcatgttatttgatatagtttattcatcattagag

SEQ ID NO: 146321 - DNA, 201 bp, Arabidopsis thaliana landsberg
gcatccatggctcgtaatcgcagcctctcctgggaagcacttagagtagactttcttgcctgccaaattaacatacatataatcatttgaaccaatagcacaatctctttcctgagttttcctaacaaacaatagcaagactatataccttcggaacaacagccaacttaagtggagcttgcacaacatcaccaaatctta

SEQ ID NO: 146322 - DNA, 647 bp, Arabidopsis thaliana landsberg
gtttattgtaggagttcaaaattttgtaagtataaactctaaagtgaatgtggtagccagcttaaaagtttttatgagactttcccaaagaaaaatcaagattattatcattaatacattaccattattggtcctctttccacatctctacccaattctcctttgcctctttgagtccaaaaagagagttagtcttggccgggtccaggtttgtggacaagcttccgtacgcaatcccaagagccgacgaaccaaaggtcacgagtgtggtcaagtatggaacccacaaaggcacgtcccagacgtttctatccttcaaaacttcgagtactttcaagatcgccactcccaagcccagtggtgttcccacagacaccacaatcctccccatcatcctctcgaacacttcttgaggtatcgggggatcgtcttccgggtccgggtctggccggccgggtttttcagaggttctagaagattgaaaccctttaggtccagcgtggagcttggattcccatcttggtttgttgttaggatatagggtttttggattgtgagatttggttttgacggttgttcttgagagagatgataatggtagtaaacggtgtgagcacaagagagctctcatttctatttcttcttct

SEQ ID NO: 146323 - DNA, 368 bp, Arabidopsis thaliana landsberg
tagaaaacccgaaaggagaaaagcaaaaaagccagatcacaatctcaaactcacttcttcttcttcctcactctcttattaggttcagttccttttcgattcttcgtgtggatcgctgtcggtagatttccgatttctttaggttctgctcgaaatcgtggtttagtgtttattatcatcgattcagaaaacggtgggtaaacttgtagcggaagatgaggcggtggccggtggatcaccggcggcgaggtagaaggagattgtcgagttggatatggtttctccttggttctttctctgtcgctggtttagttctcttcatcgttcagcattatcaccatcaacaagatccatcccagcttttactt

SEQ ID NO: 146324 - DNA, 446 bp, Arabidopsis thaliana landsberg
ctcataaatctgtgatagcgatggacggtgggctattcgagcattacactcagttcagtgagtcgatgaagagttcattgaaagagttgcttggagatgaagtttcagagagtgttgaagtgatactgtcgaatgatggttcaggtgttggagctgcattacttgctgcttctcactctcagtatctcgaacttgaagatgactctgaaacaagttaattttaaaagcctttttttgtgtttaaccttcttctttgttttgccgttagggtttaaacaaataaaaaaaaagtaagaaggtaaaaatgcccttttgggaaattttatttttgacaattttcaggaacaataaaacctggattcttcatcaaagctctgggaaattcaaacgaccagccaatgttgtagaactatacatatatattcgagttctttctatgaacgttc

SEQ ID NO: 146325 - DNA, 425 bp, Arabidopsis thaliana landsberg
actcaaattttcgaacatgtattggtagtggtcagatctagtcatctatcttaaaagaaactgaatactaacttaaatcaaaccacatatacaaatggtctagacaaagtgtgatatttgtatatgaatttggtagatatcagctagttctaaatgatatactagtagtgtcattggttatatagataataataataataaaaatacaatgtagatctcttatcgactattgtgatttgcagattaaacaaaaaatgaagaataaaggtcaagattcgttctgagtaaaatgcaagagggcgggaaaacaacctgttgacttagaaaatcagtttttcttataaaaacaattgtcaagtgagaacatctaccgatgattgcggcctcgcaaagttttttatactttttagaaaccaaaatttcaa

SEQ ID NO: 146326 - DNA, 102 bp, Arabidopsis thaliana landsberg
cactatcacaatcataaccacaaaaacaaacactatggacacctcaaaagtctcttcacaattcttttcctaatagctatgtcttcaaccgataacaattgc

SEQ ID NO: 146327 - DNA, 275 bp, Arabidopsis thaliana landsberg
gtctaaaacgtcgtcggattaactcagttgttcgtcgcatcgaatcatcggaggtgatggaggaaccggagtgtccggtgtgtctacagtcttacgacggcgagtctactgtcccgcgcgtactcgcctgcggacacacggcgtgcgaagaatgcttaacaaatctacccaagaagtttccggacacaatccgatgtcctgcttgcaccgttctcgtcaagtttccacctcaaggaccatcagctctccccaaaaacatcgatcttaacagattg

SEQ ID NO: 146328 - DNA, 254 bp, Arabidopsis thaliana landsberg
ctcaccatatccacaatcctcaagctatctcctttgtgtccataacagaaacgctttttgcgatttatcctaatcttttttctatcttctgctgcaaatttggttcttttttggttgaatttggataaaatcataatctcctcttcaattttcttgtgaaatggaagtttcagtgattggaaatcctcaagcgaggatctgcagagcagaattagcttacagagagcttggatttaaatttggctctgatgtaa

SEQ ID NO: 146329 - DNA, 371 bp, Arabidopsis thaliana landsberg
taatataactatcgacccgctctctgtattcaatcacacagcaaaggtacaacaagtatcacactttcaataatgctttctcgatacatatctcatcccaagatcttctacagaagaatccatttgcttgtaatggatgcaaagcagtccctatctgtttctccaagacaatcaatgtgtactcactcttttcaacacattgtttacttgttaacacaacaagattcgagccaagaacaagagagctaaggagacacgggaactaccggttgagccatctcctcaatcgggaaacaactccctgaggaggaggggaaggtggaataagaacatcaagaatggtaactctctcttttggagtcaatggtaca

SEQ ID NO: 146330 - DNA, 786 bp, Arabidopsis thaliana landsberg
actttcttcttgggcttttgggccattgatagtcttaactcttggcgctttctctgctctttaccttgtaagtatttgataagatcaaggagtgtacttttcttcattctagtccttgaatactaagaaagtggcaaatgtattttggagactgtaaagagatctgttagctcttccaaccaaccacctagttaagaccctcaactctgatccaacccaagtcctattcacatttatgcttatcagtattcttccacgttcttctcgcacgccgtagaaagtgttttggaatgagtttttaaggttcctttcttctatggatttgataaggtttcttaccataaactgatttttcttgttgaaatgctagtactttggagcagatttcattcatgatggaagtagaactccggtttcaccaccaccttacatcgatccatatgctctgttggaggatgagaggatatcagggatggatcctcgtctaaattagcagcaacaagttgttctttattgcataactagtgtagagcatatatttgctcttaagtatatatttttatttacagcctttccttttatttattttccttacggttgtaaaaagaatcgttgcttctctattgcttctctgttccaaaaatttcaatctttcaccactcaaataacaatttgacgtttctatttgtttagattttggacaatcgatttaaaccaaacccagcttaaattcagttcttggagatgaaaatattatcagaaacaaacgaactagaacaaatggct

SEQ ID NO: 146331 - DNA, 225 bp, Arabidopsis thaliana landsberg
atgaagatgatgttagccatctagaggtatggtcagtccttctcgctgtgtaggttacatgttaaacattagggctcatatgaaagctatatatatatgaacaggtttatttatacgaggaatcgtctggctctccaaacatgtatgttcatcatcacataattataccagaattcccattgtgtactgcatggcttgattgtcctcttaaaggaggggaaaaag

SEQ ID NO: 146332 - DNA, 221 bp, Arabidopsis thaliana landsberg
ggagctctgctgaagaaaattgtcccgagtttggatgttgcgagtgtgaacaaagatctggagaagaattcttcaagaactggtcttaaaaaggatacttggcttgactctgatctatatacatgattcagagacagagtaatgaaagcttctcacttgtttcatgtttctatgcttactaggaaaaaacagagaccttatttacgcttgtgtgttctcat

SEQ ID NO: 146333 - DNA, 209 bp, Arabidopsis thaliana landsberg
aacctctgatgcgtcattggagttccaaccaaactcacctcgcacttttctcttttgaaccctggccctaatgcccgcttaaccgctctccacatcaccttcaccaaacggtaccagtacattttggttaagatttgttttttcgtattcagagaactgaagattacaaaaatgaataggtacctcggaccgttgggatttgagattct

SEQ ID NO: 146334 - DNA, 378 bp, Arabidopsis thaliana landsberg
cattctctctctctctctcacacatggctcatcatctcttaaaccgcgttagatcttcctggtcttcgatcttaccattaactataacattcctcgtcatcttcaccggaaactcactcgccggagaattacgtccttccgatcatggcttacagtaccaattcagctcaccaccgacagaatctcactcacctccgggaaaaatgaagtccttcttcggagattctcattcttcttcttctactcctccttctcaccctcagctcctccctaaagccacggcggcagatggcggagacgacgattcttggtggcgagatggagctgggatcagacgtgatcacgtgatgaggcacgtgtttcttgcggcgagtatca

SEQ ID NO: 146335 - DNA, 686 bp, Arabidopsis thaliana landsberg
aatcgtggatagaccgtctgcttcatccgatgattcagattattatagaagtaacagtagtagaaagaaaagatcagaagatgattacaaaagccatcacagggagagaaagcaagtgcatagtaacgatcctgtttcagagaaaagtcagaaacagcattattcggagtctggaaagattcagagagtcgagaaagagcatagatatgatgagagaagacacagatacgtcgatatggagtctgaaaatcgtaatagatccgagaagaaaccgagatatgatgatcgtgattctgagaagcatcacaggagtgtgaagggcaaagaaaagcatgtgtatgaagcatctgatgatcctgaagagttttctgacagatacagaagcacaaagaaaactgaatctgattcggaatcaaaccgtagaagtagaaagaagaagcatgagttgtcttccgaagaagaagaaggggagtctcgtaagcatcgatacagcactaatagaaggagaaactgagtctatgctatgtcaattgtcctggaccaagagttatggttccggtctgaatgagattgcgagataatgtagtaatgtacgattgttttttttttggtctatgtatactgggtttataaaagcttaatgagtccatgactctttttattattcgataaagctaaaaaaaaag

SEQ ID NO: 146336 - DNA, 163 bp, Arabidopsis thaliana landsberg
tgtcactcactcaatttggtttcttgttttgctctctagatctctcttttctctcttctttccatctccagcaatgggagcttgtttaacactctcgttctcttgtgatgaagttgtgaatcaaatctctcaaggtgtatgcatcaacgtgggttatatttgc

SEQ ID NO: 146337 - DNA, 1072 bp, Arabidopsis thaliana landsberg
aaaaagaaaaaaaaaatcaaaggagcttccttttttcgctctcgtctccgtttacccttttgggatttttccctaaacctttttctctctttgtataatcaaatcctctttatctttcattgtttcgcgtgaattagctctgcaaaggctcttcattcttctcgcttggattcctctgcacaaaaggtacccatttgatgtcaattttggtttattgttttgattgccctgtccaagtgacaagtctttgtatgtatgatataggtagtgggttctagtttgtagatgaacttgtcgaatttggagggtttttagttggaagcatttatatgtgggatttggaattgttctgtctatttgttcttagcttaaaggttgggacttaacttatgacttatgagcatgagagaaggagactttttttccaattcgaatctgattgatgaaactttttttactggatttgggtagatattgttaggttttaaggtagttgactgttgttagttgttgtttactcgagattagattattgtcatctactcttgttataaaagaagctcctttgtactatatcagtgctgataactattaatgaagttcctttcccttaagtggagatagtttctttgtatttgcaaactcaatttatgtgagaatatatccaccattattgagtttcttcaacctataccgtctctgacaatctcgctttttcgttattaagaacgttccagtcttaattaatgttatcttcctttggatgtaattggtaacaaattgcagaaaaaagaccatggatgatcttcatggaagaaatggtcgaatgcacattggtgtagcgcaaaatccaatgcatgtgcagtatgaagatcacggtttgcaccatatcgacaatgaaaacggtatgatggatgaccatgctgatggtgggatggatgaaggagtggagacagacattccttctcaccctggaaactcaactgataatcggggtgaagttgtagaccgtgggattgaaaatggagatcaattgacattgtccttccagggacaagtttatgttttttga

SEQ ID NO: 146338 - DNA, 354 bp, Arabidopsis thaliana landsberg
ttttacttgtagactttccaggtattgagtaatgtaatacacgtatctacatgaagatgaggatataaatatccatttatgagaaaagaaaaaaagggacaaacaaaagttggcaagtttaactaagtgaaaagtctatggcggagacaacgagttggatcccagtatggtttcctctgatggtgttgggatgttttggtctgaattggttggtcaggaaggtgaatgtgtggctctatgagtccagccttggggagaacaggcactatctgccaccaggtgatttgggttggcctttcattggcaacatgttgtcttttctcagagctttcaagacttctgaccctgacttct

SEQ ID NO: 146339 - DNA, 492 bp, Arabidopsis thaliana landsberg
aaaccaagcccatgtttgagtatcattcagcaactccttatcaattttgattcatttcaatatgaaaaataattcaccggattccatcaactagaatataacaaaaaagtacgaataaaaaaaatatttaggtaaaaaaaattttcaaatatatatcaaatacaaatatatatcaaatataaaaattgatccttaaaatatgaaatagtattcaatcaaatttaattgaatgaacggaaaaaatcataacatacacaaagttttctttggtctttaataatttagaacattttttattgacgagccacagaaattgcacctatcaaagcaactaaaagaattattgaaatgagttcaaatggcagaaaaaaatctgttgataaatgaattcctatttgttgactattacttataggatcttgctctagaatgtggtttaattttgtagtccaaataaccccgtaccatgacgtatcgagaatagtagacatt

SEQ ID NO: 146340 - DNA, 114 bp, Arabidopsis thaliana landsberg
gcgagaccgagacgaagaaacacagagatcggtgatggcttcacagagatattcaacagagagattggtttctctcatccaatcaccatctctcgtcgaatctccgcttctgag

SEQ ID NO: 146341 - DNA, 288 bp, Arabidopsis thaliana landsberg
tgtacagaacggccgagctgctacggctagtttatctgcattttttagaaagaactttcaacaaagtttatccaaggctgggtaaaagcacaaattcataatggtttccatgagattttgaaacggtttcatattactcctgttgtagctttgatagaatccttgtcgtctatgtgtctaatcaaaaatcaaaagctagtggcctattatctagtatcattagatatgtgaacagatgaacctcgtatctttaatacaaatggtagccatggtcagagctattgattc

SEQ ID NO: 146342 - DNA, 421 bp, Arabidopsis thaliana landsberg
gcataaccaaacagctttgattgagaaactataatttcatgattttccaaaaataggaaaacatgaagaatatcaaagttagcctaaaatgttaccaatgtttgcataagcagaaaataggtcttacaaaaggaagaataagtctcatacatgtaaccaaagataatacaacagttcctacttcatgaccccttgggtcttgaatcttgatttaccagttgagtcaatcaacgaccatgttctttggcttctcttcttccttggcttccttccatttttacattaacacttttcactagcttcagcaatggttctcctcttccttcaccacattcagatcgacgacgccacctcttaacggttttgtttcttcggccgtgtccttcatctcaacattgtttaggtctggcttggtatcgtc

SEQ ID NO: 146343 - DNA, 333 bp, Arabidopsis thaliana landsberg
cagagtcggttccatgcatcttctaaatacattttatagataaagtatagtgaacacatcagacttgcacttaactgagaccaggactatgggctccatcttttcttctttgaccttagcatctttaagataaactcgaggaacagcagcagggtctagctcaaaagagccagctgggactccttctttctcatctccagtcattttgaaagatggaactctatgagaaaacctaagcatttcatcacatgatatcatgatttcgacaagaccattttgcgcagcacgttcatacactgatgtgaatccttccactctccctagataagccac

SEQ ID NO: 146344 - DNA, 288 bp, Arabidopsis thaliana landsberg
  unsure (1)..(288): unsure at all n locations
tccattgaaaagccaagcttttgtcatcagtggccaaataaagatgacaaaaagatgggtgggattgannnnnnnnnnnnnnnnnnnnnnnnnctgcatctctaaaactaaaataattgttcctccatctttttgaagttctaattaaatatgtatgtatatagagtttgttttcgtcggtatgctcttctaaagagtcttctaggtggtggtaatatatgtatggttaaaatggcaatcatatatattaattatttcgaagttaatgattatgatatattttatatc

SEQ ID NO: 146345 - DNA, 155 bp, Arabidopsis thaliana landsberg
agaagagaatctcaagtttggattaaagaaacaaactaataaacacagtttcatagattcataatatataatgacagtaccactagagtggcttaattacaaggagtttcacagtagacgcgaaaagcaaaacgcttaactgttcactagtcaat

SEQ ID NO: 146346 - DNA, 440 bp, Arabidopsis thaliana landsberg
  unsure (1)..(440): unsure at all n locations
ggctcttgaaaacaggagctatagggcaaactatggatgaaggtagagccataaacctctcactttccgctcttggagacgtgattgcagcgttaaggagaaagaagggacatgtgccttacaggcaagatctcagctttttaattccttttcacacacatatgccattgaagcagcagagacatctatctggcagaaatgaaatagatcttgctttggtcatactactgagttagctttttcttttttgttgcttgcagaaacagcaagctaactcaaattcttaaagattctctaggtaaaggcatatggttgcttagaatattatcttaaaagtcttttgagattaccaacataagttatctaagtttgattgttttcatgagtttaatggatttgtgattaaactntatttaggtactagatcaaaagttctgatg

SEQ ID NO: 146347 - DNA, 437 bp, Arabidopsis thaliana landsberg
tattacacatatatagcttattttaaattttcttaagagattacaattacataggatttcttttttcttatgtgtgatttaaacacgtattccctcacactcacatcgtcgtaattaaacctcttagtcacattaaaagaaaatgttaaactagctggtttattattaaaagctggagagtctatataatctccatttttattcattactttatatcatattgtaatggttaattaatcttatattaattagttaaccgcagaacaaaccctacgaatctccccatccaaacccgtcttgatctcgatttgactcatcttggtcatggacctcgcgaactccagtccgaaaataagaaacggaaaccgtagtcctagaagcctttccacgatgggtcgggtctcgagattagtccataggacctgatcagactcgag

SEQ ID NO: 146348 - DNA, 353 bp, Arabidopsis thaliana landsberg
ctgaagaagaaaatacatatgttatatatatattttaaatcatagttgaaacaatactcagcctagaaggcagacaatcattcctattcactacaaatctttctttatatacaaaactagttagaaaacaaaatcataagaatacttgtgggtgtgggtgtttgtgtcaagagtcaagaccaatttcgctcctgtcaaatgtggtttgttttctccttatccaaacataaacgagagatcatccataggaacctcatcaagacctgctgtatcaatatcctgaagaccctcgaaccagtttccaagagctgcctgttcatatatcttcgtctagatcacggaacgctaattgc

SEQ ID NO: 146349 - DNA, 786 bp, Arabidopsis thaliana landsberg
ggattaggacacccccttgccaaaaatcaagatgagcatgttcagctatctgtagatctagcctctgatgtcacagctctttctaaattgagaatgagtctccgggatctaatggctggatctcctgtttgtaatggtccttcctttgctgttggtcttgaatccgcatatcggaatatgtggaaaaagtactgcaaaggtgaagtgccgtccttaaggcgaatggaaatgctgcaaaaagaggtccatgatgatcccttaatctcaaaagacttgggaccatcaagagtcagcgctactggagaagccactccgtctctcaaggccaatggttctgctcctgtaccttcctctttaccaacccaatccccgcagctctcaaagagaatggactccactagctagataaccagcaaatcgagctgctgcgaaatgccggcagagagtcttgacccatctggaaaaggtgtgaaagaaagagtcgatgagcttttcctgctatttacttccaagacaataggaactagactttagattactgcttgtgtagtaaaaagaatagtaaaaccagctctttcttttgttgtatctctttctactcttagtttagctttacatgattcttgggaagtcgttaggtggtagtggatttggagtttttcttctcatttgagagatcaagttgttgtgtatcgattagggttttaaggctttttaggatgttttcatgtgttggattttgactcatatgatagtaaatatagttatagaaagcttttcggtgcc

SEQ ID NO: 146350 - DNA, 158 bp, Arabidopsis thaliana landsberg
gagaagcggtcgcgacattgtaaagatctctagctccgtccttcttcctcgtagctaccctctctaatctttttttctcattcctgttcttgatagttttctagacagatttcgattaaacaaaaccgcggaacactttgaagaaacccgcgtgattt

SEQ ID NO: 146351 - DNA, 286 bp, Arabidopsis thaliana landsberg
tgacatgtaggataagaaagcaagagatggctttttcgtcatacagattttttttttggctatatagatacaacagcacacagagaagggaaccttgggagattctaatttcaatccaaaaagcccccaacaccataaaccataaaactctttcgcttttgattgtaccaaatttcactgtattcttacatcaaatcaatgactagtgctctttgtgtcatgcaagtgaatcggaaattctaacatttacaacttaaaatgtgattcgcagattatttggttttta

SEQ ID NO: 146352 - DNA, 781 bp, Arabidopsis thaliana landsberg
aagctctgaatctaaaactcctctctccgaccccaaatccagaaattcaagcgaggaatagaatctcccactagagaaaagcaatcccagaaaccctaagttcttcacgtttcgttcttttgcttgttgatcaagcaggatatctccgagatttgtgagtctcttgctacttcttcctggagaacgattcagggtttgatgtgataggaatagtcatcgaggaagatagatttggggaattttttttatttgtagattcatgaaacaaattcgtcgatggcagaggattttgatcctcgctctgctatcgatatctgtattcgctccgcttattttcgtatcgaatcggcttaagagcatcactcccgttggtcagtttcgtctcctctccttcttattttcatttcattgtacttgacgatcgtgtggaaatgcttgattgctttgattttagattgattcacatgaaattcgcttgcttttgttagaagttgtcttggtcttgggattttttcatctgacatttgttttgattttccattgccgattgtcttcttgcaggtcgtagagaatttattgaagagttatccaaaattgtatgtgttccttagtcttcaatctctggattcatctgttttcagcatgctgttgattttgtgccaagttttcagatctcagtcttgttttatcattctctttatgctttatatttctcgagcaatacactgttgttgacatgctaccattattctgcagagattcacgacaaatgaccttagac

SEQ ID NO: 146353 - DNA, 124 bp, Arabidopsis thaliana landsberg
tacatcaatccactcacttactttggcaacaaacaaacaacaacaaagagagaaattaacatggcgtcttttgcaaccatcgccgccgtacaaccttctgccgccgtgaaaggacttggaggta

SEQ ID NO: 146354 - DNA, 102 bp, Arabidopsis thaliana landsberg
tatttatctctatcacaaaattttgaaaccaaaaaagattggcgacaatgtctaaccttaataccagacaaatattgctccaacaattccttactaatcttt

SEQ ID NO: 146355 - DNA, 883 bp, Arabidopsis thaliana landsberg
tctctctctctctatctctatctctcgatttgggggagttccgtcacggtggactagtacgtctcgttgccgttggtggcgtagtcggaattaatttcctcggcgttgagattcacatggtctagaattctagctaagtggttgttgttgttgttacgatttccgatttctcgagttttttttttatatttagcttctgtttcgtttatccctcccggagacactccttggtcgaatctctcatgctgaggtaattcgtcatggatttgtttaattgcataagcttttttgcaattgtctaagcttttatcggtttgttttgtttttgatttacgaatctagattttgcgctttcttatgtatgtaatcaggatcaaatttgctgggttgttaaacaatttttgtctgtgttaggattctaattacgcgtgttactatacatgaatcattttcattgtttttcttcttgatccaaaagtgtgagaatcttactttaggcgtaattcacattttttgcattaatttcaacggttacacgttttttttctttgctttagatttgttataatttggttgttctaatattcataaccttggagttttggtattacttcaggtgttttggacacttgttgtcaagaagaaaccagttttggttctgattaatcgttggttggaaaatatactcaattccaggccatgccttcacttcaactattgcagttaactgagcggggtcggggtcttgtagcgtcaagacggtaaccatttccttgctcttcattgtattctagatggaagttttttttgttcgtttgggctcagatttcatctttctctgtttcattctttaggaaatctatactgcttgcggctgggattg

SEQ ID NO: 146356 - DNA, 365 bp, Arabidopsis thaliana landsberg
atgtgtatgtatcaccttgccttttctccaaagccctaattgatttttctttcttctttttttgtgtgtgctttaaaggtttcatttttaaaatcttcttggactccatttcttttccttttcctttatctttttgcctctctttgtggagtttttgaaatcatccctcatttcattcctattttcgttgtctctttgagtttgagtcagctttgtgttgtgtctaaattctaaacaagtttcagatctttaccttcctttgacttgtctcctgtcttaaaactagggtttaattttctttctctgttcaagtctcagatttgaccagcttggtccagaatttcgcttctcctcgatcataaagt

SEQ ID NO: 146357 - DNA, 419 bp, Arabidopsis thaliana landsberg
agaaaaagaatttcacgatcatctcgtttttatcatcattgttgtttgaagtgaagaaatcaacgttttcacatccttctggtaaccccagctccacgcaagggaaatcgaagatctggatgtcgatttcgagacccggattcagattcttgaatgtgtcgatgggtttttggaggatcttggagttgagagatgtggtgaggattgtggatttggctcctctgctagagaaaagcttagccatgtctagagttggtatcatgtgaccataagccatgaaagggaagaacataacgtggagctttcgatgatgatgatcactacccatgattggctggttgaaaagaaaactagatgtttcgagaaatttgagaaaaataattaagagagacgaaagattctgaagttcgtagaaaata

SEQ ID NO: 146358 - DNA, 376 bp, Arabidopsis thaliana landsberg
gctatgttcctagttatctgtggactctctagatgcaataagaaagatattgagagagcttgggatgctgtgaaatacgctaaacggcctaggattcatacttttatagctactagtgatatacatttggagtataaactaaagaaaaccaaagcagaggtcatcgaaatcgctaggagtatggttagattcgcgaggagcttggggtgcgaagatgttgagttcagtccagaagatgcaggaaggttcgatttttattaagattccttggtaaagattcgtactcttattcttatggtgatgattgaaaaatgttttttttctttgttctgtacatcggagagagagtacttatacgagattcttggtgaactga

SEQ ID NO: 146359 - DNA, 280 bp, Arabidopsis thaliana landsberg
caaaggaggatgtctcgttcggcgacttgacctctctctctctctctcttttaccttcattgttcactgtttccagacattgaaagaaagatcattagtttctgaggggataaccatttttttttcttcttaaaaaagtttttttttttgtcaattggtcttctttccttcttcttcttcctcatccgctcgcttatatttaatttaataataataaaaatcggtgttcatttttattaaaagtataattttgtgtttggttgatcatccgtagtcgagt

SEQ ID NO: 146360 - DNA, 666 bp, Arabidopsis thaliana landsberg
tctgtctaatatcatagaaaccgaacaagagtaataaataaaagggtcatatacccaaaccaaacatccaacataggggcataaagaaaatacgaaaaaagacttacataaggattagtttcacaagctaaaatgcacaatacaaaaaagactcaaagatgcatactaaaaaagtaaaaagacaaaccgctcaagattcataggctttgaatatcatctttgcagtttcattcacgagtccagacctctgcaaacatagctcaaactgcttagccttaagcttcttccatttctcctccacttctctcttctcagctccatccgcaacctttgcccaaaccgcagttaatgtggattcatccaaaccacaagaactcccattatctgcattgaggaacgatgcaatctctttaccaatggagagacctgtgttcacaacctttgcctctgttctttccggtttcttcgcttcttcttgttgtttcttgggagtagagtgagctactaacttcatctctttcggtgcaggtgttcctccaactttcttccttgatgatttaccagtaaccaaaacaccattgcttccccaaatctttctggacaattcaaaacctttttgctcaagatctttagcaaactcaatatcatcttcagtctttcccttct

SEQ ID NO: 146361 - DNA, 466 bp, Arabidopsis thaliana landsberg
agtttctgagttcttgcctctctcagatcaaatggcgactcaagagcaattccaaacgccgtctcgaaataggtctcatgaattccacttttttcttatgttttgcgactctttgatattcatgattcaatttgggaatttgggttatagtttatatgagtatatgctcttaacaattccttgaggaattcttaagtttgatggtgctttgattgctctgtttaagaacccaaagaataaagccatttcgtgcattataaagcgttcatatatcaacactagattctagtattatctcaatttgttgtcatatgcttgaatctgtaaacgatgctaaatcgggtttcttggaccagatgttctggcattatgcacaggaatgagaccagttgtgatgattgactatggtggaaagatgcctgagctacagaatcgtttgctgtcacttcttgagctcatccgagag

SEQ ID NO: 146362 - DNA, 204 bp, Arabidopsis thaliana landsberg
aggttacaatggcgaagctaaggcctagacagttggaactgagcaagactgttccttccaagttgggttttgatggagaagaagacgcttgggtctttgttaaaaagcagaaaatcttcattgtcttgccttctcttccacttcctcaacaacagcatttcactttggagaaacctgcaatatctcctcaattagaagctgggt

SEQ ID NO: 146363 - DNA, 870 bp, Arabidopsis thaliana landsberg; identical to SEQ ID NO: 11072

SEQ ID NO: 146364 - DNA, 402 bp, Arabidopsis thaliana landsberg
gaccaatgttggtggtgctggagatgttcattcggttgcggttaaaggttctagaacaaggtggcaacaaatgtcaagaaactggggacagaactggcaaagcaatgcaaaacttaaacggtcaagcattgtcatttaaggtgactgctagtgatggtcgtaccgtcgtctctaacaacattgctccagctagttggtcctttggacaaaccttcaccggccgtcaattccgttaaaattgagtcaagttcggttttatatagttttagggtttgtgtagtagttggttgagtaaagagtagagaaagagagagggtttaaggctttttagggtttttaagtggagagccttgaaacttcttctttgactcttgaggggtaaaatggagaaaagagcttgtt

SEQ ID NO: 146365 - DNA, 572 bp, Arabidopsis thaliana landsberg
tgtgaccgggagtgtcacctctcttgtcttctggagtggattgaaagaagcgatagatgcccaatatgtgataaggtgtgtttcccgcttgagctttctttggcagatcgattgtcttgatgatcaaagaattgcactttactgttgggaattcgtatttagatcagggggggatggttgcgtaattagggtaaataaatgcacaatttggcaactaactaacattctgtcttctttaacacaggaagttgtgtttgatgatcgcttgaactagcatcattactatcccctggcttgaaagtttgaaggtgtggcgctttgtttggttagtctactacataattagcatacatctattttgtttcttcctcacacactttaagtgttgggtctccacatttccacttagttttgtcgtattggttatgttcgttttgcccttgtgcgatcatatagatatacataacaattgtaaatattacctagcttcttgttcgttcgtttgtgatctccggggtgtgatagagaagaaaggaccaccatttcagtattttgattgtttgcatcttcaa

SEQ ID NO: 146366 - DNA, 966 bp, Arabidopsis thaliana landsberg
tctcaatcctctctctccaatggcttccttatccttcgtttcctcttctcaccttacgctacgcactccttctattgccctacgcagcactggctcttctcctcgaacctccgtttcattctccgtcaaggctcaatccgtcgcgctttcacaggacgatttgaagaagctcgcggcggagaaagctgtggaggcaattaaacctgggatggttctagggctcggaaccggatccaccgcacctgtcgctagagatcagatcgggaaactactctattccggtgaactctacgatattgtcgggatcccaacgtcgaaacgaacggaggaacatgcacggtcgatagggattcctcttgttgggttagatacacatccgagaatcgatctcgctattgacggagcagacgaggtagatccgaatcttgatttagtcaaaggtcgtggaggtgctcttctccgtgagaaactggtggaagctgtggctgacaagtttattgttgtggctgatgataccaaactcgttacaggactcggtggaagtggattagctatgccggtggaagttgttcaattctgctggaactttaatttgattagattgcaagatctcttcaaggaatttggatgtgaatcaaagcttagagttgatggtgatggcaagccttatgtgactgataacagtaattacattattgatttgtattttaagactcctttgaaggatggattcgctgcggctaaagagattgggaagtttcaaggagtggtggagcatggtctgtttctcggaatggctacttctgtcattatcgctggaaagaatggcgttgaagttatgaccaagtgaggttaaaagttcaatctttctcttcttctttgattgacaaatttttctcctttgtaaaattatcaattgagtttttatgtgagatcatttcaatttcgtgaattcgacaaaatcag

SEQ ID NO: 146367 - DNA, 472 bp, Arabidopsis thaliana landsberg
ggttccagataatatggattcaacaccagtggacaatgaaacagagcaggaacaaaatggatgggacaaaactaagcatatggataatctgactcaacagatgggtctcctctctcctgaaaccttagatctctcaaggtaactaaagatcaactttagtagttgtctatcaaactctaactattcaagtttaattgcttagttatttatattatgtttatttcactcaggcaaaatccttgattttgggagtttttaaagtcttttgaggtaacacagtccctgagagcagcatattcatttttcatacgctgatcttttatttcttctttcttgtatcaaagtggtttaacattactgcttcatacaactctcaattttacacaaattctctatcaatatgagaatctgtgtcatgtttcagtctcttgtttgaacttttcgcttattttgcttgaagaagagcaatgcg

SEQ ID NO: 146368 - DNA, 182 bp, Arabidopsis thaliana landsberg
aagagaaagtagagatgaggtttattaaaataatcatcaactgtttttggcggacatatatatattctcaaacaagactataacattaggaagttgtagggaatttcaaagcttcaaatgatgttttatatacactgttccttctattaatacaaatagctgattcccaccaacctctcttc

SEQ ID NO: 146369 - DNA, 862 bp, Arabidopsis thaliana landsberg
tttcaccattaaaaatcccaaagagtctggagaaatgggaaagattcttcatcttcttcttcttcttcttaaggtctctgttcttgaattcatcattagtgtttctgcttttacttcacctgcttcacagccttctctttctcctgtttacacttccatggcttccttttctccaggtatctctctcttcctctatccatgcttatgtttttttttgtggattgatctgtgttttagtaaaccaatgaaaatctgacttttaattatatacgtaattgctatttttgagctgctgaatgagtgaattgctatcttctacgtatctctttatcagttattctgaaaattccttctcatctagatccctttgggataattcagaaattagatacagtgagaagattagctcaagcgtttgatttctgatttcagggatccacatgggcaaaggccaagaacacaagttagatgcacacaagaaacttctaatcgctctcataatcacctcatcttctctaggactaatacttgtatcttgtttatgcttttgggtttattggtctaagaaatctcccaaaaacaccaagaactcaggtaataatcatcttaacattaagaatgagaacaaatctgcaaaactttacatttgtaacaagattctgtatcagtttcttcattgtgatctctctgttttgatatctaaatggcttcatgcggaagaaggtgagagtaggatttcattatccaagaagggctttgtgcagtccttcgattacaagacactagagaaagcaacaggccgcttcaaagacggtaatcttataagacgaggcgggttcggagatgtttacaaggcctgttt

SEQ ID NO: 146370 - DNA, 884 bp, Arabidopsis thaliana landsberg
gcaacaagctttgcaaccaaataaaatctcaaaaacccagaaagcgagtggagaagagagagctgatatgctacaatagaaatggcgagtggatgtgctctacatggtggttgtcccagcgattacgtcgccgtcgcaatttcagtcatctgcttcttcgtgtatgtgttcgagcttaaacatcccatttttgggttttatttttgaagatctagatttttcatttactgggtttgcttgttgactcttgacttgagtcaaaatctcgaattttgtgtctttaatcgtttaaaattttcatacgatgtctctctttgctattttaactctttgtattgtaagtgtttgatgttatgtatcaaaagatctgtcttttgtttcgtttcagtttcttttagctgggaattagatggtttcagtatcttgatagcaagattcatatattatgtcggaatcgattattgaacttagatttgaagttcaaaagcttgatttaatggactaattgagtggatttgtatcatgagttaacttccaagtagttcaatttctctattaagttgattctatctgatggatttcactttgtttatttaggctgttatcgcgctcagtgttaccgtgtttgattcataaggctcctcgtactaacagtagcagtttctggatccctgttattcaagttatctccagcttcaaccttctcttctcaattatggttagactacttgacttgatgattccgttgctcttaagaatcacttcatttgttgagtttctacactaatagactgttttatatttaattttcagatgtcagttaatttgcttcgattcaggacgaaacattggtggcgatattgctatctttgggcaggtttgtt

SEQ ID NO: 146371 - DNA, 607 bp, Arabidopsis thaliana landsberg
gcatcaccaccaccgcctcatcagcacacttcgggttcgcattctggaccattagactatagccacaacccacaaccatcatctctcgcggctcctcctccagagtatcacagacattcttttgactaccaaccttctccttacccttatcagccccaaggtaactttggtgcttatggtcctccgcctcctcactattcgtatcaagagccagctcaataccctccacctgaaactaaaccgcaagagcctctgcctcctccgcagcaaactcaaggttttcaagaatatcgtaggcaagattgtctcagtaccgggggaacaggtcatgataatgtaagcaattctggatcttcttatcctcctgtggatgaacttctaggtggtctgcatatttctactaaccaaccaggtccctcagttccacaactatcctcccttccttcgaactcttggcaaagccgccctggggacttgtatggttaccctaacagctcgtttccaagtaactctcatttgccacagttagggagagtagattcctcaagttcttattatgcatctaccgaatcgccacatagtgcggatatgcagatgacactgtttg

SEQ ID NO: 146372 - DNA, 425 bp, Arabidopsis thaliana landsberg
aagaaacatcgaaacagaaaaattaaagaatatttcaagaaagtaagaaacaatgaataattttagtattttatataataatgctttatgtcgtacaaatcaactacaaaaatcaaaataaaactatataaaaactttgtgggataaaacaatttctttctctttgcttttgatatgttttttactcgctgtccctaaggctttcactggtgagccaaagtttcttctggacaatgaaaacgacattgttctcaccatcttcactgtcttggtcgagttctgaacttgtatttaccttctctgatgccacagtctcccaatgcagagcctgcaaatacttgttgattgactcaacaacactctgcttatctctgatgataacgaatccccgatgtctaagaatccgatccatctcgatagtagat

SEQ ID NO: 146373 - DNA, 190 bp, Arabidopsis thaliana landsberg
atgtacgctgctgtgtgtaatgtgttgtatgatagtgtctgtataggtttgctagacaaaccgaagattgtttccatgtctgggagtggtcagatatgtttgccattttacaattctactgaagaaactattgtagttagtaacactgtcttagagtctatctaactaatgactctttgatgttatgtta

SEQ ID NO: 146374 - DNA, 508 bp, Arabidopsis thaliana landsberg
tgtaggttgcttatttgctttttctttcatatcttttcgttaattgttgttgttatcttcaacgatagcgttgtgctctggagaagtgtttgatcgcagaaaagcttcgttctttgtagtctacaggtttgatcattgagttcttaacttcttttttggtttgattgcgatcctgtactttcgtttcgattacttaaaggttgggtctttaacatgatcgactgatagatttgtgggaattttgataatctgagttccagagtttgggaattgatgatttgatttgagtgttaaatttgttttgatggttgtctgattggtgtcacctatttgttatgtgtgtgtaggcgtggaaggaatggcaaaaagctcgttcaagcaagagcatgacttaggtttggatttgaactttgttcttgctttactgtttggtcctcgaagtcaaaaccttgctttgatctaatgatcctgttttctaaatcttcagagaagagaagggcagaggctg

SEQ ID NO: 146375 - DNA, 253 bp, Arabidopsis thaliana landsberg
ggaaaggtcatttgcctgagaacaaacctttcgttgtgaaggctaagcttatctctaagactgctgagaagaagattaaggaagctggtggtgctgttgttctcactgcttagttttttttttcaattcagtctctttttaatttatttcatgttattgaactcagctttgttggattttggaatcagagatcttttaatctatggtattggattatataatttgcttcgtattatttggaaattttgggatt

SEQ ID NO: 146376 - DNA, 100 bp, Arabidopsis thaliana landsberg
atcgtacttgtcgtacttcttacagatcgagtcaactctagtcagaatatcgatcacagtcatcttcttccaaatctatcacaagaagctcccagatctg

SEQ ID NO: 146377 - DNA, 65 bp, Arabidopsis thaliana landsberg
atgtcactagcccatacatagataccaacaaccttcatgccacccaacagcattctcgatacctg

SEQ ID NO: 146378 - DNA, 399 bp, Arabidopsis thaliana landsberg
gttgagggagcttcctgctgtagagcttactactcttcccctaatactgaaggttttataattctacactgaccctatacttttgtgatgttttatttctttaaaacagtattctttacctatcccatgtctggggaaaagtgcaaaatatttatgaaggcatcattttattgttttcgcctctcgaatgttttgtggtgccttttttccattattattggcctttttactgtctggaggattaatattatttgacaaatctacttctatccatttgtgactcccagaattagaatggtctttctcactgttatatttatcctctcagtgtgtatcagtctgtggaagtttcttgtttactaataatgtctatttatgctctgaatttgatacctggga

SEQ ID NO: 146379 - DNA, 401 bp, Arabidopsis thaliana landsberg
attatccatgttggtgtgacttcccttttacatatagcatgtaagtctactaaacttattgaaatctaaggtttaccggttaggcggtttctcaattcctataaacagcttgctcttgatatggattttggtgcccaatctgtttctagagcttattgtttcaacatgtttcatgttcttgcaggtgtataggtttgaatagagtaaaagtgcagaaccattcttttaaccatcgaaaagccaaagagatgggaaaatttttggtatagaatataaatcttttaaacattatagaatcattcagtttgtttgtttctgtacataaacattttcgatcttgctccattgtaaatttaccccaccaagtttgccaaatgagtgaaagtgtacagtttttttct

SEQ ID NO: 146380 - DNA, 278 bp, Arabidopsis thaliana landsberg
ggtctcaaaagttacatctttttttctatgcaaatcttataaattcattttgccaagtcactgagatttttctttgtatagatgaaataaaccaaataaggatcctttggttaaatatattacaatgaagaagagccagagatgttgctctgcaactgaatagtatcttgagtagcaacatcaattgtaccattgaggaaaccagtgtaccaagaagcagagagctttggagtcctcttgcgaccaggatcgctgaaattcacatagtacattccgaa

SEQ ID NO: 146381 - DNA, 591 bp, Arabidopsis thaliana landsberg
gattaaggagagggagaagaaaacgggtcagcaagaaggacaattagtccaatgctccaactcttcttcagttcttctgcctcaatactgcgtaacctcctccaggtctcgtctttctctctctcagtactagtccaaattagattaagaggttgattaattgtgccatgtgcatatatataattcaaatttgtacatgtatatctatgaatgattctgattaatttaattttatgggcagagatggctttgtggagagagttgggggagagaacggtggtgcatcgtcgttgacggaaccaaactctctgcttccggcttggatgttacgtcctaccactacgaacgagtagaactatctcactctttataatataatgataatataattaatgtttaatattttcataacattcagcatttttttggtgacttatactcattattaataccgatatgttttagctagtcatattatatgtatgatggaactccgttgtcgagacgtatgtacgtaagctatcattagattcactgcgtcttaagaacaaagattcatatcttggtaatgatttctcatgaataattaat

SEQ ID NO: 146382 - DNA, 192 bp, Arabidopsis thaliana landsberg
gtgttgattcgttcgacgttttgtctcctacgattcgtagagcgtttcagttttcgatttctccgtcgtctaactcgccgccggtgagtccacgaggtgactcggactcgtcgtgttcgttactgagtcgttcactcgggtctaatctgggaaacgacgtcgttgcgtctctcaggaatctgcaacttaata

SEQ ID NO: 146383 - DNA, 235 bp, Arabidopsis thaliana landsberg
agcctctctgctcgttttgcgtttccgagcaacaatggtgagtcgtttgtccattgttcgttcgtttgtcctttgttcgttctagtcagttttttttttaatatagttctggcgatatttgtatttatatgttcgagtttcctggttttgattattgcagtcggtaactttgcacacgaacctgggtgacatcaagtgcgaaatcttctgtgacgaggttcccaagagtgctgag

SEQ ID NO: 146384 - DNA, 362 bp, Arabidopsis thaliana landsberg
aaaatttcagatgaaaactttggaattagctttacctccatctccaccgtctttagttccttcttttaactacaattccaccgcacgaagcgtcgggaatgatgtcagaaccaacttcgatgttcaacttcttctaaggaaacctaaacaccaaaaatcagaacctgtcgtcgttattcaacaacctcagattcaaccgcaaaatccaagttctcgttgttctacttctgatattctcagactaatggattctctttctttaccaggaaacgaagatatttactcttgtcttgccaaagaatcagccagagaaaacgatcaacgtggagctcacgagctacaagtgcatatcatgaagtctc

SEQ ID NO: 146385 - DNA, 1096 bp, Arabidopsis thaliana landsberg
gagagaaagaaagcgaacaagggttgttgtctgagacgacgaaagctatgggtctagaggatgctggagatttggttctccacatcgtcttatccaaaatcggccctgaaaacaccgcgagagtggcttgtgtcagtaaacgccttaaggtctccgcctccgaggaatctctctggtctatcttctgctccaatgatcttaatatctctactcctctcgatccccatggagatcctgctccttccatcaaggtcaattgcactcttttcttcttttcacattttctagggttttgattgtttagcgccttagaatttgccctgaatttgagactaccttaaagtaaagatttttttcttaattcatcagagagcatatcaattgtggagggagtcatttagaatgtatccttggaatctggttaaaagagttagactttgttgggacatcctcaaacaatggttgaccttaaacttccctgaagcaaaggcaacactgaggaaaggtgtcacagaagatgatcttcaagaattcgagacttctctcaaagtgaaacttcctttgcccacaaggcttctctaccgtttcgttgatggtcaagagctttcttcccccaatgggcttgatggctctttggggcttataggtggctattccgcttattctcatgacgttaatgtctacttgctacctcttaaggaagtgatgagggagacaaaggaaagtttcatgcgcgacctcggtttctcgagtagattagaccttattgttatggctgcatccgtagttgccagtctgaaaatatttttattagactgcacaaccggacagctttttactgggacaagtaaccgccaattgcttccttgtgtacccgatgctttggttagatcggttcatgataccaacggcgatcagcaacaggatgccatgctgctttggttggaagaacatggccggcggttacaaaccggcattataaatgtccgtcaacagaacaatgtcaagagtatcagtttgttcccggagattcctcccttgtgttctgtccccgtaactaatggtgtgcaggtaaagcaatgtgttattcagtttt

SEQ ID NO: 146386 - DNA, 260 bp, Arabidopsis thaliana landsberg
aatgttgtttattgtgtacatattatatatgtgacatctcatgtataaacaaacaataatataaaggaatttttttcgtctgactacatataattgtgatttaaatacagtggtcatatatcaaaaattaaatcgttaataaaatagattttttttaaaaacataactttttaatcacaattttttttaatcactaattacacgccgttgaaaattggtgatttgtcgtaaaatggttgtaaggtccaaaactcaaatgt

SEQ ID NO: 146387 - DNA, 334 bp, Arabidopsis thaliana landsberg
cattaatacaacctcacgaagaaaaccatttgttttcttagagagagccaagaatattaaaagagatatagagaaaagatttgctttaataatgccaacgtcgatacagtttcagagatcctccaccgccgcagaagcagccaacgccaccgtaagaaactatccccaccaccatcagaaacaggttcaaaaagtgagcctcacgcgcgggatggctgatgtgccggagcacgtggagctttcccacacgcacgtggttggtccttctcagtgcttctccgtcgtggtacaagacgtggaggctccggtttccacagtctggtcgatcaaaggg

SEQ ID NO: 146388 - DNA, 144 bp, Arabidopsis thaliana landsberg
atgaaaacaaaaactcgggtttgtatcgttctcgttatctcttatcaaacccaaagggtcctgaatttagagaacaggtcataaaactctccgcttaaattctttcattttcgagttgtctttttgcgttgttatatacaattc

SEQ ID NO: 146389 - DNA, 279 bp, Arabidopsis thaliana landsberg
atcaatccactcactcactatacactaaagaatcttgtgaattatcaatattcaagcagcagcagcaactttctttcccccctgcttgtagtaaccaagataccatctcacaaacttctttagaccagtctgcaaatccgtgcttggtttgtacccaaactctctctgtgccgaactgatattagcatgtgtgaagggcacatcaccattcctcggcagcttcatcatgttcctcttggctttcactttcaacaatctctccaatatactcacaagatc

SEQ ID NO: 146390 - DNA, 507 bp, Arabidopsis thaliana landsberg
ggaacgccttatatgctgtgcatttggactatggttcttctccagttggtacgcggatggattacctatcagagtttacagtcactatgcccatattgagtttcattgggacaaatgatcctccagaagaacccattgttaaggtttattgtgttcagactctagcaatccagcagtatacattagacttgtgcttatgcttgccaccacctatagaaaatatgggtttggagaagtcaaattctagtgtatcacgagaggcaaatcttgttgaaggcatgtcagaaccatctggacttaaacctactgacttaccttcagttgattcagtgccaaaaccttcgattatagtgaatagatcagaaagtgctaataagttgagttttccatcagcggaagccacatcacaagcaattgttccacccaacggtgaacctaaaacttctggcctgccatctcaaaccagtggtgcaggttctgcgtatgctactttaccccaacttcctc

SEQ ID NO: 146391 - DNA, 344 bp, Arabidopsis thaliana landsberg
gggaatgaggtttgtgaatccttttctggaaggacttgtgcgtatacttgctaggattacttttgttttcaacaaagaggctcgggccattaacttttgccgtgagcacgatgttgcgtcactcttccttcatctgctccaatccaacgggcaagataacatacagatggtgtccgccatggctttagagaatctttcactagagtctataaagctgacacggatgcctgatccgcctcctgtgaactactgtggctcgatcttttcgtgtgtgagaaaaccacacgttgtaaacgggctgtgcaagatccaccagggaatatgttcattaagagaaacatttt

SEQ ID NO: 146392 - DNA, 349 bp, Arabidopsis thaliana landsberg
taggaaacctatcaattaatgtcctctaaagtgtggtgtctctttcttattggcatgagatttactttccaagggatgaatctacattcacaacaatatacatctattcatatttataaaatttattactgcaaaaatatacaaaattttgaacataaaatatgaaggaaattgatagattaaacaaattaaaactacagcaaacactaagtaaataatcttctcaaaagttataaaacaatttgtactataaatagaggttgatttgtgtacacataactataagaatcataattgtttttttatataaaacaaagtttgtatttgtaggattttattaatgaagatt

SEQ ID NO: 146393 - DNA, 291 bp, Arabidopsis thaliana landsberg
ctcgatcgtctcatcatctgcgacgaaattcatcactcgctctctctctgctcggaacgattccctcttcgctagctttatttgattcgtatttgtctgatttcgtttaatcttctagatcttttaatattcgtttcttttatcatcgcttttgtgtgttttgctctgttttcttgtttttgtttggtgataatggatgcaggtatgaacaacacttcttctcactacaagacgcaggctcgttgccctcttcaagaaccctttcttcccaggaaaccttctaaggaaaac

SEQ ID NO: 146394 - DNA, 205 bp, Arabidopsis thaliana landsberg
tatccataacccgttactccgcgccgtttcacggtaagtttggcttgtatttgataagatcatattgtacattcagattgtaacacttaaatcgtaattatatagtatgtactgatcataatagtgatatgaactgttggaaacataaaggggaatggtgcgtgtaggtttgattcaatacttgttgttgtggccttgaggaccc

SEQ ID NO: 146395 - DNA, 152 bp, Arabidopsis thaliana landsberg
agggatatgacaaaccaacattgatgaggttcctggtggcaagatcaatggacccagtcaaggcagcaaagatgtttgtagattggcaaaaatggagagcctccatggttcctccaactggattcatccctgagtcagaagtgcaggatgaa

SEQ ID NO: 146396 - DNA, 359 bp, Arabidopsis thaliana landsberg
tttcttctttttttaatcccatcaccatttttatatacaaaacctgtgattttatctcgttggagtcttcaccaaccataagacaactaaagacactcaaaatatattttaaagaaaaaacttgcgataataacttaactttttatctgggaagatctctgaacaggaacaacggagtattcacattcttcctctcctcagttcccggaaatgagagtgataacgacagagaagctgccacttcggcgtcatcttcttcttcttcatctgctttctgtttttctttattcatactattattactttgttcaccagagttgctacttctgcttaagaaaggtaatagtcccattgttgcg

SEQ ID NO: 146397 - DNA, 419 bp, Arabidopsis thaliana landsberg
tggattagaaggcccttggacatggttgttttactctttgcagtaatttattgaaattgtaacaaacgagagaagtaataatgatccttattcgaaaaaaaaaaaatgatccttatttgtgcttgacacaaccaataaaaatatatgcaactccatacgaagggaggaaacgcccctatgatggtttgaagacctaaaatattggttgttccatcttgaagttgaagaatccaagcaacactagacgtttaatccttttgtttttaaggaccatcagtataaaatgtgaatattatggtttgtaaatcacttgaactatctctactctgacaatccactcaagccttagctatgaattagatctcactttttattgaccgctaaatcatgtatctccaaagttgttcgatcgatgactt

SEQ ID NO: 146398 - DNA, 459 bp, Arabidopsis thaliana landsberg
ggctgttgtattggacaaggagcaggttatagcaacagtgcagtcagagccaaagactgatttgaaatcagcttttctatacttctggagttcctctgtcatctgtgctgttcttttgtctgtatatgttgtagttcatatgctgcactgtgagcccagcaaaatccaagggtttgaattctatgggcttgatttgcctgatagttttggagagctattcagtagtggaatacttgttcttcttctggagcgtgtttacataatgactgtgcacttcgtacaagctagattacatcgaggcgagtttctatttaaataacaccttcggccttgtattgcttgtgcagtccaattgacgtctttttatttttaatttttttcaggaagagatcagggagtcaaagcaaatggtaaggggtggattctgacaatagctttaattaagggaacaaatttggc

SEQ ID NO: 146399 - DNA, 277 bp, Arabidopsis thaliana landsberg
ggtcatcgcaaaacatattatcttgtattatattattgcgtttcacgttgacaaaaaaaatgttagatggcatagttaattactcgtagcagtttcgacttcaactctattggccaaaaacgcatcaatcaaatccgatgctttgtgagtcacagtgactgtgttctcctctcttgtctcagtctcgcattgtgcgttgggtcttgttcttgatttgacaccaactgtttcagcttggtcagagaacatgacctctgagacgtgtgagctgcaaatc

SEQ ID NO: 146400 - DNA, 539 bp, Arabidopsis thaliana landsberg
ctgaccttaacatctctgcaccagcacgaaccaaagcgttgtttttattcctcatcgccggtaagagattattgatcatgttattatctccggtgagcagaatctcatttccgacagagatatacttaatcttcgtctgaggatgaaacggcaaaatgttaaccgaaacccaccgacgagcttgtcttccgttagccaacgccggaatatcaccgttaggaacggtgacaacgacggagataccagttccagcgaaggcacgtaggatatcgggattcacatcgaagatcttgacgctatcaatcgaagtttgtgtcttgataaagttagccacctgagtcggtggtgggaggtttccgagagttccgtagttaacaccgatggcggagatcacggcggggatggtgaggaatacggcggcgcagaggaggaggagaagagagattgacggtggcgctttggccatctttttatatttcggaaatgagaaaaccaaacgattccaagtgaaacccgtgaatcgtttgagttgtgttttt

SEQ ID NO: 146401 - DNA, 306 bp, Arabidopsis thaliana landsberg
gaatcttgggtttccatcgtcttcaatcttaggcataggaggaggtgtacgttgatactgacgtgccgccatacctttctttcccttagcttccaccacaaaaaccatccgccgctgctgtaccgccgtctctcggcatgccgttcttgagctaaacagagagtgtctcgctaaaccaacctcttcgaatcttcctgtgttcttcagaggaagccgagttaacgcattcaaagacatactcacttccattactcaccagagaagattcactcaccactagtttgtttagaaacgagagattatttg

SEQ ID NO: 146402 - DNA, 406 bp, Arabidopsis thaliana landsberg
caaagcctttataactctttctggggtttttaattctctcaacgaacaaaaaaaaaaactcaactaatattctccatcctctttcttcagatttaagagaaaccttatcgttatattctctcttctcttttctttttgactcccacaagaagaaagcaaatttctttttctcaggattgcttgaaaactgtagaaatctttaaggtttttttacaccaataagagtcagagagagagagagagagaaagagagatctattcataaaaaagacaggtaatctcaactccgaggagataactgatataacaatttgagagaataagaagaagaagaagaagaagaccaagctaaagaatggttgcttttttatcagcttggccttgggaaaactttggcaatctcaag

SEQ ID NO: 146403 - DNA, 282 bp, Arabidopsis thaliana landsberg
aatattctttttgtcttcctttaaaatagtaactcgtatgggtctggtaggtccactttcacttcgtggtggataatcacctatcttatcaatatcgaacttttctgaattagaaggatcgtttccatcaacaagaagttcaaatagatgtcgtctaccaagattttcccaataaaacgaagcagccgcattaggaggaagaaattgccaagactcgctgacaccttccacttggcgatagcgaataggaagaaacatggaacggttttcgatcctaggaga

SEQ ID NO: 146404 - DNA, 364 bp, Arabidopsis thaliana landsberg
gactcaagaaatggaaaaaccctagaaaactttgcgggaacccccaaatatagaagaagaagaaacagaaaaatttcggatcaaatgaaaatcgaaatggaagtaggaatcagatgatatagatcaatgagggagaagaagaagaagaatgaagttagacctgagctgaagaagaagcttccattgaatcggtgatctcgagtcgtctgcgtttcaaggtgtgtagagaagggtcatcaacaaacatcagacccggttcaagttattctttacttgctcgctgcaaatccaccgtctatataccggaggcgcttttgttttaggtgattttcaatttaagcacagtatgtgttgttttttttac

SEQ ID NO: 146405 - DNA, 93 bp, Arabidopsis thaliana landsberg
aggagactctctggtcagagacggcgatgattctaggccgatgggtttccttcagttgcggaaacacgccggtgactaattgttccgaacgac

SEQ ID NO: 146406 - DNA, 978 bp, Arabidopsis thaliana landsberg
gtgagaacggacctgtcacctccattgcattctctgtgtcagggagacttcttttcgctggctatgcgagcaacaacacctgctacgtttgggatactctcttgggagaggtaagcaattagtatttgagtaatgagtggtgagagttgttttcgctcatgtaaggtttatgattgaaacgtgaggagttttcttgcaggttgtattggatttgggattacagcaggattcacacaggaatagaataagctgtttggggttgtcagcagatggaagtgccttgtgtacaggaagttgggattcaaatctaaaggttagtacttagtagtgtctctgcttatcatttaccatgttatgtttgtaaggaaattagaggatagatgaaatttcgttgaattcacacagatatgggcgtttggaggacacaggagagtgatttgaagaagatttaacgaaagtaggagtcacgtctccagttgttggttaatatattctgtagtcgggaagtaaggttcggtttgtggaaggtgtttggtttgaaatagtggagtggttagaagaattaaacttccctttttgtagtgtgctttgatttatttatttcttcattgggaactaaactccttcaacacgctactcaatgtgaattctgtaatcaattgtgtacccaccagtctttactttactatcatctcttcatattgaacgcagacgataaaacgctactatttttgagtttctaacttatggagaaagcctagcctgttgtacggtacggtagtggttttcaaatccgagcaagatgatctgtagattcccaacttggcgagaaaacgggtaataataaaattcagaaatgagaaatcaaaaagcaccgtcataaaataaaaagaaaacctccatagtgtatttgacagtaataatgcaaggaaaaaagaaagaaagtaatactatgctatttataatagttgatgtatt

SEQ ID NO: 146407 - DNA, 439 bp, Arabidopsis thaliana landsberg
  unsure (1)..(439): unsure at all n locations
agtcttctggctttctcctattcctctttctctctctctccttcaagttgctgcaatcccttgaaaacccaataaacccccaattttccatttctcataaagttcacatttttccttcttcttcttcttctgccaattctctgattccctcgtttcaatctccgttttgctttgcctatcagataaatttcttcttgctttcctttctatctcataacgataagttgaattaatctttgcgtcttagttcatcagtagagagagtagggttttttccgcttatttttagggaatttcattntgtttgaggtgagaatctctattcgagtccccaagattctctttatatccctagtttagttgtatgggtgggttttgattggaatatcaagggggtagttttagctaggttcactgatacttggaagatctgagttct

SEQ ID NO: 146408 - DNA, 689 bp, Arabidopsis thaliana landsberg
cttcgtcaatcgctttagggtttgattatatatatatagtgtggttagcaggagcctcccgggctaatctgataactaaggtacttgaagaagtaagccccaaagctcctgctagattatttttagcgtttgtgttgcagatttgccgtattccttaggcttttctgtgtcaaaaaagcgtctatatctctcttttctatgtatgttttgctttgagctgtgtttgttgatggtatcgatttggtatcaacgtttgtttatgtggcaatgattataaacttacccgcgcttctgagattattcaatgaagcagatacggtaaatacatggttgaatttcttaatatgagccaaagttttgtttttttttatatgggtttctgtgttttgattggctgggatgatgaattgtaacagcttgatacgccagttctgcttcagataattcttgatcgaaaaagctgtattcttatccgagcctttcattgctattttgtctttcttctgagttattatttcttgggaatgtcgatgaggatctaatccaatcttacgaggtgcagtggagctgagaccttgttttacagggagaaccccttggcagaagctgcaatttctttgacttcaatggattttactgagactttctcattcatttatcgtttttattgaaatctatttgagtttaaa

SEQ ID NO: 146409 - DNA, 742 bp, Arabidopsis thaliana landsberg
gatgtgtttgttccaatttctaagaaacctcgtgaagacgaaccaacccatgtacgcaatttttaatctttgttaccaaaaaatttgaattggtgatgctcgtgctcacgcatttttgttgcggattttttgttgcttaggatctaaaaatgagatctttcactttggtgtgctgattacagcttctctgtgtgctaaataaaccattttttcttctcttttgatgggtttttggtttcgttgcttacacatttatcgacccacataagttgtttgtgtaaatgtctcagagagactagattcaatgggttttaggattgagattgatgttaaactctttttatttctttttttaaactgatttttttatctcgaactctgtgattgcttaatttgtaaacttctttaaaatattattgtctaaagtattatatatagtttgccttgtaggttgcttgtttggaagcaaaactggcagttggggaaattcctcttttgagagaaaagcattcttcttctttaagctctgtttcatggattgacaatagctcaaggaataatggattacttatctcaagaggaagatttgcagtttttcgatgctaacgaagagatgatggcattgaatccaagtggttttggatttgatgtatggaatgattcacctggaagtgttgtggagcggcggaggaagttcttggagtggatgggagttgaagaagaagggcgtgttgagacgaag

SEQ ID NO: 146410 - DNA, 267 bp, Arabidopsis thaliana landsberg
gagaatctgaagaagatcgctcgaccggatcatttcttgcctgtgactgtgatcttggtttttgtgtttttggctttctttggaagatctgtagcgattatgtgtacttgtatcgcttggtacttggttccaacgattcaagaacagagtggaaacagaggatcatcaccgtcttacgcgatgaagaagaaagatttcgctaggaaattgagtattgaaaacagaacatcgtttaatccaagaactgttcgtgatcattctcctcgc

SEQ ID NO: 146411 - DNA, 159 bp, Arabidopsis thaliana landsberg
gaaacagaaaatgatgaactttatttagttggatcttcaatatccaagatcaacatcaacaatactgtgattatattatacatcaacaatagaacaatataaacacaaacttattactcttacatctttctttttataatcttttgctcccgagatttt

SEQ ID NO: 146412 - DNA, 225 bp, Arabidopsis thaliana landsberg
tttcatttgcaagaattgtcattgtgaggagttaaaaaatgatgattttagtgttaacgtgtgatgacattttttgctaatccactagcacaaatgaatcatatcagcccatcgatataggatggaatagttttttttttcttttgtaaaatctaccaaaccccgaaataatgttagcaaagacaaacacccttgaacatatccaatattttggtatagactcat

SEQ ID NO: 146413 - DNA, 426 bp, Arabidopsis thaliana landsberg
gaggagctgtggaagaaaggccaaaccccatgtttcattgcttgtactacactcgtcgaagggttgaggaaatcaggaagaacagagaaagcgtcagggtttatggagaagatgatgaatgcaggaattcttcccgatagtgtgacatttaacttgcttcttcgggatctctgcagttctgatcattctactgatgcaaacagattgagacttttggcatcaagcaaaggatatgaacccgatgagacaacgtaccatgttttggtttcggggttcacgaaagaaaggagaagaagggaggagaagttctagtgaacgagatgttggataaagatatgttgcctgatatctttacatataatagattgatggatggcttgtcctgcactggaaaattctcaaggaaacaagtccggatgttgtaac

SEQ ID NO: 146414 - DNA, 493 bp, Arabidopsis thaliana landsberg
gcacaagcgatggcctttgaggtctcttgtctgcagcttcagctcctctgcggcggagacagttactacttcaacggcagcttcagcgacggcggcttttccgttgaagcatgtgacaaggtcgaacttcgagacgacgctgaatgatctacgctcactcgtaaaggctgcagatttcgtggcgatttgacctttaaaagactggcgtaacaagcgctccgtggcgagtctccttagagttcgaccgctgcgacgtcagatacctcaaagtcaaagactccgccgagaaattcgccgtcgttcagtttggtgtctgtccctttcgttgggattctcgtacccagtcattcgtgtcctacccgttagtctctctttctctttctctttagcttcaattgtgtagctttgactaaacgggtctcgttttgggggcaggcacaatttctttgtatttcctcgtcaagaactcacatttgatccaccagctcatgaa

SEQ ID NO: 146415 - DNA, 131 bp, Arabidopsis thaliana landsberg
gtttcagtttcaagaactatgattccaaaaatatgtttggttttattctttcacatatgcactaattaacaaccaacacagagcctaagaagagaggaaaacagagcataaatgattgagaagaaataata

SEQ ID NO: 146416 - DNA, 199 bp, Arabidopsis thaliana landsberg
tttattaaagacatccacaaaaaaaaatatgtaattggtttggccctacttttgtattttgcaacaaatttgtgggaatcagtggagccaatcagttgcctccacgtcatcgtttgcacgccatgttagccaaaatgtggtcatgcatcacccatctaacaagtcaggtgtaatcgaagcatccgagatctcgtcagac

SEQ ID NO: 146417 - DNA, 275 bp, Arabidopsis thaliana landsberg
aggcagatttgggaatcaagtccctcccccattggcatatgctctaggtcgtaagctcaaagaagccctacatctcaagaagtctcctcaacaccatccctagataaccacccaaatttggcatttcctttttcaataatattagtcattatgatccttgtcttgaatgaaactcattggtgctgatacttttgataaagaaagcctacgaagagtttttgtatattccgtattcggattgaaaaatctcattatacaagcaagcaatgatgtct

SEQ ID NO: 146418 - DNA, 721 bp, Arabidopsis thaliana landsberg
accctgcacaaggttatgctccgccgcagtactctcaagctccgcagcaaaagcaaaacgccggtatgcttgaaggatggtacgttcttgatcccatcttttctactttatattaactttattttggtttcttgttttgctttgtatttaggttttagtggaataatactgtattagttaatatatgtctttgctctgttcataaatacgtcacagtttggctgcgctctgttgttgctgtctcttggatgcatgtttctgatcggaggatgattatatacgttgcctcagtcaacttttatttcctcatatatgttatgtaatgttcaacaatctttcttctgttgttatcttctttcaattcgaattttggtatcttatgttttattgactccgaccataattatctctctctttcataatccaatcacacgaattcgaaataaaccagtaaagaagtgatcagaaatcttgatgaaatatcaaaggagtgtgtttcatcatcatcatcatattattgtaataagtaaacatagccatggataatggttcttttcaaccaaaaagctcacagatgctaaaataacaaagaaacatgagaattaatatcaaatgaggtttcttcttttgctcgagaagaattggaagaaggtgtaacatcagttttctggttgaggattgcctttccacttgaagttgtccgagtaagacttgacctgca

SEQ ID NO: 146419 - DNA, 489 bp, Arabidopsis thaliana landsberg
gtcacagaaccatctgacaaacggtgtcaaatcagattcagacaacagtttaattgatgttttccgctggtcacgatgtaagaaacctctcccacagaagcttatgcggtctatcgggtttccactcccagcagatcatatcgaggttaacatttttctccaatttgactcttcttgttttgaaaattctttataaaacaaatgctgatgatgtgttgtggattttggaatggagtaggtgttggaggagaatcttgattgggaagatgtacagtggtcacaaactggtgtttggattgctggaaaagagtacactcttgctcgtgttcattttctctcccccaactaaaaaaaacctttcatgctttgcttctatcttacaaaactttttatattttatttatggattagagactacagttactttggcctatcttgtcttgtgtacttcttccttgtaacatttatttatatatcgtcagaaacatc

SEQ ID NO: 146420 - DNA, 74 bp, Arabidopsis thaliana landsberg
gttagtgcatcccagtcaatgtcttccacagctctgctgccactttcatcaaaaactttgctagcctcaaggca

SEQ ID NO: 146421 - DNA, 420 bp, Arabidopsis thaliana landsberg
atcgcgtctttagcatttgaccacactggagaactcttggccattgcatcaagccacacttaccaagatgctaaagagaagtaagtcccacactcttctcaattcgtttcatcatcacaaacactctcacaatacatcattaaaacatttgtatcaatatatctccaaatgttttgcagggaagaagctcctcaagtgttcatacacaggctttgaaagattcgtaagcttcttgaatctcagtgtctacttgtatctatcttgttatttttttgtgtgtttttggtagcacgttttagcttgatctcagaactgactcgtgtcaaccaacatgtaatgattgtatctctcacgtctctttatactacttgttctctaaactttgttttgactttttagtcaactatatgctttgacttt

SEQ ID NO: 146422 - DNA, 410 bp, Arabidopsis thaliana landsberg
ctaaactgtgttaggatttctagggcacagaatcggtctctgtcccatttcgcgaactttctccttagaatcggaacggacgaagaaggaagacaaggaagaagatcggagatggcatcgaatgcggcggttccgttctggagagcggcggggatgacatatatatcgtattcaaacatctgtgcgaatatcgtgaggaactgtctcaaggagccacacaaagctgaagctcttactcgcgagaaggtcacttctctctctccaaatgggctgatgaaagccccagaaacctggtaagccttttcgatcctttaatcgtcgatgttggatcttagatctggattcttcacgttcttgtgttctcgattcctgatttgtttttgagtaatttgttggaataatctgatttc

SEQ ID NO: 146423 - DNA, 1149 bp, Arabidopsis thaliana landsberg
gaattttatcagaaattgaagactctcagatgtcttctctgtcgcaatcgccaccaccgccggagatggatatccaaccgccggcattggttaacgatgatccttccacttattcctccgctttgtgggattggggagatctccttgacttcgccgcagacgaacgccttctcgtcgatcaaattcatttccctcccgttctctctcctcctctaccgcctctgattccgacgcaaactccggcggaatctgaattagatccttctccggaagaatcgggttctggttcggatcgggttaggaagcgagacccgaggttgatttgttccaatttcattgaaggtatgcttccttgttcgtgtcctgagcttgatcagaaattggaggacgccgagcttccgaagaagaaacgggttcgtggcgggtcgggtgtggctcgatgtcaggttccggattgtgaagcggatattagtgagctcaaagggtaccataagaggcatagggtttgtctccgttgtgctaacgccagctttgttgtgcttgatggagagtataagagatgctgtcgacagtgtggaaagtatgtcacttttcttggctttgaggataagaattggatttgataggtgaatccagcgggaactgtcttagttagcctcctatgcatcctcctgggatttttgtgtgtgtttgacttaggtgttgttcagatttgatttgcagcacaaaatgatcgaagatcgggatgggtttctgttgtctgtttgattgggatagagactttgaatctattgttaagaaattggataactttgggagagactgttgatcagtttgaatgatcccacggaatttacttagtctctttgttgagcataagctgagcttaacttctgtttagcagtattattgtttgtattaattctttcaatctatgctgttatccatcattatagtgagtagtactatctggcaggtttcatttgctcccggactttgatgaaggaaaacgcagctgtcggagaaagctagagcgtcacaacaacagacggaaaaggaaacctgtagataaaggaggtgttgctgcagaacaacagcaagtgctttcacagaatgataacagcgtcattgatgttgaggatggaaaag

SEQ ID NO: 146424 - DNA, 1188 bp, Arabidopsis thaliana landsberg
gcctttctgttcgatcagctcggttcaaggttcgaattgattcacaaaagtgctctgctttattttcctatgagagtcctttttattttttctgggttgtttttgttgttattgccattctggttttaaaattagaaactttctattgaaattgataactttcgttggtgatgtctgagaattcttaaaaagatggtaatagctgttacttagatatgtgtagtgaggttctgctcttgaattcaaaaagtgtagtgagttgtgctcttgaatatctcagctgcacctgcaatggagggactgaagccggcgatatctctgtcagaaaatgcacttaagcatctgagtaagatgagatcagaacgtggggaagatttgtgcttgagaattggagtcaaacaaggaggatgctcgggtatgtcctacacgatggactttgaaaacagagcaaatgcaagaccagatgattccactatcgaataccaaggattcactataggtaaaaactattccatcactatgtaggatcaactcttctaatctgagataataaggtctgagagtaagatcagctagtttcttgatgatgtagacttgccatacttacaatatgaatgtcagtttctgtgttcaagtatgcatccaaataaaaaaaaggctgagattgttcgatcaaataggctaaagttttagttttgtgttgtcaagtagatggtcagttgattctttttgatgtgcagcttgaattatatactacttagctgccgattcttgaactgagacttctagtctcttgttgtcttttgcagtctcgtgttgtcttctgcagtcaagtatttttacatctgtgaattgaaggctcaggtttttaatttgtactcacttcttttgcagtttgtgatccaaagagcatgctctttcttttcggaatgcagcttgattacagcgatgctttgattggtggaggcttctctttctcgaaccctaacgctacaaaacctgtggatgtgggaagtcttttgctgccgagatgtgaaccagtttcacacattgcagtagataaacaatatagttatagttaatagaaaactttgtattatggttgtagaatgctcaaacagaatctgtaagtttttttaaaaaaattgtatgatcaaaccataattttaataaattttaaaaaaggtt

SEQ ID NO: 146425 - DNA, 1606 bp, Arabidopsis thaliana landsberg
tctctctctctctctctctcgctctcatatttgcaggtaaagcttcgttgattcgtcctctttatgttcaattatagtttcgcatccctcctatgtctttctttctagatcttaaagcagagtcattgcttaaccctaattatcactgttcttgtataaaacacttttcacctaatcattgagattgttacgggatctgataattgcgtctgtgaattacaagaaattagggtttatttcttcttgattttagattgatctttttgcaggttgacaattcgttctctttgggaaattagagatgcaggtaaattgcttaattttttttttgttttgttgcaaattctctgtgtatgtttatgatttgatttgatttgattgatgtaataggcatcaagagcgcgactgtttaaagaatacaaagaggtacagcgagagaaagtagcagatcctgatattcaattgatctgtgacgataccaacatattcaaatggaccgctcttatcaaaggaccttcggagactccttacgaaggcggtgtttttcagcttgctttttctgttcctgaaccttatcctttgcaacctcctcaagttcgattcttgaccaagatattccatcctaatgttcatttcaaggtttgcatctctttttataacaaccttctcctgtgataaaaggaaacgcaggttttttagttagtacttgggaattttgtagacaggagaaatatgtctcgacattctgaagaatgcttggagtcctgcttggacgcttcagtctgtgtgtagagctatcatagcattgatggctcatcctgagccggacagtcctcttaactgcgactcaggtacaaaatgctagtttagtgttttcaaaaatgtaaccatgggcgttcgggtattcgattcggttcccgttcggttctagtttggttccgattctttctgttctcgattttaggatccatataggaaccgaaacagtttcagttcggttcaggttcgggttcggttctgaagtttaggatccattagaatattttatttcgaatatttcagatattttttgtctttttttccggatattttggtgtttttatatatttttccttatttgggtatttttgattattcaaactaaaaataactaatatctttggatatataatcatatttcggatacgcaaaatattttggttcggttcgggttcagttctaattactttggttctagaatttaggatctatttgagtagtttaccatttcgggtcggattcgggttgcttcagttcggattcggttctttcagtttgattattatgcccatgcctagtttttatagtaagcaactgttttttttttctactgacgcttttgttgtggttgctatggaaaaaagggaatcttctaagatctggtgatgtgagagggttcaattcaatggcacaaatgtatacacgcctcgccgctatgcctaagaaaggatgatgatgatgatgatcctcttgctttttttttgtttttttttttgaaatttgtaatgatattgatttgcgagagtgaatacattattaacgagaagaagatgattcttctttatta

SEQ ID NO: 146426 - DNA, 1507 bp, Arabidopsis thaliana landsberg
acaacttctttgagttttgtaatggcaacagatgatatgaattcagaaactaaaaaaacagaacatgggcaagggcaatctacacaaatcaaacaagaccttcctcctccgaccataccacctcttccacttccttacaaggtaagttatttagttccccttcatgcacataactataacatagtttcccacattttacatattatttttttcttatactcttcgactcaaaagttttgagttttttttttgtttgtactcgtagtcatgcaccttgaaagtttctattcactgcgaaggctgcaaaagaaaagtcaaaaaaatacttaccagcattgaaggtacataacataaaaaaattcacttatatttttttggttataagtaaaaatgttttgccataattcgttttgttttgtggttataggtgtttttaaagtggacattgatgtgaaacagcataaagtaacggtgataggaatcatctcgcccgagattctgttaaagaagcttaacaaagctggtaaaaacgctgaacaactgccggagatacccgacccggttgacaacaaacccaaacccgtcgacccgaaagagaagaacaagaagaagaagaaagaagagaaagtgcaaataaccaatgaagctacttcttccggtatagataatccggaaaaacccggttctggagagtgtgataaaccggaatctgaaaaacccgtcgacgaaaagtgtctttccgctgacggcggtgaaacttccggtcctgtgaaagaggaaaaaaaggacgttcttaaggagaaagattctgggaaggaaaaatctccgtcaccaccggcggattcttcggctccggcggcggagaagaaagctgaagacaccggtggagctgtccctgataatggcaaagttggtaaaaagaagaaaaagaaagggcaaagtttggctactactaacaatcctaccgatggacctgcccgtactcaatcacttcctccgcccactgcaacagattatgaccgtccaattaatcagatcaacgaccaccatataacaaccactaataatccgccacgtcacgatctgtatccttatcctgcacaaggctattatgcgccgcaagtcatgtatggcgtaagttataacgttgctcaacctccggtgagtgtagacgctgcgtcgtattatacacctcccccaccgtattcgtatgcgtacatgcacaccggttatcaaccgtccgatcaaaacccttgtcaacctcggccgtcagattcgtttgagttattcagcgatgagaatccaaacggttgtgcgataatgtgatgtcaaattaccaaaaggcccttgaactctgcttatacgccttgtatgacttaaggatggtttcgtaatttgaagttctttcacgtgcaagttagctcccggtgtttctagtaagctctttttaatcaatgttgtattagttttatcactatgattatgattatgttaatataaagattaa

SEQ ID NO: 146427 - DNA, 3866 bp, Arabidopsis thaliana landsberg
ctgatgaaatgagaagcaaaatatatggttggaatgattcgaggaggaatgggtgatcagaattggagtcgtttagttttctggttgattctgttttctgggttattggtaataactttggaagagaatccagaaaaagatgagatttttcttagtcaattcatggccccatcaacagggcaggtcaatgaacatatggtaaagatagtttttttgcttttcaagcttgtttgattattttgtagctctctagtgtacttttgatgggaaagttgcgagacattgctttttgtttcttgctgaaagctatgttttagagactgagattgcatttttgggtttgtatcatgttccctgtaagaatctaggtgtctgagaaagagaattatgatcattagcttgtatcctgctatataaagtcgatgggatttgaattatgtgttattcatgtaatagtcttgacttacgttttaatcaatggagtcatattcagagaacaatttgttgctgctaaagctttcagttcactcttgtcgctatcgtgatatttttgcgtttgtaaggcattcctatggtctgtgtgtgataaaactagaagatcaagtagctccgtagtagattttatccagacagaattgcgagtcatagcttgtttcttgctgaaaacttaggtttttagagacttagatcacattttttgtttttgattcatgttctctataagaaagctaagatcatctcagacgactcttgcaaaatagtttggattcgccatttgtaatcatacttggatttatagttggctctctcttatttactgctatgcttttcaaaatgttttgtagctcttatagttgtttctctcttgtttgtacaatgtttgacaggaagaaacatcatgggcgcagtgatgttggcaagattcagattgtgtgaaggaagctgtggcagcattcaatttatgttttccaggatcaaaggatagtagggaactatttggtttgaatcataccaatctgaagcagactcttcttgattgtatccaagaaaaaggaaagttaaatggtcataaccccaagtatctggagctcttatcatctatgcttgatattccgaggagaaatctagctactgaacctggctcttccccttcaccttcccgtcctcctaagcgtagtcgggggcctccgcgcccacctactcgaccaaaatccccacctcctcggaaatcatcttttccaccattaagatccccacctccgcgaaaatcatcttttccaccatcaagatctccgcctcctcctcctgctaagaaaaacgcttctaaaaattcaacttctgcacctgtttcacctgcgaaaaaaaaagaggatcatgagaaaacaatcatcattgctgttgttgtgactgcagtttctacgtttttgttggctgcattattcttcttatgctgcaccagggtttgtggaaatggttcaggaggcaggaaaaatgatgaacggcctcttctcagtttaagcagtagtgattactctgttggtaataatatctccactttctcactgtactaatctaacaagaaatttcttgaattatagagactaaaatgttttttaatgttttcaggttcctccatcaactatggtggttctgtcaaaggagataagcagggtcatcaatcttttaatatttattcaaaccaaggaaaaatgtcatctttcgatggaagtaactctgacacttcagattcgttagaagaacggctatcacacgaaggcctgcgaaataatagtattaccaatcacgggcttccacctttgaagcctccacctggaagaacagcttctgtactttcagggaagtccttttctggaaaagtggagcctcttccaccggaaccacccaaatttcttaaggtatcctcgaaaaaggcttctgctcctccaccgccagttccagcaccgccaatgccatcttctgctggtcctccacgaccgccccctccagctccgccacctggttctggtgggcctaagccaccacctcctcctggaccaaaaggaccacgtccgcctccaccaatgagtctgggcccaaaagcaccccgaccgccttctgggccagcagatgcattagatgatgatgctcccaaaacaaagctgaagccatttttctgggataaagtgcaagcaaacccagaacattcaatggtttggaatgatataagatcaggatcctttcagtgagtaaagttgttagctttttgcctcggtatactataaccatataactttggcatagttactgaataacttgtgatggttttccaggttcaatgaagagatgatagagtcgttatttggatatgcagcagcagacaagaataaaaacgacaagaaggggtcctctggacaagctgctttacctcagtttgttcagatcctcgaaccaaagaaaggacaaaatctatcaattcttttgcgtgctttgaatgcgacaactgaagaagtgtgtgatgcacttcgcgaaggtaaccttcttttctttctttttccttaggtggaaaataagattttgattttctggcaacattctcctatgtgttcgctaacataattttcgttgaattaggaaatgagcttcctgtagaattcattcagactctgttaaagatggcaccaacaccagaagaagaactaaaacttagattatactgcggtgaaatagctcaactgggatccgctgaacgattcctgaaagcagtcgttgatatcccttttgctttcaagcgtctagaagcacttctatttatgtgtacactccatgaagaaatggcttttgttaaagaatcatttcagacattggaggtacgtttcctaatcttttacaaaaactttgttctgaaaagaaaaacatattacagtttcttagtctttctcaagactctttcttctccaatctaaacgtatattctttggtgtatatgaaaggttgcttgtaaagaacttaggggaagtcggctgttcctgaagctcttagaggcagttcttaagaccggaaaccgaatgaatgatggtacatttaggggtggtgctcaagctttcaagctggacactcttttgaaattagcagacgtcaagggaacagatgggaaaacaacgctcctccactttgttgttcaagagataattaggactgaaggtgtaagagcggctcgtactatcagagagagccaaagtttctcaagtgttaaaacagaggatctcctagtcgaggaaacctctgaagagtcagaagagaattaccgtaatcttggacttgagaaagtttcaggcttgagcagtgagcttgaacatgtaaagaaatctgcaaacatagatgccgatggtttaacagggactgttcttaaaatgggtcatgctttgtcgaaagctcgagactttgtcaactcagagatgaaaagttcaggcgaggagagtgggtttcgtgaagcgcttgaagattttattcaaaatgctgaaggaagcatcatatccatactcgaggaagagaagagaataatggctttggtgaaaagtacaggggactatttccatggcaaagcaggaaaagacgaagggttgcgtttgtttgtgattgtgcgcgattttctgataatcttagataaatcctgcaaagaagtcagagaagcacgaggaagacccgtaaggatggccagaaaacaaggctcaacagcctcagcatcttctgaaactccaagacaaacgccttcattagatcctaggcagaagctgtttccagctattacagagagacgcgtggatcagtctagttcagattcagactaaaaagtacaaatctttggt

SEQ ID NO: 146428 - DNA, 1404 bp, Arabidopsis thaliana landsberg
atggttaaagggaatgaggatcacccaatgctcttatctttgtttgatgctagtttcataggcttagtgaagagcttggaaggtaacatcagagaaagaatcgtggatgtgtatagtcggccaaaaagtgaggtggctgtagtaccagcagatttggagcagaagagcggagaaaatgagatagactacatcaaccgcttgaaagcctttatagagaaacagtgctcggagattcaggtatgtgcctcttctcaactgtctatgcttctgagtataatacagttagcatatctgaaaaaatataccattttggtgttgattgcaattaaaagaagaaaattctccagccccttcataagtaacatgaattttaaaaatagatgggattctgctaaaatatggggattaggaagcattgcttcatggtgaaacgggaatatagaaagcactaagtttctgctaagatgggattatgaagaagtgggtcttatgttctcagcgggatatcagacaatatccatacaatagatctctgaatttatgtgataaaatttatatgttgaggttaaccgttcaaagaagatctcaacatcagttgtacctgacagagattcttgttgttgtcacttctgtgttttacagaaccttcttgctcgaaacgctgctttggcagaagacgtagctagctctggcaggaacgagcaacctcaaggatcagagcaaagagcaagtacagtaatggacaaagttcagatggaaagcatcagacgagaactccaagaaacatctcagcgtttagagacagtgaaggctgaaaaggccaagatcgagtctgaggcatcaagttacaagaacatggctgcaaaacttgagttcgacctaaaaagcttatcggatgcatacaacagtctagaacaggcgaattaccatcttgagcaggaagtgaaatccttgaaaggaggagaaagtcccatgcagtttcctgatatagaagccattaaggaagaagtgagaaaagaagctcagaaagagagtgaagatgaattaaacgacttgttagtatgtttgggacaagaggagagcaaagtcgaaaaactaagcgcgaagctgatagaattaggagttgatgttgataagcttttagaggatattggggacgaatcagaagctcaagcggaatctgaagaagactgaccattgaacaagtagtagagattctatatcctctaaaatgctctctcatcaggtaatggaacttgtacagtcttgggtggtttattttgatgtttgacaattctctttgcttaatcttttagttataactctttaatttatctaccaaacttcttagattgcttgaaacatacacatcttaacaatgaaacacaatgtggttttaagtta

SEQ ID NO: 146429 - DNA, 1324 bp, Arabidopsis thaliana landsberg
ggtttttgggtatagaggacgaggaatgttttattcgcagtttatattagctaagaaaggccctcttgggacaatatggattgctgcccatttggagaggaagcttcgaaagaatcaggtcgctgatactgatattggagtctccgttggtgagtattttgctaccttttgcttttgtgtacaatacctctgattcaggtctcactactttgagctcattagggttagcagaagctaaagtttccttctttttcagtggttatgtggctaaacaagttcatctaaaatatttcctaatataactaatttctttttctgagcagattctattctctttccggaagctccgattgcattgcgattgtctagtcatcttctgcttggtgttgtgcgtatatattcgagaaaggtgaattacctcttcgatgattgcagtgaggcattgcttaaggtaaagcaagcttttcgctctgctgctgttgacctaccccctgaagaatctacagcgccgtatcactctattacgttgccagagacatttgatcttgatgactttgagcttccagacaatgagatctttcaggggttggtttctttatgttttaacattcaaactcgtattccactcttactccaatttgcataatttgtttatttgttgctccttgttttcctgtctagcagtaattacgttgatcatcatgttagtacaaaagagcagatcacccttcaggataccatggatggcgttgtatactcaacgtcacaatttggattagatggtcagtggttgtttcatatttacttgtctttagtttgtagatagctatgccgtagataagcaaagtcattttaaaacttttgcagagcgatttggtgatggcgacacttctcaagctgctttggatcttgatgaggtatttttgtgtttataatagatattttctactttgttcaagtcattttggaacaagaaataggatagccatatagaaagctgaatatgaagaggttatctgtagatttcatttgcttttagattttgggttctttctctcctctgtttgggtagacgcagcagctggaagctctgattggtatccagttgcggagtcctagaccgtgaaaagcttgtaatttgaagtgttaattgtagggtcaggataatgttgatgttttctttttctagtgaagctttgcatatttgcaatcagaacttctctcttattattttggatgtgatcttttatcattcctctcttgttgtgcaggcagtattccaggacaaggatgttattggatccgacgatgagggagttccggg

SEQ ID NO: 146430 - DNA, 990 bp, Arabidopsis thaliana landsberg
actacttttcttattagctttccctaaagaaaaaaaaactaagaagaaataatgagtttgtggggagggatggaaggaggatggggaatggtaaaagaaggttggagaaaagggccttggactgctgaaaaagaccgccttttgatcgattatgtgcagcttcacggtgaagggcgatggaactctgttgcgaggctcgcggggttgaagagaaatgggaaaagctgcaggttaagatgggttaactacctaagaccagacctcaagagaggacaaatcactcctcatgaagaaaccattatccttgagttacatgctaagtggggcaataggtaattaacctaagctttgattgtttattcacatcctctagtatgctaaatagaattttcttctcttaactttttttcattacattcgaaactaaaatatgaaacaattgtagctttaccctaataagtaactcatctctttttccttattctaaggttttttgtctgatgatttgtatttgtaggtggtccacgattgcacgtagtttaccgggaagaacagacaacgaaatcaagaactattggcgaacccatttcaagaagaagacgaagtctccaactaacagtgcggagaagacaaagaaccgaatcttgaagaggcaacaatttcagcagcaaagacaaatggagttgcagcaagaacaacagttgcttcaattcaatcaaatcgacatgaaaaagatcatgtcgttactagatgacgacaacaacaatggtgataacaccttcagcagtagcagtagcggcgaaagtggagcattatatgtacctcatcagatcacacattcaacaacaacttctggttgtgaaccaaatagtaacgggtattacccggtggttccggtaacaatacctgaggctaatgtaaatgaagataacgctatttgggacggtttatggaatctggattttaaggacaaggaagttttatggcgct

SEQ ID NO: 146431 - DNA, 646 bp, Arabidopsis thaliana landsberg
atgtcacgcggtagctccgcgatcctcctccgtctcctcctcctcaccaccgtcgcaatcgctctaccagtaagtcacttccttgcaaaatgcaaatacacctacaaaccgtatactacaaataaattgcgacatctttaatgataagaatgttatttaattagttggacaatgatgaagacaagtgcgtgttcacggtttacatacgaaccggtacggcatggaaagccggtacagactccgtcatgagcctccgtctttacgacagttacggtcaagacgcggttatctccgatttggtgtcatggggaggtttaatgggtccatttcatgactatttcgagaggggcaatctcgacattttcagtggtttaggttcttgcctctcaggtccggtttgtgcaatgaatttgacatccgatggctctggtgatcatcacggttggtattgtaattacgtggaagtgaccatgagtgagagccgtcggagaagttgttcacaggagaagtttgaagtggagcaatggctggctcgtgatgcttcaccgtatgagctgtcggcgattagaaatcattgctcggacttggtcaagaatcggcgagtcgttattcccacgatgtagtgggagattatttatgtgtcaaa

SEQ ID NO: 146432 - DNA, 1695 bp, Arabidopsis thaliana landsberg
cggtgaatgtcaaactttctcgatcaaatcgtatctatcgctcttccgtatgtatcgaatctcttaattatgaattatgattacgttgaagacgaatttgaaatctctagtttttgaatttaatcaggaaccagtggaaggaaaaattgtgataaaatctgcaacttcgatttcgcatcaagcaatacgtttatccgtcaatggatcagtcaacttgcaggtttcagattctctctctattgaagcttttcttcaatttggttccaccaagttagttaaatttcttcctcactcctacaggttcgtggaggatcagctggagttattgagtccttctatggtgtcatcaagcctattcaaatcgtgtaagcatttatttcttctctggttcttgaattgattccttgatgttgaaattactcgagcttaagcaaataattcgaattttggccacagcaagaagacgatcgaagttaagtcttctggcaaaatccctccgggaactacagaggtaaagaacatagtcccattgagaaatatcacatatagctgcaacattgagtaagctaagcttttggatattttttttgctgtagataccattctctttgaatctgagggagcctggggaaggcattgtagagaagttctatgagacatttcatggaacaaatatcaacatccaagtcagtagtttgatcagctttttttaataaggattttaggatttttgtctgtgaattgggaaaacattgatgcaaaaatctgtgacagtatctactaactgcagatataccgcgaggatacttgcacaaacctttgtctgcaacaatggagtttattattgagagcggtagaggtactttgtcttgcttcgttggtgtttatagaataaacatggattgttttgtgatgtttttccttggtttttggttgaagttgaccttcccgagcggcctattccaccggaaattgtcatcttctacatcactcaagacacacagagacatccgttgctgcctatattaagacaggtttgttcttccaacattttcactccagtttcggagatatcatctcttaatgtgaaaactaataggacaattgatctcacaagggtggtttccgagttactggaaaattagccacccaatgctctttgcaggatccactcagtggtgagttaacagtggaagcatcttcagttcctattacttctattgacattcacctactccgagttgagtcgataattgtaggggaaaggattgtcactgagacctctttgattcagtctacacaggtgttaaaatgaccattctggtttgttaatgtagtaattgtaatatcaaaatgctttgctaatttagaccatgttcagattgcggatggagatgtgtgccgtaacatgactctacccatttacgttttactacctcggcttttaatgtgtccttccgttttcgcagggtaagtttctttgcttcattttctataaacctaggcagttgattgaaacaaatgactctctagttagtttattctataaaactgctgaaatgatgatgattttgatcctatgtctttgtggaacagtcccttctcagtggaattcaaggtatgcatcaccataagtttcaaaccgaagtcatccaaagcacaacccaagtctgatccaacaggttcaagactatg

SEQ ID NO: 146433 - DNA, 917 bp, Arabidopsis thaliana landsberg
aagaattgaatctgtagtcgaaagaaaagagttgggaaaaaaatggacgcaagcatgatggctggacttgatggtcttcctgaagaagacaaagccaaaatggcctccatgatcgatcagcttcagctccgtgataggttcgtcacttagatcggtttctctgtttttcatttaggattctcccaaaaaaattgacttttagctccttgaaatctttgttcttatagttcaaagctaattagatttgctttagaatattgattcaaggttagtgtgtacttatttctggctaattatagatctttgggtccttatggttcattgataaacaaaagtttggattagagttagtgaaattgttctttaagatgtaactgtgttgtctcattttgtgtgttgttgtcaaaactcacaaaatcttcacattatttaggttgtaacaacttatgcaatgcctattgttgttttgtgtttaggccttaactttggctacttttgttgagttttgtttttggtgaatttcagtttgaggatgtacaattcattggtggagaggtgtttcgtggactgtgttgatagcttcacacgcaaatctctgcagaaacaagaggagacttgtgtgatgcgttgcgctgagaagttccttaagcatacgatgcgtgttggtatgcggtttgctgagctcaatcagaacgcaccaacccaagactgatatagtctgctttttttatgtttggtttttcgtacggtttacgagtccgaaaccagaataaaccggttgttagttgttcaggttactactccgatactgttttttgaacatcttgtactgtgaaattattttgactaaatccagttctgatattgatattgacttgtatttcaatggagtctagagaatatcatatcatatcaat

SEQ ID NO: 146434 - DNA, 1333 bp, Arabidopsis thaliana landsberg
cctctcactgcctcttttctcactcactgttacttcgctaaaaccctaatttcgccattcccttctctaaggtttgcttcatctctttaatgtctttcatagctttagaaatggctttggtttctatgatctattgcaaagaaatgattattatagcttgttgattagatatgcagaaatggaattgattttagtcttctgggtttacatgttgtgtttgcagacatttagaaatggctttgattttagggtttgggattctttgtggcctaattgaaaagaaatgactctaatagcattgttgttaatcattttacagatatatagagtaatggaattgattgttgatttagttctgtgtgtagacatttagaaatggctttctgcaacaaacttagcggtatcttgagacaaggggtttctcagagctcaaatggtccagttacatctatgcttggctctcttcgttacatgtcctctaagctttttgttggtggtaagtatttatatatcctcacttgctcttgctcttactggttttctagcttgtatgtttttacaggtgaatgttttatttgcttttaggtctctcttggggaactgatgacagctccttaaagcaagctttcactagctttggtgaagtcacagaaggtaagccatgtgttttctgtttggaatgattcgtaatggctatgtgcctatgttactgtatatgtgtataaaaacaatgatgacttaggttgattgatgaatttcttttgatatggctttgtagttcctaggtatgttgttgatttatgtattattatatatacaatcctcataccaatgttttgtctttggttgtgcagcaacggtgattgcagacagagagacagggaggtcgaggggattcggatttgttagcttcagctgtgaggattctgctaacaatgccataaaagaaatggatggaaaggttagaaaagactatactgatgtcttaatgtcttctctattagtacctggatttgggtattgatcatgatctagtatcctactggtgattgttcagtctaaaagtcttagtctcttattagttttctgggtatgatcaggagctgaattcatagcattgattgttctgtctaaaagtccgtctcttactagtatttttgggtttgagtatgatcaggagctgaatggtaggcaaatccgtgtgaatcttgcaaccgaaagatcgagtgccccgagatcatcatttggtggtggtggcggttacggtggtggcggtggtggtggctactaaagcaaacaagccagaggatttgagagagagaggagcctcaga

SEQ ID NO: 146435 - DNA, 1284 bp, Arabidopsis thaliana landsberg
  unsure (1)..(1284): unsure at all n locations
atgggagattccgtttcttcttcatcccgcgtttctgttcatcaatctcttggtgctggttctggtcagtctctctattcgattcattgaagcctattttggcttttctcgagtttcgctttcgattcaatcgctctcgagtttcgctctattcggaatctggaatgttgcgttgattggcgtaaattgagggttttgtttgattgttatgtgcatttggggaatttttaaacttgatcataattatgaacaacaatttcacgtatttggagacatttaggaatctcttgactcgtgactcttgtgtccttaaatgcaattttttgcagttgctgatttgctgctatggagaaaccggactggtgcagtcattttgctaatctcttctactgggttttggttcttattcgagagagctggatacaatctcttgtctttcgtctccaatgttctgcttcttctcgttgcgatcttcttcttatgggccaagtctgctacagttnnnnnnnnnnnnnnnnnnnnnnnnnnnnnnnnnnnnnntgttgtggaaaaagatgaaacctttatgttgatagtagaggttgctttagcttcttctttgttaagttactgcttcaccatttgaaagagactactttggagcataaaagcttatgaatactggaactttgctttgacaacccgagtcatgtgtgtttttattcttataaagtatacaactgatgtggttttatttcagaccgctacctccagttccgaatatggaaatccctgaggagtttgcaaataaggctgctgatgatcttcgggtttggatcaattatgtactgtcaattgcaagtgatatcaccatagctagaaatccgattcgtctccttcaggttttctttcatcacttgtggcaaaccatttgttgtatctttttgtttctgcatgtgatgtatctcactgttcacatctcgtttgtttttgctgtgaaacaggtttctcttgtcttgtgggctatatcctatgttgggactttaatcaactccctcactcttgtttacattggtgagcgtctaaccttttcttgtcggttatatagtctatgatcttggttgatatgattaactaatgtgtcgctgtttttatcttgcaggagttcttctcagtctttcttttcctattgtgtatgagaagtaccaagaccacattgatgagaaagtgaactcgacttctaaattcgttcgaaatatctcaaggaagtttccattgcccataaacaaagagaagaaacatcag

SEQ ID NO: 146436 - DNA, 921 bp, Arabidopsis thaliana landsberg
tttctctaacattcgatcttctgtttggtccttttcaagattcctttcgttgtttcttggcaaagataaggatcttaaaccagagacttgacttcataactgacatattctttgaaactctcttgctcatcgctgcctgcccctaatctaaagttccaacatgggttcaatccaaaacacagttcactactgttgtgtctcaagagacaatcagattatgtacgcttacaacaatgccggagaccaccgcaacaacgagagtcttgcagcgttatgcttggaaaagactccaccttttcacaagtggtacttcgaaacgaggggtaagaagacttttggattcttgatgaaagatgacttcgtttatttcgccattgttgatgatgttttcaagaaatctagcgttcttgattttcttgaaaaactgagagatgagttaaaagaagctaataagaagaattctagaggaagtttctctggtagtatcagttttagcaatgttcaagaccaaattgtccgaagactcatagcttcattagagtttgatcacacttgtcttccattatcatcaccttccattgatggtgctgaacaaagctacgcatctaactccaaagctccgcttttaggaagatccaacaagcaagataagaagaaagggagagatcatgcgcactcactaagaggtattgagatagaggaacaccgaaaatcaaatgatagaggaaacgtaacagaatgttctaatgcttcatctgaatcagcaacgtatgttccaagaaggggacgatctggtggctctcagagcattgagaggaagtggcggcgtcaagtgaagattgttcttgccattgatatagctatttgcttaacgctgcttggtgtttggttggctatttgtcatggcattgagtgtacacg

SEQ ID NO: 146437 - DNA, 637 bp, Arabidopsis thaliana landsberg; identical to SEQ ID NO: 52363

SEQ ID NO: 146438 - DNA, 1950 bp, Arabidopsis thaliana landsberg
atctagacaaagagtgttgtctgaattggctctgtctcaaaaaatgaaattctcaaattaaccacaacgatctttagagccttcttcgctcaccgatctctgaaaccctggtttgctctcgtcctcttcgtgtaacgattcttcttcttgataaatttttaatctttgtttcggcttttcgatgaaattgttttttttttggatctcgtctctatcagctcatgttcttctttgattatatgataattgttgcctcctttgctctgttttatgattattgctgatttttgagattgaaatgttcgagggtttctactgttcactgttctttacacgtatcaatgttttcttgatcatgttctcttatgatgttaatagagagactagtgttattgtgatgaatgatccttgttaacctaaatttgtcatttttgttttcacttgacattcatttctctaaccatttattataggtagtttctatgagtatgtcgcagtctcgagctgtccaaaaatcgtcttcacctaatgaggatagaggtgagaatcacctagtggatcatgacttgaaaggaaacgatgatactgaagaagaagttctaccggctcaatctcagcccttggcatccacaaacacactgttccttctatcggggcatttacggttcagtgtgcaagttgtttcaaatggagactcatgccttcaatgcagaagtatgaagagattagggaacagcttcttgaaaacccgtttttctgcgatacagcgcgtgagtggaagccggatatttcttgtgatgttcctgctgatatctatcaagagggaactcgtctttgggctattgataaaccgaatatctctcgcccacccgctggctggcaacgtttactgcggattagaggtgaaggaggtaccagatttgctgatgtgtatgtcgttcgttaactcttctctcatttatgttaatattagtctttcttctttataccattgtattggctttctttatcattcttttatcttggttgtttcagttattatgttgctccgtctggaaagaagcttcgatcaactgtggaggtccaaaagttagtttctctaccactccatttccacattttcgttttcacatttaacaaagtgttccttacttttatgtttgatgaggtctcactgtatcagtcttaccattttcgtcaaccaatatattgaatcagtaggaacctcaagtattgttctgtggtcataactagagttaggcactgatgcaaattacagaaatccttgcatgtgtattgtttactaacgaaaatgtactatgccaagaagttagttaaactattatccttatttccatgatacttacatgcagcatttgagagtgacaacaatggtaggagaaaaaagcttagtgacttaccaattcgtttagtgattaccaaattgttttcagtgacgtatagctagcttctttacacccttataaccactattactggtttgcaggtacttgaatgacaactccgaatacattggagaaggggtgaaactttcacagttctcgtttcaaatcccgaaaccgctgcaggatgactacgtgaggaagcgcccagctcgactactggattccatcgataatacaaacacccctgtagctaaagaaggtgtgttgcttatcaaggcacataaatataattgtggttatcttttgtatcaaggctttagattattgatgtcattttttcagtcaagagtgtatttgacgtatactcgaaccgaacattggtgtctttagggaactttattaacatgaaaacgtctatgcttttacaagtttctaacatttcgcttgtcttgttatttttcagctaatccactggcatggatatctccagatgatcatatatcgttgcagctaggtacgccaaccgagtgtggacttaaccatt

SEQ ID NO: 146439 - DNA, 1713 bp, Arabidopsis thaliana landsberg
ctacgctttactctttcactcctctctctcctgctttgctccgccgtgagaggagaaacaaatggggaattgtcaagcggcggaggcggcaacgacggtgatacaacaaccagacggtaaatcggttagattttactgtacagtaaacgcgagcgaagtgattaagtcccatcccggtcaccacgtggctctcctcctctcttccgccgtacctcacggtggctctctccgcgtcactcgtataaagcttcttcgtccttctgataacctcttgctcggtcatgtttatagactcatctcctccgaaggtatataatatattaatcacaattcacacagaacatgtttcagttttaaattcaggaaagaacagaaccctaacttatagggttttcttcaatttgtttcttctgcttcacgtttgattacaatcatcatatacgaagtgtataaaatttacaaatcagaactaaaagctttaattttcaggattcttatcaatttatttgttctgcttcactttttgatgttaagtcagtctttcttttttgtgttctattaatagaggtgatgaaaggaataagagccaagaaatctggaaagatgaagaagattcatggagagttttctgttgcagaagaagagattaacccactaaccctaagatctgaatctgcttctgacaaagacactcaggtattattatcacatactacaattgctctgtatcagatgtttcagttttagttctctgattgaaacgatagagtgttacaaaagaataatagagttggttttgatttacagagaaggacatatgaaaagcagagaggaatgatgaacacaggaggagctaccaataaagttagagcttggcagccttctcttcaaagcatctcagaatctacaagctaaaacacttcaatccatatttttctatctttttttcttacttttgactcttttttttgatcatttcatttctctttgtattgatgtttttcccaatcaaatttgtaaaggaagaagacccatttgattgtggttgaagaagaagaaacttttgtcattttttaactttaataataataactgaagaaagaaagatccaaaggattattttcattttctagatttctagattttcttttacgttttcaataaatagttatgtcatagatcaagttttacaactttttttacgtacttaaaagattgataaaattgtacttgttgttgttgaccattgaaacatttcccttttttcactaaaactagcttttgcaacctttttattcaactgcattggtttgttgtatgtagacaccattcaactctattataaggattcatgtagcttaacatatcagtgaataactagacatgccatagattccgaaggaagaaaaattgttataaaagaactatatgcacctaacaaaaaaccaacaaaaccatagtattttctttttggggtacataaaaatatctttgtatgaagaagaagaaagaatcattacacagctttcactcacaagattacaagtttgcaaattgcatataaggaaactcccaaaaaatatcatcaaagatcttttcagaacacaaaaaaaaaaaggtaaaagtatatctcttttgccatagttagactcaaaaatacgacatcgtttacctcacacgtgcacactcaccgacttacagaagaacccacac

SEQ ID NO: 146440 - DNA, 1018 bp, Arabidopsis thaliana landsberg
caggggacaaacatttagtctcaaaaggaccatgtgtgaatcgtagcattctcatgaccttgtctacatctgctgcattgggtaaaggaggtggtgtcttagacaaaccaattatagagaaaaccactcctggtcgtgaatccgagtttgatttaaggtattattgcctacaacaatctgaattttcctttcaatatgatcaaattcatatgcttatttgtgattatactttgctttgattcaggaaatcaaagaagatagctccaccttacagggtgatactacacaatgacaacttcaacaagagggagtatgtggttcaggtgttgatgaaggtaatacccggcatgactgtagacaacgcggttaacattatgcaagaagctcatatcaacggtttggcagttgtgattgtttgtgctcaggctgatgcagagcaacactgtatgcagctgcgcggtaacggccttctcagttctgttgaacctgatggtggaggctgctgaaactaattaaactcagtatagattttcccaccttccaggactctctatttagtcaaaaacatttgttgttttaatgtatataatatcagaaatttggtacaagactgttactatatgcaatgaaccttgcccctacatagatctgttgtgagttttaagtgttttcatttggaacttcagaatgcaaataaacaaaactttattgaagtcaaatggtgttacagatgaatctttctgattctgtaatcactaatgtaaatgtatctaagcaattgtaagggagtgacgtgtttcggtttcatctcgcccaaaaaagcattcaaacccaagaaacctgcagtttcaagacattgatgggataccatatagatgtatcaagcatcaaccggagtaagaagcgactgaatgccgaagataatgaaaagcattccaccggaaagagccacctgcaacaacataagagctatttgatcaaaactcttactcacccccctagaacgttgcttcaataa

SEQ ID NO: 146441 - DNA, 628 bp, Arabidopsis thaliana landsberg
ctctctctctctctctcacacacacacacaaacgcacatacttgagcaaagtcatcacaatgagcttcttcatcgaagattctggtctcatagtcactcagcttctctacaaaatggctgttctcatcaccgtcttgagatggatcctcgcttggatcttacgctaccgatccagatccagatccacctcttcttccacttccgcctgtccttcgatttcctcacaggcgatcaaagaaagcctctccgtgacgacgttccgtgacgcagctgagagatctccggcgatgatcaacgacacctgcgctgtgtgtctcggagatctggaagatggagatgaggttagagaactcaggaactgtagccatatgtttcaccgtgagtgtattgaccggtggttggattatgaatgttgcggtggtgatgagaataacgaaggtgaggaggataatcaccgtacgtgtcctctttgtagaactccgctacttgctgctaatacgacgtcgtgtggtgattggccgacgaagaacgaacctagctgggccgttgaacgcgttctctacctcttcggagatgatcttcacgtctgattaaatttttttttgtcttttcatttgattttttatta

SEQ ID NO: 146442 - DNA, 4940 bp, Arabidopsis thaliana landsberg
ccatgagatacacttacaagactgtgcagccgagtctggctgttgttgctgactgcggtgatgacgttgagacagccacggggacgaataacacgtccaagcttacgtaacttagctattggtttggtcatatgatgaccattttatgttctgtgtttattgtgtacttttgaaaagtgattttgtagtcattttaacattcgtgtggcgttagcctttagaaacgtatgtaatacatcttacagaactgaattccaagtccaaatttatatacaaaatagtttttaaattatgatatacgtattttcaaaacagaggtaattaatcataatggtacattacctctgttttaccattatgatttgggactttgagcaacccaacgaaccagcttagtacgatgatgtttatacatcttacaggaaacacagaagtacgaattatcacacatccatgagtgcaagagctacaaccagatgagattctccagttctcatcttttaatggctagttcagtctgtttagggtcgagccttctagtgtctagttgttaatgtgacaaatgtgatcttctctcagctttgaaatagaattatcatcacatcgattccattaaattttggaactaaaccataagtttttccaaacatattccctcttttcaatcagcatcagatctcttaattattagcttattcttcatagtttcgctttgttcagttggtatcaaaaccatgttgataatgaaatgtttatttagaagctaaacgagctgtttgtgggtctcaccttctaatagaagaaaaggcatagccacatggttactcgatcccaagaggtaaagaactcgagcaaccacctaaaacaattgtaatggtgaacaaacattcatacattttggtgacattttgtttgtttgtttgtttgtaacaaatcgcagggaaagcttttgcaacaatgggagcataaactcagttagcattttcacaaccaagctccatgggaagatcttttggacctaaatattttggaacttgttcattcttactttacaaagctcagctaattgatactcacttttcttaaacggcatacatttcatcacatcacaaccatcatcttcactgttactctatttgtctgtcttttacatattagcaagttgatgaaatattgattggctgatcccataacaaacaaaaagagcaacacaaattcttttatttttattgacctatctttctctgctttcaatcttccattatcccttttatcttcctttcatcctaactaattgaaccatttatttttatttttaaaaagtctgtccatacaaattacactaatccacacaacgtctaactctcttacaagcttcgtagcaatatcaaaaagacaagagagcaataacagtttgtgaggcatttggaacctatgaagagaccacaaaaatgataagagagaacaataataatcttgtcttggccaaaagtccactgagtgcatgtatttgagttagatgtaccttgtatgtgcttgtttctgacacaaaaaccgaactaaggggaatgttaaaggccgttgcagcaacctttgtatgcaaatccttgacccatttcaaaacctccatgtgtcaccaaaacaatcccattggtgcaaacatgaacaagagcaccggaagtatcttaaaatccagattctagatttgcaagcaacggtagtgcaatgctgagatttccaaagaagctttatcttattcttttaactttaaagtgaatcctttttctagcaaaatgaggacaaacttttaccagttttcacatttttagaaaaatattcaactcactttgatttcttcaggggctcagctgaatctagttttcaatgtttgtagaacaaaatgaaaatgaaatttttagtatctcaaaatccattctattttttttttggtgacattaatcaatgatttcaaaataaccaaaaacctcagaataaaactcaattgcatcttaaaaccacccaactttcagaactgaagaatgacgaagaattaataatagaggaggagaggaggagctacatcaacactatttctattttttcagccaatcagcgcactccggacttcgcccactcgcacctacttcacgtcacacgctcaattctatacccattctcaccaacttcgcgttgagcgcgtgtcatcaatttctgtagggataaacccacaaaatcatgcctatttctattctactcgctttgattccaaaagaggctcgcgtgatcccaaaacctttttttcttttgttttttctgaaaaccatattaattctaatgcaaaccaaacccaaatcaatttcaatttcaaaaccatgtaaaccgaaccgaaatcataacaccaaaaagacaacctagcaatatactcatatatcgtcaatttcactattaatccaacgagccagtttattgcgatgacgtttctaatgcttcctaatgacatgcttttaactatttagcccgcgtcttgattgtagtatcctactctttccttagtttccaagagattccgcgctatccttgcttctcttgagctttacgaaacccgaactctcttaggctgccccgagagtcgtctttatgtatatttgagtttccttcatgactctaattaccgatcatgtctgttcactctctgccggagaccgaatcgactcactgttggtaagttggtaaccctaaccctagatggttcacgtcatgctttagaccatgtaaaactcctacaaagataaagtcagatgagaacaatgtttggggttcagacccaactcgtaattttccttatatgagttggtcggatccggatctaaccacacttcgttacatacttacacccccaagttaggattaatggatgcacttgacttgggggaattttttctactttcaatgaaagcaagtgtcaacgtgttggaatgttgttatgttaaaagtaataaccattgagcatgtgtcaagtgttttgattctgtatccctggaacaagcacgctcttgttgggcttgataatatttttcaactagaaaatttattgataaaccaaacaacgactcttgggatgatgttgttggttacgtagcacgtttgaattcaggatgctttgtcacgactgaggtaagaggagaaggtgccacatggtacatagtacttaccacgtatccttttgcactgcccagtgtctatatatatctgaatgtggcagagggactttaagattgaaaacgaaaatggcagatacaggcaaaggaagctctgtcgctggctgcaacgatagctgtggctgcccttctccctgtcccggtgggaattcctgcaggttggtcctttattatatgctctagggtttgatgtgttgggattctaaaacgtggtttccaatccatgtaggtgcaggatgagagaagcatctgctggggatcaagggcacatggtgtgcccgtgtggggagcactgcggatgcaacccctgcaactgccccaagacccaaacccaaacctccgccaagggctgcacctgtggtgagggttgcacatgcgcctcttgcgccacttagacatccttatctctgtctgtaccacactttgtataatggtactagctagtcagatctgaaaaataaatctgtttattaggtccaggtacaagaaaacatatgtttcgtatgctctgctctcgtcttatgactcatcaagaatctgaaaatcctgaaggtcttggactaatacaatccactaactgagtctcctaaaactgatagccagtgaacacaaggagataaatctttgaatactgaatgagtaacaacatcgagatggtctgtacaatctggcatgttttagggaacacctccaacgctttaccagcttaacaccaaaagggaacaatgaatgtgttcatcaaagaaatttcatcgtcttttcactttaccggactttaaaagaaacgttcaacaattgcataaaatgaaaacagaagaaagtcattcatggtttcaaaaattgtatataatgcaatggggactacaaattgcttgctgtgtaacagagaactcacctcctattctaagttgggtagtatggttttccatctgcaaaggctccaactatagactggtaggacaagccattatgtctttctgtaactaatagactggtacagagttctaaattactattacagtaaggcctgagactttcttgatggattggcctttctgaaactctatgcatagcgtctgaatagattatatttggtttaagggactttgtttttctagtaatattttggctcttgaaggctaataaagcggtgtcatctatatatgtgatcacttatttgactgtggcatgtagaaatgttgatgttgtacttgatggattaaaatatttgatggcaaaagatacaagaacacacatccacacacgtgtaatcagtgttaaggaatacaggagcggagaagagagatggattttgggagatggttggcgtcgagagtgaatgagcagatgatccttgtatagaacttggaggtgacgagtcttcccaaaatgtaagcttttgaatggaggacgatagtgagattaagcggcagggagagtgtatcaagatggaaagaaacaccaccgtagaggggaatctgatggccttgcaccaccgtcactacgttcgtttcgccatttctaccaaccgtgaacttgttcatctcaccggaggatagtaggaggttggagtagtgaaggagaagaggagaagcagtgacgtggacggcaaagaaagttgatgggttccggtaatatatcctgaacgtcgaaataagagacaacatgtccgtaggcactccgctaagatcgttccctgcctgcaagttcaagacgctttcc

SEQ ID NO: 146443 - DNA, 1696 bp, Arabidopsis thaliana landsberg
aaaaataaatccagttggtttcagactagggtcaacacaagagtcatcattctctttggtttgctgaaccacacaagttttctgacggttcataagcagataggtctatactaggtcgtattagatgttatgtccattttggacatcagactatcttgtgtatggagggttctgcaggtattgaaattcagaaaaaaatcgctctcatcccggtcatcacctatgtgggattactttaattattaagtgaagataaaccccgaagagtgcaacaagttacagatgaatgttcaaagtgaaatagattgtgtcgatacaaaactctacagggcaatgacaagaattaccaatctgtatggggatcctaaaaatcttgcaggattcatcgctggacaattaacaactcgcgtttcttttcggagagcaatgaaaaccgctattgaattggctgaacaggcgaatacaaaaggaattcaagtacaaattgcaggacgtatcgacggaaaagaaattgcacgtgttgaatggatcagagaaggcagagttcctttacaaacaattgaagctaaaattgattattgttcctatacagttcgaactatttatggggttttaggaataaaaatttggatattcgtagacgaagaataaaaaaactttctttatctttatattttatccgacgataaaaaaacgaaaattatataacacgatacagacagtaataaaaaattgcagtcttcttttttatgtttaaaaataaaataagcaattctataagattgaataaaaatttccatcaaaactcctttgatataattgctatgcttagtgtgtgactcgttggtttaggattagataaagataaaaaaaaaagaaaaaagaacttacctataacagaaactaataactatagcattaataaataacctaagcaactcattgcttcacattatctggataaaaaaatcagtcaagatatgatggattgatcatattattgtagcaactgaaaaaaaaaaagaataaagaactataattataagttatgaaaggtaatcgaaaagtatgcggattcagtggaaggatgaaagaaagagagaaaaaattgaatattaatgatatatgattccaatttggaaagtctatgaggtcactgtaagaaaagcaatgtaataaagcatcaatacagattcattcagaataattagataaatctgttccgaaaacaaaaaaaattaagagccttgagccaataaaaactaagaaaattgactcaaaaacaaaaacaaataaaaaaaatgaaattcccgatttcatataagagctccattgtagaattcgggcctaatgattaatcaagaagcgatgggaacgacggaacccatgaatatagaggattctattgaaaaataaatcttagtaattcattggacaggatggcggaataaaccagattattatctattcttatttttattcagagatctcctgggataaacaacaaacttaatatagatattgaaagagtaaatattcgccggcgaatactttttttttaataaaagtaataaaaaacaaaaattaaaaagataaaagaaaataaggatttgttagaatattctaacaaaaacgacattcgagatgatgatattacgttacgttatttttaaataaatagaattaatcttggatt

SEQ ID NO: 146444 - DNA, 1260 bp, Arabidopsis thaliana landsberg
  unsure (1)..(1260): unsure at all n locations
atgaggcctgtaatgtttttttcgccgcattatcggaaaaacctcaagaagaagagtggtgacataacaaaaccccaaaagctcccaagcctagagattctgttgttgatccgattcccgctctccttctccggtagtacaatctccgtcgccggttacatcagccaggtaagagacattagtttttattttgtttcgaagtttcatctcttttctttccactttatccccttcaaggaatttgtgctagatctacgcttttaggtcgctggcatttgattgattttggaccaacaaaagctaatttaaatgttcataaggtcttgagatttgatgattaggcttttattttgtcgagactgatgttaggtcgaactatgttgatttaggtttgggattcgatttgattttatggaattggattccttagatagatcctttatatgcatccgttaggtcctcttttaatatgtaattctaaactgtgtaatggcttagggaagagttttaagagatggcatcaaagttgctacaattgaaatccaaggcatgtgaagcatcaaagtttgtttccaagcatggaacaacttactacaaacagttgctggataagaacaagatgtatatccaggagccagctactatagagaaatgcaatgaattgtctaagcagcttctctacactcgccttgctaggttagtcttcgctctctcagctgatcctggatttcgtttgatgtgtttgttagacaagaaattgtgcgaaatcccgctaatgatgtagataatcctgcttcgttatcaaatttggttaggggcagtgttataaaagaattgtgaaattatacattctaggtttgatggttctgaaccatgaaactcatcacatacctagttacagtctctactttgctgcatctgaactagatactaacaatcccctgcttatatagagtatagtatttgtgtagatttcttaccagaatagtaatttcactgtttctagatacgttattcagaaactgcgtgtcttctttgttgctatgactgacttgtttttttcaaatggatcgtagcattcctgggcgttctgagtcattttggaaggaagtcaatcacgtgaagggtttatggaagaatcgggcggatttgaaggttgaagatgctggaatagctgcactttttggtctggaatgctttgcgtggtactgtgcaggagagattgtaggaannnnnnnnnnnnnnnnnnnnnnctaccct

SEQ ID NO: 146445 - DNA, 435 bp, Arabidopsis thaliana landsberg
tcacaacacgaagacgatgaagcaactaatccgtcgtctctctcgcgtcgctgattccgctcaatacagtctcctccgttccgattcacagcgacctagccgccgttccgaatcattcctccgttcttcggtgactcgccgctcaaagaagcaaacctcttctgttcccgaaggacacgtaccggtctacgtaggtgacgagatggagaggttcgtcgttagcgcggagctacttaaccatccggttttcatcggtttactaaaccgatctgctcaagagtatggttacgagcaaaaaggagttctacaaatcccttgccatgtccttgtcttcgaacgaatcatggaatcgcttcgtcttggacttccggtaccgattgatgttcaggatctaatcggtgacgggactatttgaagaagaagcttttattagaa

SEQ ID NO: 146446 - DNA, 289 bp, Arabidopsis thaliana landsberg
tcagatggcttcccagacaaatcaaaccgtggtggataccaagaaaatcgaaaccgagaacccgccaaaaccgcaagtgcctgcatcatcatgcaggaagagggtgaaggatgataacgccactttctttgcaaacctcaaggatcacatggatgaattcatacatgcctcaatggatgaacacaagacttgtttcaaaaacaccatggacaaggttatttctcaatcctctatatcgcttgatgacatcgtggatttggcatgcttatgtgtttcattaatgttgaag

SEQ ID NO: 146447 - DNA, 4184 bp, Arabidopsis thaliana landsberg
cattgataagggcaactctaggattcatcaaatggctaataggcgaaaggtagatacccatgacgatagattcaaaaaccgggtcaatccactctcgtgacagagacccccataactctaccacttcctaatctcaactctcgttgatgaaacatagcagagagggtttaagaaacaatctaccaaagccaataggcagaaaagccaatctcttggtcgagtctacaaatctctggaattcgtaggtccgacatccatttgaacgtctcttggacgctggacgtcatcgaatcttcacattagccaacaaaaaccgcataggggccaagcgaatccagaaggacataaacctaaacactaaccacctaacgaacctagagattaccgtaatctaatccatcctcaagaaccctaatcactactcaagcaacattctaaagaacacaaacccaaaaattactaaaatcataccaaaatgtagatctaaacaagctaaacaactttaccgaaatcttccttatttgaaagtagtccctacacgtttttagtcacgaatatacctaaatgtttggtcagtattagacctaagttttgtttttagagattgttacacattttgagagaagaatccaatccttttagagaggattctgaactcctttacttttattattaattcatcaatgcaaactgttgagattatgatttgtgtttctattatcatgtctgagtaatcaccttgttgggtttagggagtctcaatagggatttacatggattagtagatggaaaacgccttaggattattcttagagttcttcatcttgattattcttattgctagttttagattgatgacctagaacttgatattagataataagtatgcccaccataggcacttgctatttgatctctcatagatgagcctaggcagttaagaaagaacaggtaggctcataaaagggctctggtttagatactaggtgaactaatcagacttgataataatgcatgctttagtataagatttctcggcttctccggttatcttaactctaagtatagagacttttgcggaacgccaccggttactctaaaatcatagtttgagttcgagaacggttcgataacaacttagctatttctagatctactatcagctatctcctgagaataccctaagcctgacacttttattatcttgtttcataaccatccaattgattgctattgtttacttttgtttctctttattttatttactattttacttagcataattcgatttgccattagtctattccgtgatccgagagccatgtgaattcgatccctaaatgctgcaactgacctctttatttgagagagtggtcttaggattaatttgacctatatcaccagatattattaaatgaagacagcgattaatttagcttctaacgtggaaattaaccaaattaatttcttccacatcaacatgacccgcttgaacatccgctgcccttgacccactgcaatcactagaaaaactgctgttataataagcagctgtcccatcaacaaaattatcgagtcctaataagtgtgcattttacttgttttgagcatccatttgtcatcactttagcatcatatcaccactgttttataccatttctcatcatttgtcatcactttaaatatttaggatagttttgcatgcatattgcatatttgtgttgttttcatgtgatttggagctgctagggagctaattggaagaagtggacctgaacaaatcaatatactcgaccacaaagtcgactatcgtcatcctggactttctgaagtactcggccacaacctctaaagcaaatccctcgacagcaacactctatctatcactcgaccacgaggtcgagtgcagccatcaccatttctcaccatcactcgaccccctggtcgagcacatccatcaccacctatcgccattcactcgacccctggtcaagcaacaacgtcgtcacgtctcgtcattcactcaatcaccaccactcaaccccatggttgagtcccaccatcatcgttcacttgataaatcagtctgccaccaagtcgagttccaccatcatccaccactcgacatcatactcgactgccagcttcagagtcttctcaattcctcactctaccagacattcgagcataaggaagagaagaagactccagctaatcactcgacccattactcgaccacctgggtcgagtaccgttcttaatccgtctcaatactgtgtcgttttgagtattaggatttcagaacatttcgctataagtagcatgtactttatattttcgagactaagttttattccgtagatagattgtcttcttaaccaaatctgaagtcctgtgattcgctactatcagtgctctatagcgaatgttctcttctccagggagtctactggcactgtgtctaacacagacatggagatgatagattccacactcaaaggcattctctgtcgaacaaagggaaagaagatcctaaaaggtgatctcaatgatgcgccaccagtgatgcttctgttgatccacctttgtggatacatgaagtgggcgttgaccaacgtcaagaagagggtgcgagtttatctttgcataggtagtgttgtgacgctaattctgatagcatgtggagtaccgctcaaggaaccatggtttgaaccaaggacgatggacatagatcatatgcgttcctatgagtttctggaacatgacatggttggtgacgtctatcgctacagatttgagcatttgtcgatcagaaccgccaacattcttctcccctgcactgaagctactagaatactcgagggacaaaatattgatttcaagcctgcgcttgaagatatctatttcgagaacagcccaccaactgaggagattagtcacaccgaaggagctacaacagaagatgttgatgagacagatgaaatagatgaggcggagtttgacacaagcatgtatcagtttagagagcatgtatcatttcagtgagcatatacctccagcaaaggaaagcaagagtttgagcgaagctcacaggaacaacagcaagctgcagaagtggtgcaagaaacatgataagttactcaccaagtgcctcagggctatcaagtttctgaaggacaagatcagttgctcctcttccactacagctattccgcagggacagctcctcaggacatgccctcgaggagatatgacgcacctgagccaagtcggcgcaggcctgaacctagagagcagaagatttcgcatgtccctgcgaggcattcatcattcgagcctcgtgaatctgggaggaagaggaggaccacactcactcgatctggcaccaggagcagacgacttctacagtctcgtagtttatgcgaccgcggtgttggccgcaacagaagaagagaggtcgagtatcctcagaccggtgctggctgccacagagctgatgaggtcgagtacccacctgctggagctgatacagaacaggtcggctcgtctatggcctgggagcaatcacaagcagccattgacgaccaacttcgttcattcttcgactgaggtaagcgcctcacttcaccattgtattatatcatctcttgtaatttattgtttattttgtttctatgattggatttgtcctgagtactctcttccaagtttattcacatagtggactgtgtgatttaagtttgggggagggctcaggaagtgtgcgttacattgtttatattcttgagtctgcactctcctaggggttggttatccacctctcattttgttctaggatttttcctattcgtgggtcatttatggcacgcgggaagggctcgggcagcggcagcgggatttgaaaaaggaattgatcgtgattttgaacctgttctttccatgactcctcttaactaaagtagtaggtaaaacaaataggttcatattaaaaagtcttctttgtttctttcaattcaatctaaatttttctggctcggctatactatccagccgagccagaaaaatttatttatcatgctaagaagtaaaaaaagccaataaagagaaaaatagattcatccaacaaaaggagagagagggattcgaaccctcgatagttatttttatgaactataccggttttc

SEQ ID NO: 146448 - DNA, 733 bp, Arabidopsis thaliana landsberg
ctattcctcttatccacggctattctcacggcgtcgtcctccgcccccagagccgcaataacttcaaaacgtgctataaacttcatacaagcctcttgcaaagccacaacatacccaaccgtatgcgtcaactctctcaccggttacgccaactccatccaaacaagccctcgacgtctagccgagaccgcactcaatgtgaccgtgactcaggcccagtccactaaggtcttcgtctggcgcttggggcgtttcactagtctcaagaaacgagagattcaagccgttaaggactgcatcgaggagatccatgatgccgttgaccgtttgaccatgtcgatccatgaagtgaagatgtgtggtagtgctaaaagtcgtgaccagttttggttccacatgagcaatgctcaaacgtggaccagcgctgctttgactaatgcaaacacttgctccgatgggtttgcgggtcgggtcatggatgggcgggtcaagaattcggtccgggcaaggatcttgaatttgggaagaggaactagcaacgctttagccttgatcaatgctttcgctaaaaaatactaaataatgtaatacattttctttttgttcttaattctgtaatttgagctacgaatgtgtggatcagctcgagggaaattttatttcttaaaatgtttcatgcataatccgatgtaattctggataaattttgattaaaaatgaatgtacaacattg

SEQ ID NO: 146449 - DNA, 1650 bp, Arabidopsis thaliana landsberg
tatgttacaaaccccttacattgctttccatttaaacctctcgtcttcttttttgttctctctctctcttcatggaagctcaacaccttcatgccaagcctcatgctgaaggagaatggtccacaggcttctgtgattgcttctctgactgcaaaaactgtaatcactcttttcacaatcacttataaatattatatatatatatatagtgtatgtgtaaaattctgaaaacaagtaatttatgcctgtaataagtatgctatttaaaccctttatctatatatctttatcagttaagacttaattatgataaaattaattaaaaagtacttattatttatcttgcaaaaattaatgaacaggttgtatcacattctggtgtccatgtatcacctttggccaagtcgccgagattgtagatcgaggatccacatgtaagtttcttataatacacgatgtcataaaaatgcctttgtcaaatttggcggcatagtgataaattattgctggttcaaaacatttcagcgtgtggtactgctggagctctatacgcgttgatagccgtagtaactggttgtgcatgtatatactcatgtttctatcgtggaaagatgagagctcaatataatattaaaggagatgattgtactgattgccttaaacatttctgctgtgagctttgttctttgacccaacaataccgtgaactcaagcaccgcggttacgatatgagtcttggtaatttatttcttcgttatactgttttttttttgtttcattttgttaataattgattgttaagtgtaatctcaaaacattgacattcgttaaaaattaatgtggtattttaggtaggacatcgaatcgacgtggcgtacctagtttcgacgcagtcattatcacgaatgcgaaggtctgcttgcttctcccgcctgagggccgcctatcccgccgcggagttaatgcgacgggacgagtggttcgcaaggcgaccgttgcacgtgcgcgggccgttcgaggaacggatcacgggcgcgtcgtcttcacgccgtgagagagggctcccctgctgctccaggatgggacatgagtctgcagacgatttgactacatcttccgctcgctttctgccgccattacagtcggcccacttttggccatatcaaccgtcgcgcctcctcccgcggctgactgacccgtgatcgatgtgctcgattggtgctgttgggccatgcgcagggttgcctcgagtcgcgacaccggttccgcagtcgaggaggcgcggtattggcgcaagtggcggtgcagtttctcgcatgcagtaacggcacgccggttacatgaagtgtgggcccgcttcccttgcgctggtccaccgggtgtggtcgaagccgaaagggcgctcagtcatggtgcggttggatgcctgtcgtgtggcagtccaccctttcggccaccggtttctgcgaagatgggagaacgcctgtaaccgtggggcggttgcatgactcgcgtgcggcggttcgccttcttcgcgcttcggatcagcttgtatgacgcgtgggacccagcccccgtgtcgtagggggagaaccctggagtatgtcagtggagactttgcccgtgacgctaaggggggcaagtgaggag

SEQ ID NO: 146450 - DNA, 728 bp, Arabidopsis thaliana landsberg
ttctggaactggagtccactgtttaagcttcactgtctctgaatcggcaaaggtaaacgtatcaattattctacaaacccttttatttttcttttgaattaccgtcttcattggttatatgataacttgataagtaaagcttcaataattgaatttgatctgtgtttttttggccttaatactaaatccttacataagctttgttgcttctcctcttgtgagttgagtgttaagttgtaataatggttcactttcagctttagaagaaaatggcatcaggaggtaaagccaagtacataatcggtgctctcatcggttctttcggaatctcatacatcttcgacaaagttatctctgataataagatctttggaggcaagttctgctcaagatttatctagttttgtgtgtgttttcaagttagggacgatcttaatggttatcttcttgtgaaaatttcagggactactccaggaactgtctctaacaaagaatggtgggcagcaacggatgagaaattccaagcatggccaagaaccgctggtcctcccgttgttatgaatcccattagccgtcagaatttcatcgtcaagactcgtccggaatgagaaaataataagttcaatgctttgattttcagaataagatgaacgatgacgatgttttctaaatccgagcttgtactaaataacaatacattacaacacggtttgcggaactactccaca

SEQ ID NO: 146451 - DNA, 691 bp, Arabidopsis thaliana landsberg
atcactcttttttgccatcgacgccaatcccacatggccctaacctctttcttcaccatcaaatgtcaaccgccaccctcgtcgtcttccctcctccacctcctgtccctatccctacctatataactagcctcggccttggctactccatagccatagctctaggtttcctcgttcttatctccacaatcattctctcttcttacatctgttgccgcgcctcacgcctccgcttctctgcctccgccgcaaacgcaaacgcaaacgcatcgtttagagaccgtggcgttatcgtcccaagaatcatattcgtagctgaagacgacgatcttgagtctggaaacgtcgtcgttggaggtcttgatcattcagtcatcaactcttaccctaaattccatttcactaaagatatcaccgccgtagtaaacggtgatgggtttcacgacggagaaggaagagagacgacgtgttcgatctgtttatgtgagtacatggaagaagagatgttaaggatgatgcctgagtgtaaacactacttccatgtttattgtcttgacgcttggcttaagctcaatggttcttgtcccgtatgtcggaattctccacttccgacgccgcaatctacgccgcagtcaactcctttgtcggaagttgtgccgttgtctcaatacgccgccgatcggaggagatc

SEQ ID NO: 146452 - DNA, 535 bp, Arabidopsis thaliana landsberg
acaaaaaaaaattcttccctttcagaccaaaaaaatttgaccaaccacagaattttatgctttttccccactttcattttattccgattcctcttcttctaattggaacaagtctctgtttttatctctctgttttctttttgggtttactctgttttctcatttatcttggttttgagttagttaaagagagatgggtttttcgaagaaatctcaattcgaaggaggtttagaatccgtcgggaagaaatgggttatcgccggaatttcgattcgggcttcgttgaaaccagtcaagacgaaactcagagcgccgccggagatagtgaccgaagttgaagaagattgctacaaccaagaggaagagtgttcgacgactccgacagcgaaggaaacgaagataccggagttattggaatgtccaccagcaccgagaaaacgacggccggcgttaaaatgtcggagtaacgtcgttagagagttttttacgcctccttctgatttagagacggtgtttctatgtcgccgttagtga

SEQ ID NO: 146453 - DNA, 479 bp, Arabidopsis thaliana landsberg
tccttttgcattgtgtgaaaccttcgagttttctcttcatcttctcaaagtaacaaactttctccaaacagattattattaaaacaatctcatcaagaactacgatgaaattcccggctgtaaaagttcttattatctctcttctcatcacatcttctttgttcatactctcaaccgcggattcgtgtaagtatacacaatgcattttcttattttagatacttttctcattagaaatttagctttcttaataaaattgtattgtgatgatggattaattagcaccatgcggaggaaaatgcaacgtgagatgttcaaaggcaggaagacaagataggtgtctcaagtattgtaatatatgttgcgagaagtgtaactattgtgttccttcaggcacttatggaaacaaagatgaatgcccttgttaccgcgatatgaagaactccaaaggcacgtccaaatgtccttgatcatgttct

SEQ ID NO: 146454 - DNA, 476 bp, Arabidopsis thaliana landsberg
cttgttccctcccaattatctgaactatcttcttttatcaaaaactatattcacaggctgccgtgtaccttctccatccaaagatggcaactatagctactggtcttaacattgcaacccagcgtgtcttcgtcaccagcgagaatcggccagtttgtctcgccggtccggtccatttgaacaattcgtggaatcttgagtcaagaacaaccaaccggatgatgaagcttaagccgattagagcagcaccggaaggagggatatcggatgtagtggagaaaagcattaaggaagctcaggagacttgtgcggacgatcctgtgagtggagagtgtgtagctgcgtgggacgaggttgaagaacttagcgctgcagctagccatgctagagacaagaagaaagctgatggttcggaccctttggaggaatactgcaaagacaatcctgagaccaacgagtgccgtacttacgacaac

SEQ ID NO: 146455 - DNA, 527 bp, Arabidopsis thaliana landsberg
agagtcgacgacgactcttcttcgttcagaccaaaactctcaaactcagccatggcgaattattacgaaccgccagcttctggaaaccgtcgagacgcagtgaaaggttacaacagcgggagcttcgacgattcagccggcgatcagagtcaaacgaacgattaccagttaaagataaagaaaagcaaaagcgttccaaacgcggatcgtgcggcgtcaagaagctggagtttcagcgatccagaatcgcggaggaagagaagagtcgctggctacaaagtttattccgttgaacagaagatgaagggatccattcgaaagagcttcaaatggttcaaagacattatcggtatttcttgatataccttctctcaactttcttaaaatctcttctttgtgctgtgagagttaaatatctgtaacgaacaaaaaattgatagtattttctttctcttgcaactatatgtagaagaagagtctttgaacttgaatgagacagataatgaatgaaatcagttttcatatct

SEQ ID NO: 146456 - DNA, 431 bp, Arabidopsis thaliana landsberg
  unsure (1)..(431): unsure at all n locations
tttgccaatgtgttgtgaaaagtatctgcaaaatgtcatgtgccgcttgtgcagcgtactggttcgccattggagagatgattagttgcttgtgtcacagtttgactaacataaatcgggtcaaccgtcgcagaaaacgtctcgatgatatagaagctacgacctatgattatccgagtgatgatgaatcaagttcatcggacagtcccagtcgaatagataacattagaccaaagcagagaagaagaagactaggaagcaaacacagccaccaccatcatggcagcaatcgcaacaaccgccgtctcataagactaccgagtagacaattgtctgtacgagttggaggcaaatcaagaagagtaagaagaagtactagaaagattaaatcgaggaaaataaagactctcanagtcaaagatgtggttgat

SEQ ID NO: 146457 - DNA, 449 bp, Arabidopsis thaliana landsberg
aatcgttctctgatttcataaaacagaatagagatttataaaacttcttgcttttaaagatgacgattagattgtcgcgtgtgatcaactctaaacagtcccaaaaacagcaatctcgagtcccgaaaggacatgttgcggtttatgtcggagaagagatggagagcaagaagagattcgtggttccgatttcgtatttgaaccatccttcatttcaaggtttgcttagtagagcagaggaagagtttggtttcaatcatccaatcggtggattaacgattccatgcagagaagaaacatttgttggtcttttgaattcttatggttgtattgtttcaacttgagacaacttttttgggaaagcccaaaacttttttttttctttctatagaattactttttttgttgttgttccctttgtttatttctgcaaaggagaacatattgat

SEQ ID NO: 146458 - DNA, 697 bp, Arabidopsis thaliana landsberg
tgggttacatcggacgaatcatgactctgcttccgatttcaatcttcttcttctttttattttgcattccttcgccattaatcgccgccgctaacgatgacgatataccgacggcgtacactctcctccaaagctacaactttcccgtcgggattcttcctaaaggagtggtgtcatatgatttagataaatctactggtcaattccacgcgtatttcaacaaatcgtgcagtttcgctcttcaaggctcttaccaattggattacaaatcgacaatctctggatacatatcggagaacaagatcacgaagcttaccggcgtgaaggtgaaagttctcttcttgtggctcaacatcgttgaggttattaggaacggagacgaactcgagttctccgttgggatcacatcggcgaacttcgagatcgatgagttttacgagtcgccacagtgtggttgcggatttgattgcaaaacgaagacgaagactttgggaagaaacccttttgtttcttcggtttaaaggttaagacttcttattgcagaatctcaactctatggatgattgatgttctttctccaatcctttaatttttcaatcaacgcattgtttgtatctcttcttaggatcgagccgataagttgtatttatgggccgatcagtaataaaacagtggtggaaaacacgtgtatattctt

SEQ ID NO: 146459 - DNA, 764 bp, Arabidopsis thaliana landsberg
gttgctagctagacaagatcctttttgtaccatatcaggatttatcatatatcatttctgttatgaaggaagtttctcatgaagtcgccttgatttatcgtctttgatgattatttctttgcaggcttttcctgatgctgcaacgatttccagtagagtctaaagggcggcgcaagaagctacaagaggtgaaccttgaatattaaaccaaagttaccccgatctttaaattccgtttcttggatccttaccccctttatgtgttgtacgaattgcaggttggctacgtgacaaccatatgctttacatgtttcctcatcagatgtatcatggtaaagatatacacatcatactattgataccattagaccatatcttgttgattgaattctctgtgttggtggatctccgaaaccacagctaaccagatctttcatatcatcttctgttaatggtctagatgtgctttgatgcgtttgatactgcagcagatcttcatatcttatgatcacccaatcatatacttcatatattgcttggtaagctttccatacacctctacagataccatatatgtgcatgtgtatatagacccggtatgtgaatcttagaatctgaatataaagcttcttttacaaatctctaaacacaaagtgtgttctgtttacttacagttggtggagatattgccatcgtctctggtcctctttatcctaagaaagcttccgccaaaacgcggtatcacacagtaccatcaaatccaa

SEQ ID NO: 146460 - DNA, 934 bp, Arabidopsis thaliana landsberg
acatcttggctgggtttcgtgtgatttcgttttggatatggttgttcggattcttgttaccatgattcggctatagtgtttgtcgcctctgattgtcccaagcatcgttctttactgatttttagatagctctgagatctgtctcttcgattcgtcggatttgaattcgttttttttttgggtagctcttggatttcttcttctagggtttccaagaggatagagaaaatgcgggtgtcctctgagatactccttctttctttggttccggcgttgactttttatcattctggtttaagttctaatcgtttgaaacctcttcaaaagagtgattggcgtggtaatcttagttaaacaacaatttctctgtttttttgtttctccgatctcttcagatcttttcaattttctcttcggtttggtttgttttcacgcatttcctagctcggagtaagctaatcgaagaaaacaagcttgttattgatcgatctttcggtttttgttttgacgttttgtgtgaacgaggtaatttggctatatgattttttggctaaagtgttgtttgagctagagttctcttgttaatggtatttgaatttgtgtttgttgcagttacttttggatatgagctctgtctgtggtgggttggatttcaaagatgcagagagcagctctgcttccagtcccattatatgttctactggcgtaaagcatatctcttgtgttggatctgatgatgctcaagagtctgatggtgatgatagtggttatatacaccaaactgtgattgaagaatccaaagacaaggcgatcagcgaacccatccctgagtctttacctctcaattctttggatgatgaaagtgaagataagaaccttgctactgcattgcaagacatgttctctgagagtgtaagtgaccctatcttatttc

SEQ ID NO: 146461 - DNA, 383 bp, Arabidopsis thaliana landsberg
gttgattctagggttttcttacattgaatttttcgaagctcatttatctttgattttgaactaatttctgtaattgattcgtgttccagggtcacatgatgtggctgcagaagcaagaatctttcaagcagaaatttggaacaatcgatgaagacgaccacaagtgattcatgactttattacgtctctgaaactgctttctttttttgtatttgtgagtcttgaggaagagttagatttatatgaaatttaatcatacagactctggcttactatctccaatggttaatttgccaaatgctagtagtttttgattgctagagatgtctctgtattttgagattttatagtatttcagcttgagctttgtttagtggactagt

SEQ ID NO: 146462 - DNA, 1405 bp, Arabidopsis thaliana landsberg
accctttggaaagtatttcatcaaatttcagattcagaaaccctaatttcttcacaaagcaaaacacagaaaaagccattctttttgccccttgagtgctttcagctcttcgcacaaggtaggtcgcaaccaagtttctttatctccttctcactcttaattgtggtaacgttgatccgatctgttcaaatttgatcgggtcacttggtggatctagtgactctgttttttttctctcgatgaattcaaatcctttcgaatgtttttgctagaaaagatttagaattccgctatgttgacattggtttattgtgccattgacaggttacagaagtaatgtcacgtgtgtacgtcggaaatttggacccgcgagttactgagcgtgaacttgaggatgagttccgtgcctttggagttgtcaggaggtaagaatcaatccaatcaatcagttcgcgctacaattttgtcacttttgaagttaaaagtatccaattttgcatctctctaatgttcatatgtaatgtgcagtgtctgggttgctagaagacctcctggttacgcttttcttgattttgaagattcaagagatgcccgtgacgccatccgtgaagtagatggtaatgatacattcatattctttctattttgctctgttctcgtagaagttgatgttttgatttggattggaaaataagtttggtggaatcttttaaaggagataaatttgtggtttgcaattacttttgacttgaaacttcacaatttgacatggatactgtgataacggataggcaagaatggctggagggttgaacagtctcacaatcgaggtgagcgtggtggtggcggtcgtggtggtgaccgtggaggtggtggcggcggccgtggtggtcgtggtggctctgatttgaaatgctatgaatgcggtgagactggtcatttcgcacgtgaatgccgtaaccgtggtggaactgggaggtgtcgcagtaggagccgtagtcgcactcctccaagatacagaaagagcccaagctatggacggaggtcagtgatgctttttattttgttaccttagtaccttattttgaacggattaagtaaccttgcctttttctggttttaggagttacagccctcgtgcaagatctccccctcctccaaggcgccgcagtccttctcctcctcctgcccgtggccgcagctacagtagatcaccacctccatacagagcgcgtgaggaagtgccatatgctaatgggtaaatttctttttcccaagtctctatatcattatcagtgtttaggttttggttatagttcttagagataaacatttacattttcttcagatgctaattcaacatctggtcgtagtatcttcagaaatggcctgaaagatagacgca

SEQ ID NO: 146463 - DNA, 763 bp, Arabidopsis thaliana landsberg
ctaagaaacagaagttcctcttgtgttttttttttgggattaaggaagctatttctgttctcttcgagtttcaggtctagccctaaccctaaaatttagccatgtcttccaagcaaggttattattttccctctcctctcatctctgttatcttggttcgaatcaatcgttttgatctatctgtatcttgctttcacaattttgtgtttacatgtgcttgctattttatatgatctcatgaattcatcgatcgatcagctgatttattaatcttgtgtgctcttaacgcatcgaaaattcatcaaccttgtcatttgaatttatatggttccttatggaatccaacattttctgcaaaatgaaatatgatttcaggagggaaattgaagcctttgaagcagcccaagtctggtaagaaggagtacgatgaggtatgatagcaattgtacccttgcctttttctttagctcaacgtttaatggttttactctgtttcaaatgtagcacgatatggagttaatgcagaaaaagaaggatgaagagaaggttagttttctcaatcttagttttgattcattgaaggagaaggtgattgctgttgatgatcttgtttatgtgatgaaaacaggcacttaaagaactcagggccaaggcttcacaaaaaggatcattcggaggctcaggacttaagaaaagtgggaagaaataagactaaatctgcctcaatgtaatcctatatcaccttatatatgcttgtcaatgt

SEQ ID NO: 146464 - DNA, 2323 bp, Arabidopsis thaliana landsberg
atgctttttcgttgtaacttacccatttctgggtttcttctcttctgtttcctctttaccattgttgcttcttcttcttcttcttcctccaaccacacaaagcgcgtgtttcattatcaccgtgacgtttctgctttgttacgttttaaatccaaagctgatttatggaacaagataaacacgagctctcatttttgtcaatggtggggtgttacgtgttatggaaacagagttgttcgtttggttattgaagatctttatcttggagggcgactcattcctgactcagttaataaactcgaccagcttcgagttctgagtctcaagaacacttccttaaccggaccgttaccagatttctccggtttggttaatctcaaatcattattcctcgatcacaactctttttccggttcgtttcctctctcggttctcgcttttcaccggttaagaactctcgatttctccttcaataacctcaccggtccaatcccatccggtttagttctctccgaccggttgatttatctccgacttgattcgaatcggttcaacggtcccgtcccgcctttaaaccaatccacgcttcatacattcaatgtttcggttaacaacttaaccggtgctgtaccggtgacaaccgttctgttacgattcggtatttcttcatttctcaaaaaccctaatctctgcggtgagattgttcacaaagaatgcaatccgagagccaaattcttcactccggtaacggcggcgccgtcaccgaagatggttctcggtcaaatagcgcaaataggcggcgcaagattatcccggccaagtcaaaacaaacattcacgattttttgtgattctcggttttatctccggcgcttttatcctcttcatctccgtcgcatgccttatcggcgcagtgaagagacgaagaagcaaaaccgagaaacaaaaggggaaagaatcaacggcggttgtgacatttgacgcggcggagacggcggaagtagcggcggcgatagaacaagagagtgagatagaagagaaagtgaagaagctacaagcgacaaaaagtgggagtttagtattctgtgcgggtgaggcacacgtttatacgatggaccaactaatgacagcatcagctgagttatgggggcgtggaacagtggggaccacttataaagcgttgcttgatagccgtttgatcgtcacggtgaagagattagatgccattagattagcgggtgtagggagagacaaatttgagcatcacatggaatcagttggtgctttagggcatccgaatttggttccactcagagcttattttcaggccaaggaagagaggttattgatttatgattatttgccaaatggcagtctctcgtctcttgtccacggtaagcttcgtaaaccatatctcatgcgattatataatttttattctttttgagcattgaattttattacatgattagtagatttatcattgaagacatcaagcatttgtttggtttgcgtgattaatgcttgtaataaatttactagttacgacttacgaggttttttactcaattttttaaaactttactgtacagttagctctagtggtcagatggaatttctatacagttaactttactatattttttattttttttgaggtctcaaaagcttatgttacaagttggtatggtatttgtttaggtacaaaatcgtcgagggcaacgccattgcattggacatcttgtttgaagatagcagaagacgtcgctcagggtctctcttacatccaccaagcatggcagctcgttcacggcaatctcaaatcctctaatgtccttcttggacaagactttgaagcttgtattgctgattactgtctcgttgctcttgcaacaaaccctcctctaacatccaatgacggtcaagaagaggcggatgcagcagcttataaagcccctgaagctcgacacaagagtttaaattatcaatcggttaaagctgatgtatactcctttggtattcttctcttggagcttttgacagggaagcaaccttcgaagattccggttttgccgttggatgagatgattgaatgggtgaggaaagtgagagaggaaggtgagaagaagaatgggaattggagagaagatagggataaattcggaatgttgactgaagttgcggtagcttgtagcttaacatcgccggaacagagaccgacgatgtggcaagtgttgaaaatgttgcaagagattaaagaagcggctgtgatggaagagtgtgaacttgttatggattctgctaattctgaaagctgtagagca

SEQ ID NO: 146465 - DNA, 2441 bp, Arabidopsis thaliana landsberg
actaaagggtttaagtatgttgggtcgtacaagcccattgggcctttatcaggctattaaggattggagtttaaatatcgaaaataaagttgagggttaaaacataaagtcggtataaattgggagtttcaaatgcaatataagcttcaatataatagaattgagaaaagggttcgaggtaaaaggagaaagcttgaaacgccgcttcttcttcttcttcttcctctgtcgttctctctgtaaatcgcttcttcaatcatctctgtggatttgtctctattcgtaagttttcgtatctgtgtatatattctcaaagagattgataaactcttaattgtttctgtcaatttttgaaaaaccctaattttgatatggttttggtaaagctgcagataacttggtgaagaagatgttgacggaagaggagctcaaaagattgtacagaatccagaagacgttgatgcagatgttaagggatcgtggatattttatcgcggattctgaacttacgatgactaaacaacagtttattaggaaacatggtgataacatgaaaagagaggatcttgttactcttaaggctaagcgaaatgataatagtgatcaggtttgtagttgtatgtctctccttcaatgtgattatcagcttctctttagtgtcctttagctggagactatcattatttatctagttgttgaatgtgaatagtaagtagacatggaatgttacagagagctagattttgacaaaagtatagataaatgtcatctctttaatctctaagaacctgtggatatggtagaaagattgtttatgtgtgtttgatttagtcgctgattcatgtgctcttgttgtagctctatatattcttccctgatgaggcgaaagttggtgtgaagacgatgaaaatgtacacgaacaggatgaaatcagagaatgtgttcagagctattttggttgtgcaacagaacttgaccccgtttgctcgaacttgcattagtgagatctcttctaagtttcatctggaagttttccaggtaaaacaaatcactttgtgtcttgactcttgatgatgatgtatccacatcacaatcctactaaaccatgatttggtggtggatgctgcaggaggcggaaatgctagtgaacattaaagaacatgttcttgttcctgagcatcaagttcttaccactgaagagaagaaaactttactggagagatacacagtgaaggagacacaggttagtagtatatagaaactttgattgatttctgggagatgcaaagctagtggcatgagtaatgattatattttagaaatgctatccaaaattaatttgaagatgtttataaatataatacaatactttaaaattattcttgaataatacttaatcactaaaatattaaagaatttggcgtgagaaaagctatatacataaagtaaaactctatatgataatcaaaatttaagatctataattcctatattacatttctaataagatcataagcatatatatagttgtaccttcaaataagagcgataactttgaatgagaaaatcagcatattcatcgaaactgaaattttcattggtagtgtagggagccggcatgaaatagttgttgagataatcattgcttccaatattaattgtatatagacacttcttaagcttctcctctggaactcccgccgtcataatcatcttccggtgattagttatttgcttttcaaaactgattctttcaccctatattgtcacaaagaatacactttaatccataaaacatccagaaaacttatcgattattataaatattgtctatttagtgtctaaggttttccatttgcaatcaaagaattagatagccgatggaatgttcaaagtaggcgttgctgtaaacaaaaatgaaaatatctttaaataatctctctcattcttaccaaatgttggctagtttcttcacgtattccgcctccaccagaagcgtagtttattccgatgtgagcttgttccggtgatgctcccgtgaacggtggaatgtaatcactgaatctcattagttcagctgaaatgaagacaaattattcaaactcgtatctcatacaatgtttcggtaaacatataagaaccaacttgagaaactttagttacttctttaatttcaaacatgaaaaaactttaatttcgttagttcttatatatctcattagtttagctgaaataaggacaaattattcttttgacaaaaaaaaaaggacaaattattcaaacgtatataatgttttaagtggcattttatgactactttttctttataactaagttctatatatgttttaccgatcaaaactttaatttcttccctttttcatgtattcatttgatacattagctagaatcgaataatacctacattcgggcgttcacct

SEQ ID NO: 146466 - DNA, 643 bp, Arabidopsis thaliana landsberg; identical to SEQ ID NO: 27274
  unsure (1)..(643): unsure at all n locations

SEQ ID NO: 146467 - DNA, 840 bp, Arabidopsis thaliana landsberg
cctgtcgtgccgtttggaggggcagaatcaaaatatagtgtcgaacaagttggtgtaactggtgttttttatggtggagaactgaatggagcgggttatagtgaacccgcaactgcgaaaaaatatgctcgacgggctgaattgggtgagattgttgaattagatcggtgcgactgtgaaatctgatggtgtttttggaagcagcccaagaggttggtttacgtttggacatgcttggattgctatgcatttcttctttggacacatttggcatggagctagaaccctcttcagagatgtttttgatggtatcgatccagctttgtatgctcaagtggaattcggggcattccaaaaacttggagatccaactacaaaacgacaagcagtctgatgcaacattgctttttttcttctagtgtctgtttgttattttatttaataggtagggtactgtaggaatctttatttaaatcgctgccgattctttgactctgtttctttctttatcctcccaagtgaacaaaacgtaaacaaaacaggtatgaaagctataattgtaaaccacgatcaaatttatggaagcattggtttatacatttctcttagtatccactttagggataatttttttcgctattttttttcgggaaccacctaaaatttcaactaaaaaatgaaataatttttcattatcttcattaacgtaatcagcctccaaatatttggaggctgattacgttaactagtctccgtgttcctcgaatggatctcttagttgttgagagggttgcccaaaggcagtatatagagcagacccagtaaaacttacaggtaaca

SEQ ID NO: 146468 - DNA, 2885 bp, Arabidopsis thaliana landsberg; identical to SEQ ID NO: 5971
  unsure (1)..(2885): unsure at all n locations

SEQ ID NO: 146469 - DNA, 1530 bp, Arabidopsis thaliana landsberg
tcaaagctctctttcttctctctcgagatttgctaacttgtcaatggcggatgttgagaatctgaactctgttccggcgtcggaagacacagagtatggatttaaacggccggagatgtacagcacaaacatagccaattccataacttcctacgctcgtcatgtttttgttctttacaaaactcctgaagcttggctctctcacgtcgaagaagaaggtttacctcaacgtttcgctacgttgcttaaagatcgcaaatctgatcttcttgttcaggtttatactaaaacgtttgacattttcttacgttgtatctctttctgatgaagattctcattagtcattacgttgactttttttgttgttgttgttgtagacgaagctcaatgtatgtgaaggtggtggatccgacggtgatgttttgatttttcccgatatgatcagatacaagtgagtgtgcttaagttttgtttttgttagcttaagatttttggaaaaaaaatagttgactagaataggattttgactcttagctagatttatagtgtgtaaattgttgtataagctagttttagaaactttagaagttagattatagatcttagtatatttctcagatctatgagatccaaatttgcattttgtgattttgtttaaactattattcgtgttggtattgacaataggggggttaaggatacggatgtggaaggtttctttgaagatgttcttgtgaatgggaagccatggagttctgggatacaagaagagatatctggaacatttgtatttgtgtgtactcatgctagtcgtgacaagagatgtggtgtttgtggaccagtgatcttagagaggtttaagcaagagattggttctcgaggactttcggaccagattacactgaaacgatgttctcatgttggacagcacaagtatgctggtaatttgatcatcttctgtcctgattcagctggaaagattactggcaattggtaagtaaatggttggatcatatgaaaatgttagtagtttatggtattgtcaaataaccgtgttggtttaaatgtaggtatggctatgtaacacctgatgatgtacctgaattgcttgatcaacatattgcaaaaggagaaatcatacaaaggatttggaggttaggtttctagctagtctacatatatgtctctgtgataaatgtgtagataagttatggtgatagataacgtttacttggacttaaataagtgacttttgtttcagggggcaaatgggtctacctggaggtgaagctgagaaagtgcatgaacagaaagttataccaaatggtaacggtgtagtgaaagaggagagcaaaggattcacaggaggatgttgtcagggatcaaacggtgtttcgtgttgccaagacgaaactccaaagccagagccaatcaagaaagaagtaaaaaagtgtaccatatggttccagcctcttgacaaagaagagctttacattggagctgctgggttggagccattcaaaaatagcc

SEQ ID NO: 146470 - DNA, 5149 bp, Arabidopsis thaliana landsberg
aatatttaacatcttccgaatatttgattttgttatgttctgtgtcctaacttaatgtaatgacaaggtgggtttttacgtaacgcatcacatttcacataataaacgttttatcatttttcctaataaatgctataattgttgcagttaaagcactgaaccaagcacagttagaagcaaatgtgagggtaaccggagaaaccaatttcaagaataaatggccaagtccctttgcggtggtttccggcatacttctcctcctctccttcttcaaatacctttactctcccttccgttggctcgctgtcgcagccgttgtcgctggcatttatccgatattagccaaagctgtaacatctcttgcaaggtttagaatcgacatcaacattcttgttgttgtaaccggtaatctttttcttcttttttaactcctttcaagctaaaattcgaataggctttagggagtcactctccaatttatatgatatggatcacatttctcacaatattaattaaggtcaatattaagatatatactaatggctacagtagatataagtatgtgtctataatattttgatgggtcaatttagacatattatggtcaacacaaagcaattgttctgtagttttttttttgtgtcttttgctctgcatttggcatttttatgctactttgagaccaaaagagaaatcaaaaaataaaaaaagatttgaaatatttttatgttagataatgtttacaactttttgttatagtatcttgttcaagagttcttgatcatgttgcagctaaaatatgttaaggaaaattgattaaataattactcaaatccgatttaatagctcacttgatgctcttcctttgtttcaatcagtgggagcaacaattggcatgcaagattacacagaagctgcagtagttgtcttcttgttcacaatcgctgaatggctccaatctagagctagctataaggttttgcaccttttttccatctcttttgattcatgcgtcaaagattttgttagtgctcaagtatttatttacattttcaggcaagtgcagtgatgcagtctttgatgagtttagctccacaaaaggccgtgattgcagagactggagaagaagttgaagtggatgaactcaagactaacacagttatagctgtcaaagctggtgaaaccataccaattgatggagttgttgttgatggaaactgtgaagttgatgagaaaactttgaccggtgaagcattccccgtgcctaaactgaaagattcgacggtttgggctggaaccatcaatctaaatggtataaaaaaggctcaagcgttacacttttttcttatgaccttcaccttcaatgtttgatatttccagctcctctgtttttcaaggttacataactgtgaacaccactgctctagctgaggattgcgtggttgcgaagatggcaaaacttgtagaagaagctcagaacagcaaaaccgaaactcagagatttatagataaatgttccaagtactatactccaggttagtatcagcacctgactttttttcttcattacaactttttttgttcttgattgagaccttaaatctttttgcttgtatgcagcgatcatcctgatatcaatctgttttgtggctatcccatttgcattgaaggttcacaacctgaaacattgggttcacttagcactagttgtgttagtaagtgcttgtccttgtggacttatcctctccacaccagtagccactttctgtgcactcacaaaggcagccacatcaggacttttgatcaaaggagctgattaccttgaaaccttagccaagatcaagattgttgcttttgataaaaccgggactatcactagaggtgagttcatcgtcatggatttccagtcactttctgaagatataagcctgcagagtctgctttactggtgaaacatctcttctaaccttttaatactttactaaagacacttgtggttttgtggacttgtctgagaattgagaaatatgacttgtatcagggtatcaagcactgagagcaagtcaagccatccaatggctgctgcagttgtggactatgcaagatctgtctctgttgaacctaagcctgaagcggtcgaagactaccagaactttccaggagaagggatttatgggaagattgatggtaacgatatcttcattgggaacaaaaagatagcttctcgagctggttgttcaacaggtacttgtaatataaagctcaacagaatgttttgaggtcttggtattctttagtctgagcacttgattgttctttctttacagttccagagattgaagttgataccaaaggcgggaagactgttggatacgtctatgtaggtgaaagactagctggatttttcaatctttctgatgcttgtagatctggtgtttctcaagcaatggcagaactgaaatctctaggaatcaaaaccgcaatgctaacgggagataatcaagccgcggcaatgcatgctcaagaacaggtgagactaatataaaccatatttttaatcactctcttaagcgaagacgttgtttaatagtaccttgaaatgttttatgaaacagctagggaatgctttagatgttgtacatggagatcttcttccagaagataagtccagaatcatacaagagtttaagaaagagggaccaaccgcaatggtaggggacggtgtgaatgatgcaccatctttagctacagctgatattggtatcttcatgggaatttctggctctgctcttgcacacacactggtaatattattctgatgtctaatgatgtaagaaggataccacaagcggtgaagctagcgagaagagcacgacgcaaagttgttgaaaacgtgtgtctatcgatcattttaaaagcaggaatactcgctttggcatttgctggtcatcctttgatttgggctgcggttcttgttgatgtagggacttgtctgcttgtgattttcaatagtatgttgctgctgcgagagaagaaaaagattgggaacaaaaagtgttacagggcttctacatctaagttgaatggtaggaaacttgaaggcgatgatgattatgttgtggacttagaagcaggcttgttaacaaagagcgggaatggtcaatgcaaatcaagctgttgtggagataagaaaaatcaagagaatgttgtgatgatgaaaccaagtagtaaaaccagttctgatcattctcaccctggttgttgtggcgataagaaggaagaaaaagtgaagccgcttgtgaaagatggctgttgcagtgagaaaactaggaaatcagagggagatatggtttcattgagctcatgtaagaagtctagtcatgtcaaacatgacctgaaaatgaaaggtggttcaggttgttgtgctagcaaaaatgagaaagggaaggaagtagtggcaaagagctgttgtgagaaacccaaacagcaggtggagagtgttgcagactgcaagtctggtcattgcgagaagaagaagcaagctgaagacattgttgtcccggtgcagattattggtcatgcattaacgcatgtggagatcgagttgcagacaaaggaaacctgcaaaacaagctgttgtgacagtaaagaaaaggttaaggagacaggtttgctgctttctagtgagaacacaccttacctggagaaaggagtgctgattaaagatgaaggaaactgcaagtctggcagcgagaacatggggacagtgaaacaaagctgccatgagaagggctgcagcgatgaaaaacaaaccggggaaataactcttgcttcggaggaagagacagatgatcaagattgctcctcgggatgttgtgtgaacgagggaacagtgaaacaaagcttcgatgagaagaagcattctgtgttggtggagaaggaaggtttggacatggaaactggtttctgttgtgatgccaagctggtttgttgtggaaacacagaaggtgaagtgaaggagcaatgtcgtctggagataaagaaagaagaacattgcaagtctggttgctgcggcgaggaaatacaaaccggagaaatcactctggtttcagaggaagagacagagagcacgaattgttccacgggttgttgtgtggacaaagaagaagtgacacaaacctgtcatgagaagcctgctagcttggtggtatcaggcttggaagtgaagaaggatgagcattgtgagagctcacacagagccgtcaaggtagagacctgttgcaaagtgaagattccagaggcttgcgcatcaaaatgtagggacagagcgaagcgtcacagtggtaaaagctgttgcaggagttatgcaaaagagttatgcagccaccgccatcatcatcaccaccaccaccaccatcaccatgtgagtgcttgatggagattgattgaataacttaaactcttgatgcatccatctattcacattacgtttagtctcattccgtgaatgccgaaataaaaaacaaaatgttccagcaaaggcagtttattagattaagcaactgtgttattcataaagacaatgctagtgatttttttttagtactttatgtattgcaattcctaaagtattttgaactttgatcttaagagtcttaaaatcaaacaaaccaagcagttgaaacagacctggatcaaagttagtgttaccaattaccatccataagctgtcctttcgtttcccaagtagctggaggagtagaaaccaaggtaggacatgatctaatgacttaagataatatgatttttcattgatcgatgagataaaagaacactgatcacaccaaaaaacaaagaaagtgagttttataatgaagcagattaaaatatgagatgataaaggattatatacaagatgctaacacaatgcgagttgtgctatatgatgatactaatatggaagtgtgaagaaaactaacaaatcttctaagacctgttttcatttatactctgaactttaaattccctatttcacagcattgctgatcattatcttcttctccttcatgacaacaaaaaataatctggaagagagaagcaaaatccagtacatgtcctgggacaaaaccgtcttgagagtcttcacatc

SEQ ID NO: 146471 - DNA, 1583 bp, Arabidopsis thaliana landsberg
ttgatgcacctaaaactacatacaagtttccacatttttacttttagttaatgattgaacagagcttcttcaagctttgtgtgctgatatggtgtgttactgcttgtgtttaacttctggtttatcttttttttccatgtcctgcagcatccagagactcatctaatttgttagcacatgaagctgcatttgcattgggtcagatgcaagatgctgaagccattcctgctcttgagtcggttcttaatgatatgtctttgcatccaatagtacgacatgagttgagtataagttgatccttattttctctgtatcagtataagctttttgattctttcatatcactgattcgctgttaatatattattacaggcagcagaagcccttggagctattggtttgccgggtcctgttaacattttaaagaaaagcttgagatcgaaaccagctcaggaggttcgggaaacatgtgaattagctctcaaaaggattgaagacatgagtaacgttgatgccgagaaccagtcatcaacgacagagaaatcacctttcatgtctgttgacccagcaggcccagctgcgtctttctcttctgttcaccaactcaggttcttccactcttgaccacctcaacattctctagattatttaatattttgtagcacgttattgattaagatcatcgaactacaggcaagttctcctggatgaaacaaaaggcatgtatgagagatatgctgcactgttcgctctaaggaatattgtggagaggaagctgtttctgccatagttgattctttgagtgctagtagtgcccttctacgtcacgaggtttgtcaactttcctgtattatgttcatgaacttgaatgtgtctgtttttgttaaaatcttgtaccttgaatctttgctttattgctctcgaaccttaaatctgtataagtgctgccttgtaattgatgcaatttttcttaggttgcttatgtcttgggtcagttgcaaagtaaaactgctttagctactctaagcaaagtacttagagatgtgaatgagcacccaatggttagacatgaggctgcagaagcgcttggttctattgctggtatcttccctaaaatgcttagtttgagattacaacaatctactgtcttagtctttagtctttacttactcttcacattgctcggcccttttcagatgaacagagcattgctttgctagaagaattctcaaaggaccctgagccaattgttgcacaaagctgtgaagtagcattgagtatgttggaatttgaaaattccgggaaatcgtttgaggtaaaaacacattgatcccaaactcttacacttatatatatctaataaatctgtaatgaccccatatcgaaacatttttgcagttttttttcacgcaagacccgcttgttcactaagaatctcaatcattcttcgtcaaacatttaccgacaaaggaaagcaaacattttatacagagagagaagaaactgctactttaacatgtctttatgtacgattataaataactctattcatatgtttaaggttaagattacattgtcttatg

SEQ ID NO: 146472 - DNA, 2544 bp, Arabidopsis thaliana landsberg
  unsure (1)..(2544): unsure at all n locations
atggctctctccgtatttgcctttccttcttacataaataggaatccttcactaaaatatcttaaaccttcttctatgtcttctacaaaatatgtgagagtttttttcttctttccctcttttacttattgattactatatgaagttgcattattatcaaagttctgcagattatccgtgagaaactatattacgtacactagttgttggtaaggttgtgttagttattgaagtaattgaaagtgacataacatctttttttgggtcagtcagaagcaagagcaacaacattttcagagaaaggtgaatattattcaaacagaccaccaactcctttattggacacaatcaaccatccaatgcacatgaaaaatctctccatcaaagtataaatcctaatccaagtcttgaaccttgttttgtgtcaaatcaaggatgtgatgatgaaaaagtgttctgctatgtaggaactcaaagttctttcggacgagttgagatctgatgttatttttaatgtttcgaaaactggaggacacttgggttcgaatcttggtgttgttgagctcactgtggcccttcattacatcttcaatactcctcatgataagatcctttgggatgttggtcatcaggttggttatctcattgcaagcataagttttcctttagctacatgtacaagtgtttttaacttgttttgtttttgtctttttgacaagtcttatcctcacaagattctaacgggaagaagaggaaagatgaagacaataaggcagaccaatggcctctccggctacaccaagcgaagagagagtgagcatgactcttttggcaccgggcacagttcgaccacactatctgcaggcttaggtcatacttgttattttcttgtgtcacaagaaaacaagaaaaatcactttcctaacatgcatgcggaaattgtgaatcagggatggctgtagggagggatttgaaggggatgaacaacagcgtggtttcggttataggcgatggtgctatgacagctggacaagcttatgaagcaatgaacaatgctggctacttacactccaacatgattgtgattctcaacgacaacaaacaagtatctttgcctactgctaacttggatggaccaactcaacctgttggagctctgagctgtgctcttagtaggctgcaatctaatcgtggaatgattagagagactagttcaacactgtttgaagaacttggttttcactatgttggtccagttgatggacacaacatagatgatctggtctccattcttgaaacattaaagagcaccaaaaccataggaccggttcttatccatgtcgtgactgagaaaggtcgtggatatccttacgcagagagagctgatgacaagtatcatggtaaaattaattttcatatcttcttgactatactaagcactcttggattgatccatatttctcattcttgtcaggagttttaaaatttgatccagaaacaggtaaacagttcaaaaatatttccaagactcagtcttacactttcctgttttgtggaggccttgattgcagaagcagaggcagacaaagatattgttgccattcatgcagccatgggaggtggaaccatgttgaatctcttcgaaagccgctttcctacaaggtgtttcgatgtcggcatagcagaacaacatgcagttaccttcgctgctggtcttgcttgcgaaggacttaagcccttttgtacaatctactcatctttcatgcaacgggcatatgatcaagtaatagagtcacatatttttggttatttgcttattgtgatgtggtaactagactaaaactagtttgtgtaggttgtacatgatgttgatctacagaaactgcctgtgagatttgcaatagatagagcaggacttatgggagcagatggtccaacacattgtggagcatttgatgtgacgtttatggcatgtctaccaaacatgatagtaatggctccatctgatgaagcagagctttttaacatggttgcaaccgctgcagctattgatgaccgtccttcttgctttcgatatcatagaggaaatggtattggtgtttcacttcctcctggtaacaaaggtgtccctcttcaggtatgtttagtaaaaacaatattgtgaatccaaaactttaacattctaagttttaatctttgtgtgtttttaatttcagattgggagaggtaggatactaagggatggcgagagggttgcgcttttgggctatggatcagcggtgcaaagatgtttagaggctgcatctatgctaagcgaacgcggattaaagataacagtagcggatgcaagattctgtaagccgttagatgttgctctcattcgtagcttagctaaatcacacgaggttttgatcacggttgaagaagnnnnnnnnnnnnnnnnnnnnnnnnntgtggtacaatttcttgcactagaaggccttatacatggaaagctcaaggtacattaacaattttttacacattcttaatagtcatttgtat

SEQ ID NO: 146473 - DNA, 2185 bp, Arabidopsis thaliana landsberg
ggtctatccaacgtataaaccaaatataaacacacaaatttattttcattcatagtttaatctaagaatacgaagagatgcagattgagatggaagagaagtttgaagattggagaggcaaagaggcaatttctggcaaacatggtgggattaaagctgctttcattgcttgtggtaactttctaaaactaaaaaaaaaacatttaacaatcactaatatcaatagatattcatcatgagtttggtgtggtctaatggatagttgtagagacgatggagaatatggtgttcttagcatgttcaaccaacttcatgatgtactttacgaaatcaatgaattactcaacacccaaagcagcaaccatggtgactaatttcgtagggacatcgtttttgctcactattttcggtggttttgtcgcggactcttttctcactcgcttcgctgctttcgtcctctttggttccattgaactcctggtaatgaataaactctattaaatcgtgttaaacagtttttttttttctttatatgaaaagtttactcttttctttgatagggtttgatcatgttgacactccaagctcatatcactaagttacaacctcaaggaggtaaaaaaccttcgactcctcaatcaacggttctattcactggactttatgcaatagctattggtgttggaggtgtcaaggggtcgttgcctgctcatggaggcgaccagatcggtactagaaaccagatgctgatctcaggattcttcaattggtatttcttctctgtctgccttggtggtttcttggcagtaacacttatggtttggatcgaggagaacaaaggatggagctccagcttcactatatctaccgtggttttagcctctgcgatcttcattttcgttgcgggatcccgatgtatcgattcaagcgcccagcagggagtcctttgaccagaattgtgaatgtgtttgtttctgccacaagaaaccgaaataggtttgtaacggatgcagaggtggtgacccagaatcataactctaccgacaaaagcattcatcacaacaagttcaagtaattattctaaacacatctttttcttgttttgttctttttctccatgaatatcaggaacggtcttgagaagtgccacgaccatcgtttgggaccctatacatagttcctttataattaacaaagcaaaacatagaataaacataaaaaataaagttttgtggactttaatattttaggggttttaacaatttttcatgtggtatatagatagaaaattcgactagtaagaaactgaatattttctggaagccatagtgttgttaatttattttttaaaagcgactttttatttattatatatgtgatattcaaagtcattataacatgtatactatatttttaaaacctagtttttatttatgttcagtgacaactagagcctcgtttttttatttagtcttggggttagtatttaagtatcatgtaaactataatttccaggtttttgaataaagcaaagctcaacaacaagatatcagcaacacaagttgaagaaacaagaacgtttctagctctccttccaatatttgggagcacaattataatgaactgttgtgtcgcacaaatgggaaccttctccgttcaacaaggcatggtgacaaacagaaaactctcgcgttcctttgagatccccgtggcttccctcaatgccattcctctactgtgcatgctctcttctttagctttatacgagcttttcggcaaaaggatcttatccaatagcgaaagatcgtccagcttcaatttgaaacgtataggatacggtttagctctcacctctatttcaatggcggttgcagccatcgtagaggtcaaaagaaaacatgaagcggttcacaacaacatcaagatctctgtgttctggctagagcttcaatttgttatgttgagtctctcggatatgttgactgttggaggaatgttagagttcttctttagagaatctccagcgagtatgaggagcatgagcaccgcgttagggtggtgctccaccgcaatgggtttcttcctcagctcggttcttgtggaggttgttaatgacatcacgggatggctccgcgacgatcttaatgagtccaggctcgaagtattttatttggtttatatgtgt

SEQ ID NO: 146474 - DNA, 2779 bp, Arabidopsis thaliana landsberg
ctcgttcattactgttgcaagtcggccgactatcagaccaaaggttttcaacgtccgacgctatggttttagacctgacggaaaaactgataatgccaatgtatgtacacaataacttttctaatcaatgttaatagttatttatttagttttgttgattcccaatttatattggcttccaaatacattgaaataagctcaactcaatatcaaaatacatttaaatagtctaataatatatgttgaaaaaacattttgatacgatagtatatataaatcttcttgactttctacataacaatttatggattggtattatattaaccaattaaatttaactaaatcttttatcaacttctatggatttttttgtttaataattaacctatcttattcttaacatatacaaaattaggcattcacaagtatatggaaacgtgcatgcacaaggataagtggaagtagtaaaatctacgtaccgaaaagaacattctacctcggtggtgtagagttcgtgggtccatgcaaaaatcgtattgaattcattatcgatgcaacattattagcgcctgctaatcctaacgacattaagcaagacacgtggatcaactttaggtacatcaacaatcgttctatctctggttccggcacactagacggtcaaggaaaacagttttggccactcaatgtctgccacaaaaaccccaactgtcctaagctagctatagtaacattgcttaaacttttttcacttatattattatttacatttaaagcgtattacaaaatgtgtgatatgatacttatacaataataaaaaagtactattcaatcattatttactatacacattttattaaagtaacaagtcttttaataaacttgaaatattttatagactataggatttgcattcgtgaacaactcaaatatcaaagacataacatctctcaacagcaaaatgggacacttcaactttttctttgtccatcactttaacattaccggcgtcactataacagctcccagcgatagtcccaacaccgacggtatcaagatgggttcatgtagtaacattcaaatctccaacacaaacatcggtaccggagacgattgtatcgtaaatctctctggaaccactaaactcaatatctctaacatcaattgtggtcctggacatgggattagtgttggaagcttagggaaaaacaaagatgagaaagacgtgaaggacttattcgtaagagacgtcattttcaatggtacaagcgatggtattcggatcaaaacttgggaatcatcagcttcgaagatccttgtttcaaacttcgtgtacgagaatattcagatgatcgacgttgggaaaccaatcaacatcgatcagaagtattgtcctcacccaccttgtgaacatgaaagaaaggttaacttcctatgcaaaaacaagctccatattattttattttatcacaagaacaaaaactaaagacaagttgtgttttttttttccagggagagtaagaacatatatggaacatcaaagaacaatgtagcaatgaatcttcaatgtagcaaaagctttccgtgcaagaatgttgagctaattgacattaacataaaaaataatggacttgaagatagttcttccattgcagtttgcgaaaatgttgatgattctgtgagtggtaaaatggttcctcaacattgtataaattgattcgacggtccatcaaaataataatgatgtgttgtatatgatactttcatttatgaataaggcaaattatttgatgtataggataatgtttttttttttaaccgaaatttcaaatcaaaacataaatatgtatataatgtttcagataaaataaaaattaacatccataatctacaagaaattgcattttctgaaaatcgaatagaaacacatgattaaacaattggacgaagaatttctacataaatctctgaataaattcaataaatccggttcatctgaagaaactagattgaaccatactctggttcggttttaaaatgggccgtttgagagtcgagaaggcccatagttgataacattcaggcttcaaattgcaaatgatatacaaaaaacaaattatgcggcttattcgtaagaattactaagattaagggtacaattgaaatttagattgaaccaacggcggatgtgaaatcaacagcagcgacgactgcagccgtgccgagcactcatctcttcttctctctcagtctcgctcgccatctccgtggagatcctcggacatggtcatgagatcgtaagagagaatcttcaaaaaattgaaattggaaatcgataagctaggagctaaggagaaatgtcggggaaactttggatcccgagatttattctcattactctactgtttattagctcacgagtttactctcaatgtgaattcagtttcactggacgcaacaaggtctttcatttcaacctagcatcttcgattcggaattatcctcacggtgtgctcagcgaagatgggtactttcgcttttccttttgtcccagattccatttcttatatgcttgagtttcgctttcaatttcaaattttgtacatcttatgaaattattatgtaaaatgttgcatttggtattgtgatttgtactggatggtgttaagttaaaatgttcgtcttacttcatttgtgttgtgcttatactaaatgcaataattggataaccaggttttataaagtggaagcgaacagttccgtgttatggtttcaggtt

SEQ ID NO: 146475 - DNA, 804 bp, Arabidopsis thaliana landsberg
catcaagttactagtgcttttttttttttttttttttttaagtttccaatgacagtggcagtacctctatttttttctttaattcatttattttacaaatattgccgttttgatacatttcataaatattaaatacattgttaaaacatttatctttaaaagtgagaatggaagttatgtttttttgtcaagaggttgtagaatcaagggaccatctatttttctctcgtccctactccactcaagtatggtcagctctaacccagcatatgcttggtttgtggtttactacacgctgggagtctctaatcgctctaatcatggcctcgactactccacaagttgtatgatcatatattaattagagaaacaaattaatagtagatatagaacataccattcatatctagagacaaggcatttccacgcccacatgcttgaatcatatttttttgtggcaattcactcctagccaattgaaattgtgtgatgaatgttttatctagggtgttaagtggcttcattcgaatagaacatattgtttcttaatgcattatattgggatgatataccaaaagttgagtctcaagcatctgatcttggcatttcaaaacttttattagcttcagactcgcaacagctagtcaaagcatttaatggagcaccacaccctatggagctcagaggaattcttcacgacatcctcgatctctctttaatttttgctgaaactagttttggttttgtgaaacgagagaacaacctcaaagcagatgccttatccaaggctgctttaaattcaat

SEQ ID NO: 146476 - DNA, 1268 bp, Arabidopsis thaliana landsberg
tcgcagaagttgggattcgtctttttataatttgccctgaaaacgaaaacgaaaataaaaagcggagagagagatggctagatacgatcgagcaattactgtcttctcccccgacggtcacctctttcaagtcgaatacgcccttgaagccgtccgcaagggtaacgccgccgtcggtgtccgcggtaccgacaccgttgtcctcgccgtcgagaagaagtccacccccaagcttcaggattctaggttttatttccatctcttcacttttatcatggcaccaattaacagacttgccctctctacttattggatcctgcttggtttactctcagttgctagttgactgaacaatgttgatacgactgctttattttggtcttgttccctatttaatggaatctgcagctgaaacccttgtttaaaattgaaccttgttcctaattgcgattgtctcagttgttactcttttctaacatgtatgatggctttggcccttccctgaaaagaaatctacttaattgttcaattctcttatactgctgcctaaccaatatattttggagaggtatttgtgtttctctatctagtttgttagatgaagctgatgtcctgtgcttgtttctgacagatcagccagaaaaattgtgagccttgacaatcacattgccttggcatgcgcggggctcaaggctgatgcccgagtcttgattaacaaagcaaggatcgagtgtcaaagccacaggcttacacttgaggaccctgtcactgttgagtacatcactcgctacattgctggcctttaacagaagtatacccaaagtggtggtgtcagacccttcggtctttctactcttatcgttggctttgacccttactctcgcctcccttccctatatcagactgatccttctgggactttctctgcttggaaagctaatgctaccggcagaaactccaactctattagggaattcctcgagaagaactacaaagtatcctctggccaagaaactattaaactcgctatccgtgctctgcttgaggttggtgccctctccgtcctagctgatattttgttatttcaggattttttgtcctttgagatcatagctgttttgatatcggctttgcattgcaggtagttgagagtggcggaaagaacattgaggttgccgtaatgacacgggaggaaactgggctgcgccagctagaagaaggtgaaagtgatgctttcgtgaccgagacaaaacatgttttggcggccg

SEQ ID NO: 146477 - DNA, 1784 bp, Arabidopsis thaliana landsberg
cacacataagaaaagaaattaacaaattatcacaaaaatacgttttcttgtataataatttttctctagatttgtcgcttaccttttgaaattctccggcgatgaatctcgccgggaaaaggaatattccggttattatttctgtttccgttactagtgactcttaccatcgccgtcatgtcttccgtgaacatcgtcggagctgaaaaatcattctcctagactttttttttttctttctctctttgttattattattctttgcttcgtttttgtgaagaagatgatccgctgatttcagaagttttcttcttctggtttttagctgagaggttttggtagattctgtttcttcttcttcctctgtggttttcgaatccagttttggaatttttgaagattttgtttagtttctgttgaagagatctgagatatttgaacgaagcagagtgtatatgaaatcaaatctgtgaaagttctttgaatttgaattgactttggacttgtgagagaagttagatcttcttcttcgtgagctatgccatttacgatgaagatccatccgattgatatcgattcttcaccaaccgtagctagagctgaatcaggaaacaaaccggtgctcaaatctcgtctcaaacgtttgtttgatcggccgtttacaaacgtattgagaaattcaacaactacaaccaccgagaaaccattcgttgtcaccggtggtgaagttcaatgcggcggaggcggcggagtagtgacggagttcgagccgagttctgtttgcttagcgaagatggtacagaacttcattgaagaaaacaacgagaaacaagctaaatgtggacgtaatcgttgtaattgctttaacggcaacaacgatggttcttccgatgatgaatcagatctattcggtggttcaatcgacggttgcgacgcttctgatcatctcaaggtaaccacaacaacaacaacaacaaattcttaatctctcttgatttaaacatgaaactgaatttgaatttgtcgatctgaaacagagtttgattccgtgcacaaccgtcggagagaggaatctgttagccgacgcggcgaagattgtagataagaacaaatcggtgaaacgaaaagacgatatgaagaagatcgtcaatgaaggactcttatcacttaattacaattcttcaatctgcaaatcaaaatgggataaatctccttcgttcccagctggtaaacaagatcttcatcttcttcaacacaacaactacttttttttattcatgaaatttgtgtgaactgatgaatttattaaatgttacaggtgaatacgagtacatagatgtgataatcggagaagaaaggttaataatcgatgtagatttccgatcagagttcgatatagcgagacaaacgagtggttacaaggtgttgcttcaatctctaccgttcattttcgtcggaaaatctgatcggttaagtcagatcgtgtttttgatatcggaggcggcgaaacagagtttgaagaagaaaggaatgccttttcctccgtggaggaaagctgagtatatgcgatctaaatggctttcttcttatacacgagcctgcgtcgttaagcagccggagagggagactgatgttgcgcagagggcccttgctgccgcggagaaggaggtggatagcgtatagatttagcatgctaccgtggagtaaatgattatctacgagagtgattgctaattttcactcctgttcaaacgacggcgatgatgacgtggcggaggagagag

SEQ ID NO: 146478 - DNA, 1471 bp, Arabidopsis thaliana landsberg
tctaagtctgtttccaagcatcatcatactaataacaacaccaccaacgttaatgctgctgcttctgggcttctccctaccaccaccagtgttcatgagcttctcgaatgtcctgtctgcaccaattctatgtaccctcccattcatcaggtctttcttttcaatcccttgttctctgatttcgtttccccggatctttaatttgttgattttgtttagggttttgagttaatgatgtgaatcatggatgttgaagcagtggttgtgttgctcttgtaacttgaaatttagttttatccattcactaatggctacaattgaaacaattgtcactaaattttgtcaatagctttgatagtttctaagattcttcttattgtttctttagagaattatggaataacagatagacaattatttgatttccctacagtgtcacaatggacatacgttgtgttcaacctgtaaagccagggttcacaaccgctgcccaacttgtagacaagagctcggtgatatccgttgtttggcactggaaaaagtagccgaatcacttgaactaccttgtaaacacatgtcacttggatgtcctgaaatcttcccttattacagtaagctcaaacatgagactgtatgtaacttcagaccttatagctgcccttatgctggatccgagtgttctgttacgggcgatatccctttcttagttgctcatctgagggatgatcataaggtggatatgcattctgggtgtactttcaaccatcgttatgtcaagtctaatcctcgtgaagtcgaaaacgccacatggatgttaactgtaagtacatatgaatcgtgcttcatagtatacacttagataagttaggaggctttgtttaaagtaataggattatatttgtgatgaaatttgatctgtctggtataaactgtaatgtgatcagctgagtcaaattttgcttttgttgcgagttagctttcctagagaaggtccagttatttatctaatctatggttgtgaattgtgaatcttccatctcgctatacatgttgacttgatatactttaatgcttatcaaggtttcctctgttttggttttgtttctggttcaaaaagaaaatcaggtctttcactgcttcggtcaatacttctgtcttcactttgaggcattccagctcggaatggctccagtctacatggcgttcctgcgtttcatgggggacgagacagaagctcgaaactacaattacagtttagaagtgggaggttatggtcggaagctgatatgggaaggaacaccaagaagcgtaagagacagccacaggaaagttagagacagtcatgatggactaattatacaaagaaacatggctctcttcttctcaggtggagataggaaagagctgaaacttcgagtcactggaaggatatggaaagagcaacagcaaagtggtgaaggtggaggagctt

SEQ ID NO: 146479 - DNA, 1361 bp, Arabidopsis thaliana landsberg
ctggcgcgtgtcaccccgactacgaggcgggtcttttaacgttaatatccggtataacacaagatccttcgggcatgctcagctcttggaagaagggtacttcttgctgctcggggaaaggtatcatttgctttaacagtgaccgcgtcaccatgcttgaactagtaggatttcccaaaaaacccgaacgttccctctccggcactctctcaccgtcgctagccaaactccagcacctaagcgtgattagcttaggaggtcatgtgaacatcactggatcttttcctaagttccttctccaattaccaaagctaaggtacgttgacatccaaaataaccgtctctccggtccacttccggctaacatcggcgtgctaagcttgttggaagaaatctttcttcaaggaaataagttcaccggtcccatcccgaactcgatatcgaatctaactcgattatcttatttcatttttggcggtaatctcctaaccgggactatacccttagggattgctaatctcaagctcatgcagaatctgcaactcggcgacaaccgcctctctggcaccatcccggatattttcgaatccatgaagttgctcaaatttctcgatctctccagcaacgaattctacgggaaacttcctctatcgattgctacactggcaccgacactcctggccctccaagtgagccagaacaatctctctggggcgatcccaaactatatatcaagattcaacaagcttgaaaagttagatctctccaagaaccggttctcgggggttgtgcctcaaggtttcgtcaatctcaccaatattaacaatcttgatctctctcacaatcttctaaccggtcaatttcctgacttgaccgtcaacactatcgaatatcttgatctctcttacaaccaatttcaactagaaacgattccacaatgggtgaccttgttgccgagcgtcttcttgttgaagctagcaaaatgcgggatcaagatgagcttagatgattggaagccagcggaaccgttgtactaccattacattgatttgtcgaaaaacgagatctcagggagtctagaaaggttcttgaacgagacgaggtatctgcttgagtttcgggcagcggagaacaaacttcgattcgatatggggaacctaacgtttccgaggacactaaaaactttggatctgtcaaggaacttggtatttggtaaggtgcctgtcacggtggctggtctacaaagactaaacttaagtcaaaaccatctttgtggagaacttcctacgacaaagttcccggctagcgccttcgccggtaacgactgtctttgtggctctccactttctccttgtaaagct

SEQ ID NO: 146480 - DNA, 1973 bp, Arabidopsis thaliana landsberg
  unsure (1)..(1973): unsure at all n locations
tcttctcagagttcctctaagacttcggttataatggctttcttctcttgcgtcgcttggctctacgtcgctggcaggtacctgtgcttcgtttttccccattgataatcgaatctccaatgactctagattagttcttagaattcgattgtcaaatattctggtgtcgtaattgaacatttttcttgtgattaggttatggcaagatgcagagaatagagtggtactcaataatatacttaagaagagttatgatcaggtttgggccatttcttttgctctactgaaatgttgtttgtttcttaattccttatcaattgataatgttcttggagggtgtagaagcctaaggttcttacggtggatgacaagcttatggtcctaggatgcaagtaagttggttttggttgattgtgtaagatgcattgtggtttatgttgtgtgcttgtaataatagattatgtactcgttgtttattagagatcttgagaggagaattgttgaaactgaaatggagttgactctggctaagagtcaaggctatcttaaaaatcaggaaagtgtctcttcttcagggaaaaaaatgctagctgttatagtagtttacgcaggctatgtgagtcacttgaagcccaataaatttagaggctcttggatgccccaaggtagaattatcacccctgctttgtatggtcatttaacaatgtttcattaaaaatatttggtacaatatattaagtattctcttatgaaatttacttctatttagatgatgctcttaaaaaacttgaggaaagaggagttgtcatacgctttgtgattggtcggaggttttcctactcactttattcttcatttctttagaattttaaagtttttcatggtctaatgttaatgctttataaatttccagtgctaaccgaggtgatagcctagataggaaaattgacgaagaaaatcgtgcaactaaagactttttgattcttgtaagtaaggataactcttttgcttcttttcattgccttcatatatgaatttcttctcactgatgtggcttccaatctacatttttctctcgaaatatgatggattattaggagaatcacgaggaagcccaagaagagttaccgaagaaagtgaagttcttctacagtgctgctgttcagaattgggacgcagagttttatgtcaaagttgatgacaacgttgacttggatcttggtagtacttcctctttcatctctttgtcttgcaaagctatgtttgatccaatcagggtatcaacgatgtctttgagtaacaaatgttttcggtctaacagaggggatgattgcgcttcttgaaagtcgtcgtagtcaagatggtgcttacattgggtgcatgaaatctggagatgtgattactgaagagttcgtatattctcaactatcttcagttcacataattgagatttcctagctgtgacaattgcccaaaagtctcataattaacattctcattctcatattaaatgggttgtttcttggtattcaggggaagtcaatggtatgagcctgagtggtggaaatttggggacgacaaatcgtaagtgtcttatacctcataggtcttctcgtttatgtcaagcccttgtgaccttcgttgtgtgtactcagtttctttgttcgatttatttaggtatttccgtcatgcaactggttcgctggtaatactctcaaagaatctggctcnnnnnnnnnnnnnnnnnnnnnnnngtttcacaatttggcagaagatgagtatatatgtcaaacaaagcttggtttgtaatcattgtatattttctaccatggtgtgtatatatatataaatgcagtggattgttgaagacatatgcgtttgatgataccaccattggatcatggatgattggcgtccaggcaacatatatagacgacaatcgcctttgctgcagcagcacaagacaaggtgtg

SEQ ID NO: 146481 - DNA, 2358 bp, Arabidopsis thaliana landsberg
tgggacatcattgaatagtcttagttcagttactatgcggtggcttaatttccagttcttattctcgctctttttgtatttttgcatgggggcggcgctatggcatcagctatcaacacactaagtatcacaaacgtaagctcaactttcaatagcgaacccttatgctactgcaaccagcttttatttttcttctatttgatttacctttctgtttctgaaagtaccttgagccatccacttttacaatgaatacctagcaagtggagaagcatccccttgtgaccttttctagttgtccagctttttgcataatctcctcctcgtctttactcaaaattaatgctagtatctgttaaggataagctcaagtatggtatggcttgaaatttttagtgcatttgctttaattactcttattttttctttctctcagaaactaagaaccaatgggcacgtgatgaccctgcgtttattgtgatctgtagcctgcttcttgttgttgcaactgtagcctattgtgtcacgtaagtgttttgtatatttgaaggtttagagtatgagagataataattgccttggaaaacgatttcgttttctgattttcgttgattatgtctatacttcaggtatgaccatagtagctctcatgccgttgtcgtagtcgtttcagttttgctcacccatttcttaatcaccggagcagttatagctacatgctgttggtaagtaatttctattattgcataggcatatacatttgttggtgcaaactcttatgcaacttaaatgttatgcttgctcgatgtctgttattctcattcgtgctataaagactgttactacctttactactggagttgcttatctgatcttattattcttgttttgcttattatatcatgcaagacaagcactcttaagatttggtactgaaacccgtcttgtgaacattgctggttttgtgaataccactcttgcacaaacctgaatcctgctctatagttttcttccttgtaattctaccacagtttgagtcgtttcttatatcaaatctacacggtttctctgacgcaagatatggattatcaggtttttgacaaattcttaccttcgcgagcacacccccaacagtcatgtggtggaacaacgcgttgaatggtaagtttatggactgaatcttatcttttcaccttcacctcctttctttggttgattttttcctctagaagatgagttagaacctccaaaacagaaagtttcgtgtttgtagttcagtatccttaccatagtttctctttttttataatctctatctgtgtgagatgttcatgaattttcttttatgcctttctctgtaggctgtatacatttgatgttcactgcaactcgttctttccaatgtttgtgctgctctacggtaaacccagtttcaaatacattattcaattctccaacccctcctgaagttaagatctctgcaaaaagagatatattacttacagtttcatcttgtattttgcagtcgtacattacttcttatcaccgctcctgatagcacacggattcatccctttactgctatcgaatctgcttttcatggtcggggcttcgtactaccattatcttaacttcctaggatatgacggtgagtcccctaagatcacttgtttccttctttcactattgatccgttgtataactcttgaactaacaagaaagtttgttatgaatccatacagtgcttccatttttggagcgaacaacattcttcctctacccaatcggagttgtcattgtcctgtcccctattcgtaagctcaatcagaatcattggtttcacagatatcttcttcctgaaaaggcgtatacatcatcttatgtttattctccatttttgcagttatcttaagcggattcaacccgtcaagatatttcatgaacatgtacttcagccaaaggttataaaaaaaacagccacatcagtggaatccttagggcttttgcactgcacatacatcattaaagtaaggaacaagaagattgagagagtaatgattttcccttttttacccgtaacagatcatcgtaatgctcagtttctggtacaacttcaaaaggctacttaatagaccagtaacattttctaaacatgacccctcttagcaagtgctctgttaaatgtagtgtttttttggcatctttcttttgcggtcattcatacgttacgtgttgcgactgtcattgagtcataagtacaaaatcatgatctcgcagattctggaaagttgtactaaaggaaggaccggtcagatatttgatctgatgatcatctctctaaggttaatggcttatgtt

SEQ ID NO: 146482 - DNA, 1499 bp, Arabidopsis thaliana landsberg
tatgcttttggtaatagatactttccttgacaagttgatggagaagcattgtgtgtttacaggagcttagtgaaacggcttctacaattgaaatgaagcactcgaaagagatatctgagcttatgagtgattacaagactatgtactcaaagtgggtctttgagctcaggtgagaaaagctcttacttttgaagctagaacctgaatattttagtttgtctatatacttctggtgttctcaattcttgttgctgcttccaggtgtggctttggccttctaatgtatggctttggatctaagaaagctttagttgaagattttgcttctgcttctttgactgactattctgttgtggtcatcaatggctacctcccttccgtaaatctaaagcaggtactcttttgtcagtttggatgcagcaattttttctcttgcgcagctctatgttcttcaggttggaaaagaagtagttttaaatgatgactaattgttcttttctgtgttgcaaatttaggttcttttggcattagctgaacttctatccgagcttttgaaatgtaaaagaaagagttccgggagtttgtctaaaggtcaagaaacatttccttcacgctccatggatgatattctttcctttctacatggtccacagtctggagataaagactgcttcatatgcgttgttgttcataacattgacggccctgctctaatagatcccgaatcacaacaaactcttgcccggctttcttcttgttcacacatacgcttggttgcctctattgaccatgtcaacgctccattatgtaagcactattctctatctctcctgctaattgcttatcatggctaaggtctattgcaaaaaaattctgttcactgctatctgtcaaagacttctaagaccttatgtactgcttatttgacctaaggctatgtttcttgtgtccattggcagtgtgggacaagaaaatggtgcacaaacagtttaactggctatggcaccatgttccaacatttgcaccatgcaatgtcgaaggtgtattctccccgttggttcttgcacaggaaagcacagcccaatccgccaaaacatcagccattgttttacagagtttaacaccaaacggtcagaatgtcttcaagattcttgctgagtaccaactttcacacccagatgaagatgggatgcccactgatgatctgtattcagcgtctcgggaacgcttctttgtgagcagtcaagtgactttaaactctcatctcacggaatttaaagaccacgaactggttaagaccaagagaaactccgatggtcaagagtgtttgaatataccgctcacttcggatgcaattcgacagcttttgcttgatctcaatcagtagcctgaaattgtatttctgatatgattcatttttattgcttgaacgagttattatagttcacacagtttacatgtttaattgaatgttatagtcagcactcacagctcttatt

SEQ ID NO: 146483 - DNA, 2121 bp, Arabidopsis thaliana landsberg
  unsure (1)..(2121): unsure at all n locations
ctcgttgttgagaagaagaacatcttccccactctctcccttcttcttcttcttcttcttcttcttcaactcaaaaaacttctctctctctctctctctctctctctgaatcaattaaaaaacggttttgggttcttgtcctctgttctctagtggcttctattattctcattggtggctgttccagctctcttaaggtctccttagtgtgatctcagatctgattggtccgattctatttttctttttattttggagataatttgttgttgtgcaagttcagacacgagacccagaaaatttcaatctcagctttcgtcaatgttgacccacgacagagatgaagaactctctctgttccttgagatgcgtcgtcgcgagaaagaacatacagcagattcccttttaacaggtctgtctttctctctctatatgtatatataaacttatgtaataatcatttggcaatgttgattgaatttgttctgtctcttttaggatctgataatgttagtatcaacgcaacgttgacggctgcggcggcggctgctctctctggtgtctccgaaacggcgtcgtctcaacgttatcctctcaggagaaccgctgctgagaactttctatattcggagaatgagaagtctgattacgattggtaatgtttccatttttattttgcttctaaaatatctatgctagtatcagaaatttgcaagcaaaatctcaatttttttttgttgcaagtgtatgtgcattctaaaattagaaatggtaatttaggattatacgtctagtaattgaatttgtcctaattagattgaaattaacacaataaagtggcacttattcttgctttacctcatttgagcttagtgctagagagtaattatatgtctccttcttcagcgaatcattggtctgatgttcttgtctcttgtttaggctgctaacacctccaggcacgccacagttcgagaaagagtcacatagaagtgtaatgaatcagcacgatgctcccaattcccgacccacggttcttaaatctcgggtataaactaacttgttagacagaactaattcattttcttataatgcctctggtccaagtttaagttatttctttatcctgataagcattgaaactcttgtgttgggttctgcagctagggaactgtcgtgaagatatcgtctcagggaacaataataagccccaaacaagctcttcctctgtagctggactcagaagaccatcttcttctggtagctcaaggtcaacgagcagacctgccacaccaaccagaaggtctacaactccaaccacctccacatcaaggcccgtgaccaccagagcttcaaattctagatcctcaacacccacctcacgtgccaccttaactgctgcacgtgctactacatccacagcagctccacgaaccactactacttcaagcggttcagcgagatcagctactccaactcggtctaatcctcgaccgtcttctgcatcttcaaaaaagccagtgtcaaggccagccacaccaacccgcaggccttcaaccccgaccggtccatcaatagtttcgagtaaggttccgtcgcgagggacttctccttctcctactgtgaattcgttgagtaaggctccgtcccgagggacttctccttctcctactttgaattcgtcgaggccgtggaaaccaccagagatgcctggtttctctttagaagctccaccgaatctgaggacgactttagcagacagaccggtctcagcttcaagaggcagacctggagtagcctcagcaccnnnnnnnnnnnnnnnnnnnnnnnnnnnnnnnnnnnnnnnnnnnnnnnnnnnnnnnnnnnnnncaagaaggcaatcttgttcgccgtccagaggtcgggctcctatcgggaacaccaacgggagtctcactggtgtgcgtgggcgagcaaaggcaagcaacggcggaagtggctgtgataacttgagcccagtggctatgggtaataaaatggctgagagagtggtgaacatgaggaaactaggtccaccgcggctaaccgagaatggtggtcgaggatcggggaaatctatctcagctttaaacagcctggata

SEQ ID NO: 146484 - DNA, 3633 bp, Arabidopsis thaliana landsberg
tcccataagaattacaagtctgaaagtgggaattgaaggatcaaagcgtctgcacactggctcttatgaactatttggacatgccggaacaagaagatctttgaacagaatcagatctcgccctgtgattccctctctcaagctatagcacaagcccgagagtgcatcgaagctcaacatcaatccccaatcatacgctcccaaacaagcagcccttctccgatcagcgtttcaactgacacaatcttatgttttttggatgcggtctggcattcaaactctaactcgacgggccttggatagtttttctcgaatcacctctcacgagtggagatccaaggaagctttgctgctacaaacgtcgattcccctttgctggcagaagcaatgaccctctttctcgccaacgacaagccctcaatctcgggtttaaaaaactttctttgtttctagaaaattaaattggagatcgatttgttctagatttgaagtttttgcgatgtttctttgtttttggtcatagattttgtatttgattgcaaaaacttgcgatgtgtatgtgttgtttggtgagagtatttgttactaatgtctgtttaattgactgggaatttgagcggtgttgaatttgacatgtaaagagaattagggttgatatctcaacggagatcatcaaatttactttagctagaggagatttttgactatgatagtgtctcttcgtgttacagttaaaagataatctacctgctatggttgctggaatctggtcagaggatagcaattcacaattggaggcaacaaatctcttgcggaaactgctttctattggtttgtgatttatgttattgatcgttactagtagtacataacaatcagtgttttggttagagtctttagcagttgttttttcttttgtagaacaaaatcctcctatcaatgaagttgtacaatctggtgttgttcctcgtgttgtgaagtttctttccagggatgacttccccaaacttcaggtgagtcgcagctgcagtcgtttttttttggatatattgatagttactagtttgatgtatttgttaacttgcttttgctgtttacttctgcaatgtgttttagtttgaggcagcttgggcgctcaccaacattgcttcagggacatcagagaacacaaatgtcatcattgaaagtggagctgtcccgatattcatccaacttctcagctctgctagtgaagatgtccgcgaacaggtatatgtttaaatcctcactgttatcgttattgtcacagaagaaacacttagacattaggatcaagtggaaattcattgagactcttaccattctgagttctggtctttccctgactgagtataggctgtttgggcattgggaaatgttgctggagactcaccaaaatgccgggatttagtcctaagttacggtgccatgacacctcttctgtctcaattcaatgagaatacaaagctttcaatgctgaggaatgctacatggacattatcaaatttctgcagagggaagcccccacctgcatttgaacaggtttccttaaatatacacactttattgaatctccacaatattttttaacatgcttctgatattttgttacttaaaacatttttcgagcagacacaaccagctttaccagttcttgagcgccttctgcattcaatggatgaagaagttctcacagatgcatgctgggctctgtcatatctctctgatggtacaaacgacaaaatacaaactgttatcgacgctggtgtcatccctcgcctcatccagctcttagggtaagcatctgatagtgatcattttaatttttattgccaggcatgattatgttatctgatttatgtgcttcctctttctccgtatagtcattcgtcgccatcagtgctgattcctgctcttcgtaccattggaaatattgtaaccggggatgatctacagactcaggtgcatataatacattcaccattcgatttcgagttttcagaagcaaatgtctctaacttattttcctaacacagatggttctcgaccagcaagcgcttccttgtcttttgaaccttctaaaaaacaattacaagaagagtatcaagaaggaagcttgctggactatctccaacattacagctggaaatgcagatcagatacaagtgagttttgtttataatatatggcatttaacaagaaagtcgaaaattgaagtttcctgtgtctgattttattcgaacccgtatgtgcaggcagtgattgatgcaggtataatccagtctcttgtttgggtgcttcaaagtgcagagttcgaagtaaaaaaagaagctgcttggggaatctcaaatgctacttctggtggcactcatgatcaaatcaagtaaaaccataaaaaccgaaacgaaatgtttccttaacaaagaatggtcatttctaaaaacacgtctgtgtttattgtatgtttcttctcaggtttatggtgagccaaggctgtatcaaacctctatgcgatctccttacttgcccagatctgaaagttgtaacggtttgcttagaagcactagagaacattctcgtggttggagaagcagagaagaacttaggtcacacaggagaagacaacctctacgctcaaatgattgacgaagcagaagggttagagaagattgagaatcttcagagtcacgacaacaatgatatctacgacaaagccgtgaagatcctcgaaacattttggactgaagacaatgaagaagaaggcaacgacgagaatcatgctccacaatctggtttccagttcggaagcaccaatgttcctcctggtcaattcaactttatttgaaaggtaaaatagaagaattaagtcatagaagttgcttggacttttaagtaagccacatatcgaacgaaagtggtaacatcacaaagataaaatatcaatcttctctatctcttcaggcccactccttaactcgtggacatgaactatgaagaacaatagttcgattttcttttctttttggaagtctgtctcaataactaaatcatttggggaagagaaacaattattctgtgttagccatcatctcgtctttcaacaaagttcccttttttcatatattagtgccattacaaaatgggggttatgccttaactaaaccagaaacatttttattcaatagttaatcatttttactcgcaattttagaaaacagagaagctagaaatagtaatatacgcttgtggaggtttgaggcaacggtcaaaacttcaagagcaatatacgcatgtggagtttttattgggtactttggtgtctaattacaaataggagagattagtggtgattaagtggttattatcatggtcataatttctatatgcgagaaattagggtttaggctatgtgactaattcgtgtatttaaaacactctcattgttttatatccaacagacaacaagaacaacaacatagccagatataatgctgtcttcaccagcttttgctgcagcacgttctactctcggtcgtcgtcatcatgaaaagagactatcttcttctactggtcgaaccgctgatccagagattcatgcccgtaacaatggagacg

SEQ ID NO: 146485 - DNA, 1624 bp, Arabidopsis thaliana landsberg
gaagcattctgagacggctctatctgctctgtctaagcctcattcctcaacattcttccgatcttctctctcaagtcgatctccctcttcaggtattttctatctttatcgagatttgaaaatgtgattttgttgccttagtcgtgcttatctcccaatgtttggtttggtgatgtaatgacaggcgttacgtgatattgaaagtaggaaagattatcatcttgtgtgagtatgatagagacgcagattcctacaggtcctgtttttgctctatttcattgtgtagagtgaacattctacacattggatcgctttggtgtgggatgatgcagtacttcgtgttgatagctacattgctatttgttggttcatgtaatcttgacttttgcaggtcaccttggtcaaattagtatcttccgccgctagaggatgctctttaccgatcttctgaaataagaaagcttgagagttgaagccaacgatatctctgcgatctatagtgaccagtgaggttctttacatacctcgttctacatgcaaaccatgtagtgaaagtaatttgagttatataagccggagacatagttagcatctgatgtgaatataaggcttgcctagtggtgagatttatctcatggtttaacaatatatgatatgtgtttcattcttctaatgtatccattagactggagactgaaaaaagcttgcaaagttaccaaaagaacacctgtgttgatcagttttcttttccaggtattatgaaggtggtatatcttcagtctacatgtgggaggatgataatgaaggctttgtggcatgtttccttatcaagaaaggtacattctttctgtagagttcaataacactgaatgttaggcaataaacactctttacctgagctgttctggtttttatttttcgaagatgggtcaaagtcaggtcatggtcggaggggatgcctggacgaaggagcgtgggatgccatacatgtatacaggtgactctcttaacataccattaccaagcgtgccttatgtgttttaaaatgttgcccattttgtaacacataccaccctcaattgcaactttatcatagtttcctaagcagctctttaatgagacttcatattttgcttctaatgcctgaggttctcaactaggttggttcagaggaggaggaaatggcacaatattgcttaacaagtaccatcatgctttctctgacaactgatgatgagtcttcgggcaaattcggcttatctggatcaattagaagacaagtaagtattagcttctatttagcccatgccttcatagataaatagttcctggtatgaattgtgattcaatggaggaaaaccaaatatctgtaaaagaataacattattctgctactgttgaaattagatgaaaatggagctagcagtagctgacggacacctgtgcaatatggggagaatgattgaagaattggaaggcaaactgaggaactcacttgatcaggttctacctccaatccctgcaccaattccacaaactccgtcaacttgtgtatccgccatatatgatgaagatggtttctttatcaacggcgggcgcattgcagagtgaggataaagatcat

SEQ ID NO: 146486 - DNA, 1339 bp, Arabidopsis thaliana landsberg
atcatgacattgttctagtgttgtctaataagtggccatttgatgcagagtcaacaagatactattacaccgttccagattttgggtggtgaatcccaagttgttcaggtacatttgctttcttaatatagcgtgatcttcgtatttgtgggttatatgccatataattttaacttctctaaccattgctcgtatgttggcagataatgttaaagtcagaggagaaagtcattgctaagcctggtacttccactgaataactcgcttctctactcagttttgtataatggtttcaagtttcaactaattttgtgttatggtgatgtagcttccatgtgctacatgtctggctccatcgagatggaaaatacatacactcctgaacaagaagttggagttctgcagtggattttgggcaagagtgtaagcagtgttgttcttcggaatactgggcaaaacgacgggtttgttggtattgctgcaccttatttggctaggattctcccggttagtgattttagcttgtccatgttggcataatcatcttccatttcacccttaatgtataccgcctgattccttgttgtttttgtgatctttgttttccatgtagattgatttggcaatgtttggaggtgagatcttatgccaggtagagtcttttttcctagattttgaacacttagctatcagcttcttcttcactcagatcaagctcttacagagtcgcctgaccttttcttcactttctgtagccagatgcattcctttgttctgtccatgatgtgaaggttgtcaactccgttgaccagagagcaagaaacattgttgccgctggtgcagaggtaagaactaagaaggaaaatacgttgatttggtttctgatgcaattattattcttaacaaaattctgcaacccgttgtctggcttctactcacaaattgctggtgcagggatttctgagacaacgcctatctggacaaggtcttgctttcatcctcgcaggtggctctggtgagattttatcccaatgaaatgctgtttccgttgaggcctcatccccttcaataaaactgacatttaacatcccaaacatgttagttgtacaaaaagttctggaggtaggagaagttttctccattgacgtttcctgtattgatgctctcacaccctctatcgatgtccgaatcaaaaacaatgctccttttagacgagcagtattcgggagtacattttcacatatactttgtttcaatgagaagaagattaaggtttatgttttgtttgtcaaatgttttaatctttcaacattcaaaagggtgataacgtagtaatggc

SEQ ID NO: 146487 - DNA, 2236 bp, Arabidopsis thaliana landsberg
ctcttgttgtgaggttttttgagaatttgcgtaaaggaagaaactttttcaaaacttttttttgcatcaatggagaacataaccgcgcagctcaaacgaggtatctcaagacaattctcaactggttcgattcgtcgaacattgagccgacagttcacgcgtcagtcatctcttgaccctcgtaggaccaacatgaggtttagtttcggtcgtcagtcttctctcgatccgatcaggaggagtcctgattcttccaagagtgatgacgagccacatatgtcggtaccggagaatctcgattcgacgatgcagcttctctttatggctagcaaaggtgatgtcagaggaatcgaggagcttcttgacgaaggaattgatgttaatagcatcgatcttgatggccggacggcgcttcacatcgccgcttgtgagggacatcttggtgtcgttaaggctcttcttagccggagagctaacattgatgctcgtgatcgatggggaagtacggtctgtcttcttctcttaaccctctagattcgagaagttgacatttagggataaagttgacatttttatgttgtctggtgaattaggcggctgctgatgcaaagtactatgggaatttagatgtttacaatctcttgaaggctcgaggagctaaagttccggtaagaaattttcattgattttggattcgattggtgttttgttcatgtgtttgttttgtgaaaggcttttatcttcacacttatagaaaactaggaagactccgatgactgtgtcgaatccacgagaagttcctgagtatgagcttaatccacttgaggttcaagtcaggaaatctgatggcatctcaaaggcatgttctttgctctcttagatagacacatttgtgaacatcattgttcttggagcaggtttgatttattcaaatcaatggatgttgtttgattgttttcagggagcatatcaagtagctaaatggaatggcacgcgggtttcagtcaaaatacttgataaagatagttactcagacccggaacgcatgtatgcatctactacttgtgtcctttattatgtgttacatttgagtgatccacccctaaattttgtttgctaagctgtgtgatttggtttggcatgaagaaactgattctgctttgtctttctggcttttaatctgaacagaaacgcatttagacatgaattgacgttgctagaaaaagtccggcatccaaatgttatccagtttgttggagctgtcactcagaatataccgatgatgattgtagtcgagtataatccgaaagtgagcatctttacttgtcttctcccttctgagtttacctttattcactaatcatctcaatgtcgtctctgttgcagggagatttaagtgtatatctccaaaagaaaggacgtctttctccatccaaggcacttagatttgctcttgatattgccaggtatgttagattctcatgtattgctgctaaggttactgtaactgtgagtacctcaccggatggttttcgtggtttttctcgtgtcagaggcatgaactacctccatgaatgtaaaccagatccaatcattcactgtgatctaaagccaaagtaagagaattaaaggcatatgtcgattagatacgttaaaagcttttggtacatactcattgagatgtttcttttcgtttaatttttcgaaatttttcgtaaggtgtcagaaatattttgctggatagaggagggcaattaaagatctcaggatttggtatgataagattgtcgaaaatttcacaagacaaggcgaaagtagcaaaccacaaagcacatatagatctctctagtaaggagaatgcttcattcacatgcatgaaaactgaatctcttggtaagatctatgatcattgaaaaaaatgcattcttgattgcagattactacattgcaccagaggataaataaagacgaaatattcgacctaagggttgatgcacactcctttggtgtcattttatacgaggtacatttcctcgtcttgctctgtttttttattcttgtgtttctctaatcttgttagtgtgcgtttctggtcagataacagagggagtaccagttttccatccgagacctcctgaagaagttgcgagaatgatgtgcttagaaggaaagagacctgtattcaaaactaagtcaagaagttaccctccagatataaaagagtaagctctaaaac

SEQ ID NO: 146488 - DNA, 2573 bp, Arabidopsis thaliana landsberg
atggagcttgaagaacagaagaagtactttcatggaacactagagattacaatcttcgatgcaacacctttttctcctccatttcctttcaatgtaagtctatatcatatactgaattagtgactctgatgatgttatcattgtgttcattttcatgagcttttgttatctttgttcacagtgtatatgtacaaagccaaaagcagcttacgtgaccatcaagataaacaagaagaaagttgctaaaacaagctcagaatacgaccgtatttggaatcagacttttcagatcctctgcgctcacccggttactgacacgactatcaccatcacgctcaagactcgatgttctgttctcggaagattccgaatctctgcagaacagatcctgacatctaattcagcagttatcaacgggttcttccctctgattgcagacaatgggtcaacgaaacgtaacttgaagcttaagtgtttgatgtggttcagaccggcttatcttgaaccgggatggtgcagagcgcttgaagaagcgtcttttcaaggtattaggaacgcaagcttccctcaaagatcgaactgcagagtcgtactgtatcaagatgcacaccacaaggccacatttgatccaagggttgatgatgttccttttaatgcaaggaatctatgggaagatgtttacaaagcgatcgaaagtgctaggcacttggtttacattgcaggatgggcactaaaccctaatcttgttcttgtacgcgacaacgaaactgagattccacatgcggttggagtaacggttggcgagcttctgaaacggaaatcagaggaaggtgtagcggtgagagtaatgttgtggaacgacgagacgtctttaccaatgatcaagaacaaaggtgtaatgagaacaaacgtcgaaagagctcttgcttacttcagaaacacaaacgttgtttgtagattgtgtccaagattgcacaaaaagctccctacagcgtttgcacaccaccaaaagacaataacactggatacacgggtgacaaattcaagcacgaaggagcgagagatcatgagcttccttggcgggtttgacctttgcgatggtcgatatgacactgaggagcattcactgtttcgtacactcggaacagaagctgatttttaccagacaagtgtagctggagctaagctaagtagaggcggaccaagagagccatggcatgattgccatgtgtccgtggttggaggagcggcttgggatgtcctgaagaacttcgaacagcgatggacgaaacagtgtaacccttccgtgttggttaacacttcagggatcagaaacttagtaaacctaaccggacctactgaggaaaataacaggaaatggaatgttcaagttctgagatcgatagatcacatatcggcaacagagatgccaagaggtttgccggtagagaagagtgtacacgatggctatgtcgcagcaattcgaaaggctgagaggtttatctacatcgagaatcagtatttcatgggaagctgtgatcattgggagagcaagaacgataagtacgaaatttctcttaacgaagctattaaatatccattgggagattctgatctattttagtatttctttttttgatggatagaatctgcagcggatgcacaaacttgatacctgtcgaaatagcgttaaagattgctgctaagatacgtgcaagggagagatttgctgtgtatatagtcataccgatgtggccggaagggccaccggagagtgaaacggttgaagagatacttcattggacgagagagacgatgtcaatgatgtatcagatcattggagaggcgatatgggaagttggagacaagtcgcatccgagggattatctaaacttcttctgtcttgcaaacagagaagagaagagagatggggagtttgaagcagtttcgtcgccccaccagaaaacgcattactggaatgcgcagaggaatcggagattcatggtctatgtccactccaagctcatgataggtaacaaacaatccgcaattcacaatctgaaatgaaaatatattgaagattcgttaaactttcacaaactttcacttaagatttaaattacagagattgtcatatgtttgtagtggacgacacatacattttgataggatcagccaatataaaccagagatcaatggatggttgtcgggacaccgagattgcaataggttgctaccaaaccaataccaacaacaccaacgaaatccaagcttaccggttatcgctctggtatgagcataccggtggcaagatcacggcagatgacttatcatcgtcagagccagagagtcttgaatgtgtccgagggttacggacaataggagagcaaatgtgggagatttacagtggagacaaggtcgtagacatgctcggtatccatttggtcgcctatccaattagtgtgacaggagatggtgcagttgaggaagtcggtgacggttgctttcctgataccaagaccttggtgaaaggaaagaggtccaagatgtttcctcctgttctaaccacctga

SEQ ID NO: 146489 - DNA, 1270 bp, Arabidopsis thaliana landsberg
agtcaaaacaataaaactttgaaattcagtaatggtgaatttcaactcagccgttaacatacttgaggtggtccaagttagcccgccgtcttctaactcgctcacactcccactcacttactttgacttgggttggctcaaacttcacccgttgaccgagttcttttctaccacgtccccgagctgactcgctcttctctcatctctaaacttaagtcctctctctcagccacgctcctccactatctcccactcgccggccgcctcgtgtgggattcaatcaaaaccaaaccatccattgtctattctcctgacgacaaagatgccgtgtatctcacggtagctgagtctaacggtgacctttcccatctttccggagatgaacctcgtcccgccacggagtttcattctttagtccctgagttaccggtttccgacgaatcagctcgcgttctcgccgttcaggtaacgtttttcccaaaccaaggattttctctcggcgtaaccgcacatcatgccgttttagatggtaaaacaacagccatgtttctcaaagcatgggctcacaactgtaaacaagaacaagaagctctgccacacgatctagtaccgtctttagatcgtatcattgttcatgacccaacgggactcgagacaaaactcttgaaccggtggatatcagcttccaacaacaaaccaagcttaaaactgtttccttccaaaataattggatccgatattctccgagtcacgtaccggttaactcgagaagacatcaagaagctacgtgaacgagtggagaccgagtcacacgctaagcagctccgtttgtcgacttttgtcattacttacgcttacgttataacatgcatggtgaagatgcgtggaggtgacccgacccggtttgtgtgcgttggttttgcatcagactttcggtcacggttaaaccctccgttaccgccgacgttcttcgggaactgcattgtcgggtcgggagatttcgacgtgaaagcagaaccaatattggaagaaggagaaggaaaaggtttcatcacggcggtggagactttgaccggatgggtcaacggattgtgtccggagaatatagagaagaatatgcttttaccgtttgaagcgtttaagaggatggaaccgggaaggcaaatgatatcggttgctgggtcgacccggttagggatttacgggtctgattttgggtggggaaaaccggtcaaggtagagattgtgacgattgataaggatgcgtcgg

SEQ ID NO: 146490 - DNA, 1484 bp, Arabidopsis thaliana landsberg
  unsure (1)..(1484): unsure at all n locations
cttnttttgtttgtttggcagaaatggaaatggaatcatgtaagctcttcatcggtggtatatcttgggaaaccagtgaagatcgtcttcgtgactattttcacagttttggtgaggttttagaggctgttattatgaaggatcgtgccactggccgtgctcgtggctttggtttcgttgtctttgctgatcctaatgttgctgaaagagtcgtcttgcttaaacatatcattgatggtaaaattgtaagtttcctcctgctatataccaacatacattgcttccaatttcnnnnnnnnnnnnnnnnnnnnnnnnnnnnttgaggttgctgcttctcaaagcaaagcaaagctactcacttttattccttcctgttttagttagtagactctattgtttacaatcagctttgccgctctgataaatgcatatctttgtcagaagttgttcatttcacactcacaaataaaaatgtaaaacttggatcgtttcatatcctcatgtgaaagaaagtggttcacaatgaatgaaaaactgctttctttgagttgtgtcgtgtgttcattttctccatgatatacaggttgaggcaaagaaggctgttccaagagatgatcacgtagtatttaataaaagtaacagcagccttcagggatcacctggcccatcaaactccaagaagatctttgtgggaggtttggcatcatccgtgacagaggctgagttcaaaaagtattttgctcagtttgggatgatcactgatgttgtggtgatgtatgaccacagaacccagcggcctagaggctttgggttcatttcatatgactctgaggaagctgttgacaaagtactgcagaagacattccacgaactcaatggtaagatggtggaggtcaaactggctgttcctaaggatatggctctcaacacaatgcggaaccaaatgaatgtaaatagctttggcactagtagaatcagttcattactgaatgagtacacccagggattcagcccgagtccaatctctggttatggagtgaaacctgaagttaggtacagtccagcagtaggtaataggggaggattctcaccgtttggacatggatacggaatcgagctgaattttgagccaaaccagactcagaactacggttctggttccagtggaggctttggacgaccctttagccctggatatgctgcgagtctcggcaggttcggtagccaaatggagtcgggaggagctagtgttgggaacggttctgtcctaaatgcagcaccaaagaaccatttatggggaaatggtggtctaggttacatgtcaaactctccgatatcaagaagcagcttcagtggaaactctggaatgtcttcactaggcagcattggtgcaactggggaacagctgcacgtgcacgcagtagctaccacggtgagagaggaggtgtaggattagaagcaatgagaggagttcatgttggtgg

SEQ ID NO: 146491 - DNA, 2742 bp, Arabidopsis thaliana landsberg
atggaaagatctatcttcaaacgagaaaccataaaaacaataaggcttgataaagaaaccagtaagtcatcccttcggggaatgtataatgtctcccaccgtattcactgctacctagctcccaacaagttaataatacatacctcaaggggtggtacgatgatgctatagaggttgatgagttacaaaagtattgatttggtggagatgagatgataagtaaccgataaacgcggcttaatttatcaaagggaaaagcgtatatatggatacaagactcgtgagagaaatttaaggggaaaccacacaaaaagattgactcaaaacaatgctcaaagacttgaatgttggaagaagagaaacttgaactttttattgcatagaaattgtgtaatgagaacaaagcaacgagcttttataagctcaaacgagaggagacctccaactgtccgaaatagttaacaaagaaataaatatgcggaattaattgacatccttggtaaagagatctacgatctaattgttgggaattgagagtgaagatgtgatggtctcagatatagaacaagtggaaaaaatcttggtaatatctttagctgtaatggatttggtcgagaacatggctaagttctttcgaatctaaaatatagaaaatatcttcttaggaatacctttcttatacacgtatataggcatgtcaatcaggcttttctagttcggcccaaaattcgaaaaatccacataaatttaagccttatgagattcgaccccttcatggaatgctcttatttatatcactctatgaaggggtcacaatatttttgtatgaggtggatcctaaaagtgatggcgtaggcgattgtgggatggttgtacttaaactcggtggataaagtatacgccacataagacaaagacaaaacaaggcagtgatataaatcacatcactagcgaaacgatattgggctcacaaggcaaaaattcttaaagagagtaagagactaatatcctcaaatgaaacccgtggtaagctttccatcagacctcgaaaatgataactatcaaaccaacctaaagatgtcgctacctgctaggatggagtcctcaactagtcgtgcaggacttttggtctttttgaactcttcagatataagacgtttgaccgttgacttctctccctctttagcgaaaagtggtttctttcacggcaaatctccggcgtctccaacggcgccgggctatctcctcccctctctcttcaggccctcccctcctcatggggaagcaaaagcgtctaaagggttctcctggttcgaaatctcccccctctcaaagtgagtcttcctcctctcccgcctcagcctcgtccgtacagttgcagatccctcagatccagtctcctgtctctccctcaagtgcccaggctgctgtcccacagatagccctggccacaaacccgcctacaggccccagatctggctcagatctggagcctctagccgacctcgttgcgacacaagcggctgcccctctgtctgctgtgtctgctccaccgactgctgcggtgactcctcccatggaaccgagtccctctgctccctctgcgcaagctgcacccgttaaggttgctgcggtgagcccagctcctcaatcgggttctaacacagctgaagaagatagttggtgtgacattttcaaaggaacatcaaagagagttcaaaagcagggtacttccttcacgcttccctctagagagtcttgtgtgaagatcctagattcggtcatcgaaaagcataagcgatcgtgggaatcgttcattcttggctagttctactctgatcctccttcacaaggtaccatccacactatcgtgaatgggatttggagtaagcaattccgcgatgtcactgtgtcaaaaatggaggataacgctttcttgttccgcatcccgaatgtgcaaacaaggacccgcgtcctcaatcaacgactttggcaaattgatgggcagacaatgttcgtggccaagtgggaacctgggcttactccggtgaagcctgagctgacaactgctccaatttggcttgagctaaggcatgttccattccaatttttcaatgacgatggtcttgcaagcattgctagtttggttggtgacccaaagttcctccacccaagcacggctaacaagacaaacctcgaagtagcgaaagtgttcactattatcgaccctagaaagcctctgcctgaagcggtcaatgtccaatttgcttctggtgatgtcagacgcgtcgaggtctctagtccatggatgcctcccgtctgtgcccattgcaaggaagttggccatagcttacggaagtgtcatgtcgcgcccatcacttgcaagggctgcaattcaaccctgcacaaagcggacaattgccctagaaacaagccgcagcaggaggaggttaaaaagcgaagacgtaaacgctctaaaactccaaagcctgctactaaagagggagactggacttcagtaggcccccgcatccgcagcaatgctaggggtagctccgctgctttgaccattggcccttctcctctaaccccagcacccgttcctgctgatcctagcactgctattcaagctgttagtggtctcaagggaataggaaaaggcaaaggaagcggtatgaagaacaaaggaaaaagtattgttgttgagaagattgcttcgggttctgaggaggattctgactc

SEQ ID NO: 146492 - DNA, 867 bp, Arabidopsis thaliana landsberg
gctgcagcgtcatcagtttcttctccaccgctttgcctcgccggtcgagtagctatagtcacaggatcttctcgaggaataggtcgtgccatagccatccaccttgccgagcttggggctagggtcgtcgttaattactcaactagccccgttgaggctgagaaggttgccacggcgattaccaccaactgttcaaaggacgcggaagtcgccggcaaaagtccacgtgtcattgtggtgaaggctgatatctcagagccgagccaggtaaagtcgcttttcgatgaggcagagcgagtcttcgagtcgccggttcatatcttggttaactcagcggctatagccgatcctaatcattccactatctcagacatgtcagtagaactttttgatcgcattatcaggttaattttaagaaactcatttattataaagattgtttcatttagttattttgcaactctataacgtgaatttaattagatagtgatattaattagatttgttgtttgatataacagtgtgaacacaagaggtgcgtttatttgtgctagagaagctgcgaataggctaaaacgtggaggcggtggccggataattctcctctcaacatcactggttcaaaccttaaatacaaactatggctcatacacggcttcaaaggcagccgtagaagccatggccaagattcttgcaaaagagctcaaaggaacagagatcacagttaactgtgtttctccgggtcccgtcgccacagaaatgtttttcacaggattgagcaatgagattgttgagaaagttaagtcacagaacttatttggtaggatcggtgagaccaaagacatcgcacctgttgttgggttctta

SEQ ID NO: 146493 - DNA, 4620 bp, Arabidopsis thaliana landsberg
atagcgacattaatgatccacaacttcgtagattgctggtggaaggggaggactacgttttagttcctaaacaagtttggaaaaaacttgttgaatggcgagcttttggttctttcggatcgcttcatttagcttccgacgattatatacctggtcttatgtctcttgcacgtgtagcgcaggtcctccgatcgaaaggaagttgatctgtggcggcttttatactacgagttatagtgccgaggtttatccactctgccttatgttgacggccggacgagatgaaagtagaactgtaatacggttgggaaaacaggtattaggtgcccccatcatactactcaggctctttgttttgctgcgacctacttatggtgcttatgcatagccaaagactctttgtgtttaaactgttaggccccacttaggtccctttcttacatgggttgtccgtgtttcaggcctctataagggaactttatgagaaggtttgtgctttgacaggggtaccacaagaaaaggtgtgtgtttcgagatgtttcatttctatttttagtttttgctgatgaaggacgcattgtttcgttatgaagactttgcagctttgcctcacattgatatttttttttataagcaggctcatatctgggattacttcgataagaggaaaaacggactcttggattctttatcttacaagagcctggaagagtcaagccttcatatggaccaagatgtaagtatctagagaactgtctgtgatatgtatattgacaaatcttgatgaatcacctttgtcacttggacttcagtttgtcataatgcatgcctcttgagttcttttatcgacacaacccgaatcccatttaactcacatgatatcaatgttcgtctctttgtttgacattgactggtacatcccatgcagattctacttgaagttgatgggtcgtcttcctctcaatctgctatgagctcgacaggaaatgagttagctctggtacctctggaaccttcaaggtcgattgttacaattgctggggggcctaccctatcaaatggtcattccactacgtccaactttagtctctttccgagaataacttctgaagatgacggcagcaattctttgagtattcttggaaagggagaaaatggaggattagcaggattgagtaatttgggaaatacctgctttatgaatagcgctcttcagtgtttggcccacacacctccaattgttgaatacttcttgcaagattgcagtgacgacataaatagagataatcctttgggaatgtgtgtaagtgcttgctacttaaatcttctatttactcatgtgatggtactcacatgcattttgaatataattctaactcttaattttccagggtgagcttgctatcgcgtttggtgatttgttgaagaaattatggtcatcaggaaggaactcagttgcaccacgcgcatttaagacaaaattggctagatttgctccacagtttagtggttacaatcagcatgattctcaagttagtcatttcctctaatctgtatgatggtgcataattaaggtctttgttcctgacattgttgttgttctatgctatcctctttgacagtattatattgttgtctcaggaactgcttgctttcttattggatgggctgcatgaagatctgaataaggtcaaacgaaaaccttacatcgaacttaaagattctgacagtcgtccggatgatgaagttgctgaagagctttggaattatcataaggcccgaaatgattctgtaatagttgacgtctgtcaagtaagtatcggttaccgcttcctaatcgcttcttccattgaatgttcatctggttgtagtttttcatacaagtactacaagtttctttattttattttcccgaccagttcttatgaggtgttcaatttctttcagggccaatacaagtcaactctggtttgtccagcttgcggaaaaatatcaatcacttttgatcctttcatgtacttgtctgtacctttgccatcaacacttacgcgatccatgacaattacggtgttttattgcgatggaagtcatcttccgatgccatacacagtaatagtacctaaacagggatctattagagatctcattaccgcattaggtactgcttgttgtttagctgaagatgagagtcttttacttgcagaggtatgatttttggcttgttcctttcttgtattaatatttttcctccatcctttttttggggctgaaatccctgaagattgtgtgtaattgtcctctcaggtatatgatcacaagatctttagatattttgagattcccctggattcactgagtgcgataaaagatgacgagcatattgtggcgtatcggttgaatcagattccgaaaggatcaagaaaagcaaaactcgaaattcttcatggagggcaggaaaggtaaccatgctttggttttatttgttactcaagaactcttcttcagtcttcttgttaagctttatgaatcttaattattgggttccacagggctgttctggatagtcttagaggcagcgacgtgaagctttttggaactccttttgtgacttatgtcaacacagaaccactaagtggaactgacattgatgcagttatctctggatttttgtcgcctctgcacaaggtccatgccccatctaagattcataacggaagtgaaaatggccaccttcctgatgctactgttgacgaagcatccggaattttatcatccccagataccgagatagacgatgcatctgatagagtgttatccttcaggatattcttgacagatgaacgtggtttgaacattaaaccactgcagtctgaatcttctataagcccgggtaccgttacaagagttttagtcgagtggaatgagggtgagcatgaaagatatgattccagctacttgagtgatcttccagaggttcataaaacaagtttctctgcaaagaagacaaggcaagaatcgatatccctgttttcgtgtttggaggcgtttttagcagaagaacctctgggaccagatgacatgtggtatagctcgtagcctgaacttaaaatcacatgaactgagatactcattttaagatttagctttgaccctctttcttacggttctgaatcaggttttgtccgagctgcaaagaacacagacaagcgaacaaaaagctagacctgtggaagttaccagatattcttgtgtttcatttaaaaaggttcacttacagcagatatctcaagaataagattgatacgtttgtgaatttcccagttcatgatctagacttgagcaagtatgtgaaaaacaagaatgaccagtcatatctatatgaactgtatgccgttagtaatcattatggtggacttggtggtggccactacactgcctacgctaaggtttgctgactaaacatttggtctcactatctattttggtttatttttacctcttcatatgcataaatgcatcatattacagactcgacagttgtcccattgtgcttgctactagttcttctgtgagttctttatttgatcattatgtgtcatttttcatgcatttgattgatgacaacaaatggtaccatttcgacgacagtcatgtgtcatctgtaaatgaatctgaaatcagaaactcagctgcatatgttcttttctaccgaagagtgagaagtgaaacagagacacaaacagcggagatgtcgactgatatggattattcatgcctaaattctcataatgacaaagcatcatgacgttgatgcatttttctcaaagacgcacgcatctgtctctccctcactctcatgtcaggtgatgacacctctattctttcttgattttgaagttggcggttcggttggagggttctgcttcaggtttaatgatgttattatgacagttatctgtggaaatttggggtaataggtaacggaaattgtttggtttacgaattttctagttgagggggtaattttttgggtagtaaatcaagtgttgaactgctttagaagtgtagaaatatagttatatccttcattgtgattttcaacaccgggaagatgtttgtccttttggaacctatcgatattaatacataatatcatattattgagcagacatgcaaaaaaaaaagcttattaataattcccttttttttatatagaaataacttttgtagcttcagctatgaggaaacattgatgtttgaatttatcattaggacacgagtatggttgtgtcacaaaaattccctagacatcctcatacatgaagcctgatacaccttggttagttggttctattctataacgagaaaacggtacatgttcggcctaacaatcatcatatgaacttgcgtttactattatcaataaaactagaatttaacccgcgttttaaaaaatgtaaatttattttttaaaagattaactgaagatatatcatattaatttgtattttaaaatatagatatctatccttgtattatttagtatatgattactattatttaggtttcaaattttgaagtatagatatgaaaacatatatttttttaagtaacaatgta

SEQ ID NO: 146494 - DNA, 1388 bp, Arabidopsis thaliana landsberg
tcttacatccaacgcttgcgttatcctcgagagatgtctctctctcttcctcatcatcttctctctatcttgatcggaaaattctccgaccaggctccgggagacggtggtgtaaatcccgaagaaccgaaccaatattggctgttgtagagtcaaggtaatcaatcaaatatgtttttccttctatgaagagtgattacaagtttagttgtgtattgaaaggttattattttgcagtcgagtaccggagcttgattcttcttcagaaccagttcaagtattcgatggatcaacaaggtttcggttttctaaaaatgctttttttatttgtttcatgtctggatagatattagagaagttgttgatgaacaacttttggtttgtgtgattttaaggttgtacatatcttacacttgcccatttgctcagcgtgcgtggattgctcgcaactacaaggtttcaaatttgaatcattcttcttatcgatgtttctatatatctatatcaatttctttatgttgcttgtttgtgtagggtctgcaaaacaagatagaacttgtaccgatcgatcttaaaaacaggcctgcttggtataaggagaaagtttactcggctaacaaggtgtgaacttttctattttaatgcatatatatgtgtgaaaggatttagagttttatggcttttgttctctgttatatgcaggtgcctgcattagagcacaataaccgagtattgggagagagccttgatctgattaagtacattgacactaattttgaagggccttcgcttacacccgatgtgagtatctatgacatctttgatttattgagctcaattttaacacattaagtgaacctatacttagaagagagatatccatggatggaataataacagtgtttagagaagcaagttgtagctgatgagttactctcttacactgactccttctccaaggctgtaagatccacattaaacggcactgacactaatgcagcaggtgattagaagatgaagttgttatcttacttctgtgtttgcagatacattatgttggcatgtgtatgaatcttgtctttcattttttcagatgttgcatttgattacatcgagcaggctctttccaaattcaatgaagggcctttctttcttggtcaatttagtttggtattgtcgattatatttctatattcaatttgccatacccatatcaactcttgctgctgagaaaaaaaatggtgtttatttctataggttgatgttgcatatgctcctttcatagagagatttcggcttatcttaagtgatgtgatgaacgtcgatattacatctggtcggcctaaccttgccctttggattcaggttaagctattacctggacttct

SEQ ID NO: 146495 - DNA, 1349 bp, Arabidopsis thaliana landsberg
caaaaaactctgtcaatgtgggacttgtaggggtaactgaaatatacgagtaagattccgtaataactaaaagtgtaattttgatttacaggcacgaggtagtaggtgaggtgttggaagtgggatcagatgtgagcaagtttactgtaggagatgtagtcggagtcggcgtggtcgtcggatgctgcggtagctgcaaaccatgcagctcagaacttgagcagtattgtaacaagagaatctggagttacaacgatgtctacaccgatggaaaacctactcaaggtggcttcgccgacaccatgatcgtcaatcaaaagtaagcacacgcacacaccttgtttcacaagaaacacacagagcatttgtttcttcatccacaagtaacttatttttgtttcaaaaggtttgtggtgaagattccagaaggaatggcggtggagcaggctgcaccgctactctgcgcgggagtaacggtttatagtccgttgagccacttcggtctaatggcgagtgggcttaaaggagggattctagggttaggtggagtagggcacatgggtgtgaagatagctaaagcaatgggacaccatgtgactgtgataagctcatcagataagaaaaaagaagaagctatcgaacatttaggagctgacgactatgtggtgagctctgatccagcagagatgcaaagactcgcagattcccttgactacatcattgacaccgtaccggtgtttcaccctctcgacccttacttggcttgtcttaaactcgacgggaaattgattctcatgggtgttatcaacactcctcttcagttcgtgacccctctcgtcattcttggtcagtactatttcttgcgtttaaatcatatctagctaataacaacaaaattcaatagcaaacctgatgtttttttctatattttgacagggaggaaagtgatatcagggagctttatagggagcattaaagagacagaagaagtgttggctttctgcaaagagaaagggcttacgtcgacgattgaaactgtgaagatcgatgagcttaacattgcgtttgagaggcttcgcaagaacgatgttcgttacagatttgtggttgatgttgcaggaagtaatctggtggaggaggctgcaacaactacaaactaaagagggcagggcacattgatacatgaacgaaaaattgtaacgggcttgtttgtccaacgaatgttttgttgttgtctttttcaaatggttcaaacacgaatgctttggctttatttttttctaatcaatgtggattttctgtttacgtgtgtttgtcacaagaaaatcattatgataagaattttcttc

SEQ ID NO: 146496 - DNA, 1857 bp, Arabidopsis thaliana landsberg
tattcgtctttaactctctaccaatgattcttcacccaaatttaaccatccatttatcaagatgagcaggatacataacataggcagtcaaacataagggaaagattctaagtggcaaactcatttttgtttgttccttctttcttttgaggccaaaagagaccagattcatttttggtttcttcaaaggccaaaccttattttctcagacaaaccttttgccatattacaaaataaaatctgttcgtctgagaattatcttgatcccttttggattcgaggttcaagaacattcatgaacttcgagtaaaacaatcatcttcttgtagtaataatccaggaagatacattatcaacacacataaaacagaatgaaaatcaattgcttgttctgttgtatgtcccacagacgatttaacagacgatcatcatcgagacaaagcatcaaagactgcattgatgcaaagaacaatataactacatttgacaacatctcttttaaaacaggtcccattttctaacctttttcattatatgcattctcaaatcccttaaaagcttttctttctaaaagaagcgaggcgtatttgcacatacctgcagatagcagtaggcgaagatacatatccgaggagatagcaaaactcggtaaagggaacatcagtgctcatatctttacattcagagagctttgcgtcgctaccaagaacttcaaccctgataatcagctcggtgaaggcgggtttggaagggtttacaaagggcagatagaaaccccggaacaagtacttataacattctctcatacaacatctatccaccatattctgttcagtggtttgattctgattcttgcgtgtttaggttgttgcggttaagcagctagacaggaatggttaccaagggaacagagagtttcttgtggaagtcatgatgttgagtctcttacatcatcaaaaccttgtcaatttggtcggatattgtgcagacggcgatcaacggattcttgtctatgaatatatgcaaaatggctctttagaggatcatcttctaggtaacatatatctaaacaccatcacaacatactttcacatccacacattctaaagatttaccttttttatacttcagaattggcgcggaacaagaagaagccgttggattgggacacaagaatgaaagttgcagcaggagcagctagagggcttgagtatctacacgaaacagctgatcctcctgttatctacagagacttcaaggcctcaaatatattgcttgacgaagaattcaacccaaagctttcggatttcggtttagctaaggttggtccgaccggtggagagactcatgtgtcaacgagagtgatgggaacatacggctattgtgcgcctgagtatgctctcacaggacagctcactgtgaaatccgatgtatacagcttcggagtcgtgttcttggagatgatcacaggaagaagagtcattgacacaacaaaaccaactgaagaacagaacttagtcacttgggtacgcaaaagttcttcaatctgaacaaaaccattgattggttttcttaatttggttttgctaaaatgcgcaggcgagtccattgttcaaagataggagaaagttcacgttaatggcagatccattgcttgaaggaaagtatccaataaaaggattgtatcaagcgcttgcagtagcagcaatgtgtcttcaagaagaagcagcaacgagaccaatgatgagtgatgtagtcactgcgcttgagtacttagccatgaccaaaaccgaagaagatggacaaactgtagaaggagaagaagaaaaagaagaagacgaaagatccaaactttga

SEQ ID NO: 146497 - DNA, 1537 bp, Arabidopsis thaliana landsberg
taccgacttatatcctaatgtattgttagaaatatttgtttatttttgtactttacatttctttgcataacgggtcaatgtttattgctcttgtagatatcattacaacgttgcagacttaagacttgcacagcatgttgagaaaggtaatgaggatggccttttcataagctgtgtagcatcatcagctaatctctgggccatcatcatggatgctgggactggtttcagttctcaagtttatgaactgtcctcagtcttcctgcacaaggtaaaacagctgaagcattaggatccatctatctgtcatacctattctctgactgtagcagctcaccatttgtttctggattctttgcaggactggatcatggaacaatgggaaaagaactactatatcagttccatagctggtgcaaataatggaagctcgttggttgttatggctaaaggtcggtagtcacgtctcatgatatctttgccaatgaacttattgattcataaagcatgaaagccgttttacttattccacttcatgtaatgcgataggaactccttatacccagcaatcttacaaagtcagcgactcatttccattcaagtggataaataaaaagtggaaagaaggttttcatgtaacatccatgaccaccgctgggagtcgttggggtgtagtaatgtccaggaactcaggctactctgaacaggttccgatctctttacctgaggcatttcaacttttctttgtttcctttttgagcactataatgtattaacgaggtttatgtggtgtatattataggtggtggagcttgacttcttgtacccaagtgaaggaatacatcgaaggtgggaaagtggatacaggataacatcaatgcgctgcaacagctgatcaagcagctcttatattgagtatacctaaacgaaaaatagccgatgaaacccaagagactctccggacttctgccttcccaagtacccatgtcaaggtgtgttcttaggaaacaaatgaagcatgttggctacatgaaactacaaaattcggattcttctccatttgttctatgtactgacttggacctgcattttctatttcaggagaaatgggcgaaaaatctgtacattgcatcaatatgctatggtcggacagtttgctgatgaaacatggagtatactgtttcaacctctctcactctctctgtagggttttagggccgatctctctctagaagcctgacaacgtgtagccttcggtttcagtacaatccaaaggtaaaccttaaccaggagccaacctatgtgactgtgtaatgaaatgaaatttgtctctatgtatgtagtaagtacaagataaaaggaaaaaaaaaaaattgagtagaagagacgaaatcattattactagaattgatcaagagctgcaaaaagattatgcagtttctggcttatttggctttgtacctgatttgagtacagaatcaggaggaagcaacatgtttgttataatgaacatataattctaagaaggctttcatct

SEQ ID NO: 146498 - DNA, 1614 bp, Arabidopsis thaliana landsberg
taaatttccactgtagtgtcaagttacatagacacaaaatccatggcttcagtgaattctcgaagtggtttctgcaactcaaactcaacactctacagcaaacgaacaccaatcccactcccgccaaatccatcactcgacgtcactactttcatttcttcacaagctcatcgtggccgtatcgccttcatcgacgcttccacaggtcaaaacctcaccttcaccgagctatggcgtgccgtggaatccgtcgccgattgtctctccgagatagggattcgcaaaggccacgtcgtcctcctcctctccccaaactcaattttattccccgtcgtttgtctctccgtcatgtcactaggcgcaatcatcaccaccacgaatccactcaacacttcaaacgagatcgctaaacagattaaggattcaaatccagtcctcgccttcaccacatcgcagcttcacccgaaaatctccgcatccgcaaagaagctcccgatcgtgcttatggacgaggaacgagttgactcagtgggtgatgtgagaagattggtggagatgatgaagaaggaaccgagtgggaaccgagtcaaggagcgagttgaccaggatgatacggcgactttgctttactcttcaggaaccacgggaatgagcaaaggagtgatctcgtctcaccgtaacttaatcgcgatggttcaaaccatcgtgaatcgatttggatctgatgatggagagcaacgattcatctgcactgttcctatgtttcacatctacggtttagctgcgttcgctactggattactcgcttacggatctacgatcatcgttctctctaaattcgagatgcacgagatgatgtcagcgattggcaagtatcaagccacgtctttgcctctcgtgcctccgattcttgtggcgatggttaacggtgcagatcagattaaggctaagtatgatttgagctctatgcatactgttttatgcggcggagctccgttgagtaaggaagtgactgaaggattcgcggagaagtatccgacggttaagattttacaaggttatgggttgactgagtcaacgggtataggagcttctacggatactgttgaggaaagtcggagatacggtaccgctggaaaattgtcggcaagtatggaagggaggattgttgatccggttactggtcagattcttggaccgaaacaaaccggtgagctttggctcaagggtccttccataatgaaaggtacattgatttgagaatcgtttttgattacagaaatcatcaatgtaggattttttcttaccatggcaattttggttgttcttggcaggttatttcagcaatgaggaagctacgagttcgactcttgattctgaaggatggttaagaactggagatctttgctatatcgatgaagatggattcatattcgtggttgatcggttaaaggaactgatcaagtacaagggttatcaggtgatatatagaacacaaattttgagcatggtcgatgttgatgctatagatttatagtccttttgaagcattagaaaatgctgatgagtcaaaaatcgtccaatgcgaactgatgatagagtctgcctgtagta

SEQ ID NO: 146499 - DNA, 1376 bp, Arabidopsis thaliana landsberg; identical to SEQ ID NO: 67546

SEQ ID NO: 146500 - DNA, 1820 bp, Arabidopsis thaliana landsberg
cagttctctgcaccttttactttcccctgttttttgatcctcaatcaccaaaccctagcgtgttcttctgttgattatttcgaaaagggggtttgtttgttttctgggaatcagcgaaaatctcgaaatggttggcttaatatttcaatcgggataaaatcgatcgaaaatgagtcagccttctgtgattcttgatcgagctaactatgctcacaccatccgattctgggaagccgaaactggtcgctgttgccgtaccattcagtatcctgatgcggtttgtttctctctctctcccttgattttgtgacttctgagtaataaataaaactgagacaaattaatgtttgtaattgcagcatgtaaataggcttgagataaccccagataagcattatctagctgcagcttgcaatcctcatattcgactctttgatgtcaattccaatagtcctcaacctgtaaaactcctctctttttttctcaatgtggcgtgttgattccttctacctgctcgagtgatcttgatggagtcatagcgtgtattaagtgatgacttacgattcacacaccaacaatgttatggcagtaggatttcaatgtgatgcaaaatggatgtattcaggatcagaagatggcacagttaagatctgggacttaaggtatatcatgtcatcttcatctttagctaaaagtttatagatttattcaagtgtggattctgggaaaggataaggagatattgaatataaagttacgaaaaatactaagaacgttctaaattgtattcttgttgactcgtaaaccaaaatgcagggctccgggttgccaaaaggagtatgaaagtgttgcagcggttaatacagttgttttacacccaaatcaggtacatgaagtcatctgttattgttgtgctgtgggaatcagcttcgttttatgtttaagagagttgttgtattgctactgttgaaactgctgtgattttggtagttgtctcagctgttatcactatttccttagtctttattatgaactttgtttttttttttgtacagactgaattgatatctggagaccaaaatggaaatatacgtgtatgggatctcagagcaaattcgtgtagctgtgaactggtaattgcctttgacacgtcttcatttcatttctgaaaatccgtagataatcacttgaggttaactataggtaccagaagttgatacagctgtacggtctttaactgttatgtgggatgggacaatggtagtcgctgctaacaaccgtggaacatgttatgtatggcgcttgttgcgtggaaaacaggtagtgttcctgatatgcaaacctttcttttgtttaaccatgctgtagtcgcattactctaattgtccatgccatttaaaaattcaaaatcttttacagacaatgacagagtttgagccccttcataagctgcaagctcataatggccacatccttaaatgtctcctctctcctgcaaacaagtaacatgtttcttatactttctcttttaaccgttttcttcatcctctccttttcgaagctcttacatatttgttagcagatatctagcgactgcatcatctgataaaactgtcaaaatatggaacgtcgatggtttcaaactagagaaagttttaacaggtatgttctccatgttactgtcaacagcattcattctccattatcgtctcttacactctcatcaaatcttatataacaggacatcaaagatgggtttgggactgcgtcttctcagtggatggagaatttcttgtaacaggtactaatctctgtcttaa

SEQ ID NO: 146501 - DNA, 3449 bp, Arabidopsis thaliana landsberg; identical to SEQ ID NO: 37604

SEQ ID NO: 146502 - DNA, 1651 bp, Arabidopsis thaliana landsberg
tcaggttttttcctttgttgatagcttttgttaaggaacatataaatgactggagagttaacctgttcgttgtcaatctctaggtccaaaatccgcataatataaagtacagtgggacagtccaaggattgaagcatatttggagaaccgagggacttcgtggactgttcaaaggaaatggcaccaactgtgctcgtattgttcctaattcggctgttaaatttttcagctacgagcaagcttcaaagtaagacatctatatcttctctgtactctgttatcttgatcttaataaaggcatcatacttgatactatagatctttttctaatctatgctttttctcttttttctctcatagtggcatactgtacatgtatcgtcagcggaccggaaatggtaaattgatttcagcataacatttttattattacctgttgaagaatctgtgcatggtattattacctatcgcttcagcctttaaattaagtttctaagttgagctatgttgaactgatatcactagccttccatatttgatggtgcaaacaatagggctcgttgtttgtaagaatttatgttcatgggtttgtgtcatttctgcagaaaatgcccaacttactcctcttttacggcttggagctggtgcaaccgctgggataatagccatgtctgcaacgtacccgatggatatggttcgtggaaggctaactgtccaggtagcttttcgtaccctaagtttgtaattgctatagccttattgctcatctttgtaactctgcaaatatggatatgtgcacagaccgcaaattctccttatcaatatagaggaattgcccatgctttggcaactgtcctgcgagaggaaggtccacgggccttgtaccgtggttggcttccatcagtgattggagttgtaagtcttgtgtttttttttattcacttaatcgaacgtaatactacaaatatttatgagttgatgagactcttttgataaatgcaggttccatatgtgggcttgaacttttcggtgtatgagtctctaaaggactggctagttaaagagaacccatacggtctagtagaaaacaatgagctgacggttgtaacgaggctcacttgtggtgcaatagctggaacagttggtcaaacaattgcttatccactggatgtgattcgtaggagaatgcaaatggtcgggtggaaagatgcttccgctattgtaacaggcgaagggagaagcacagcttcacttgaatacactggtatggtcgatgcatttagaaaaacagttcgtcatgaaggctttggagcattgtacaagggtttggtccccaattcagtgaaggtttgtttcataacaaaactccgtttcttgatcttcttattagatgaactcaagaaagtgaagtgttgtttgtgtttcttctgtaggttgtaccatcgattgcgattgcatttgtgacatatgagatggtgaaagacgttttaggagtggagtttaggatatcagactgagtcatttgatatctcaatgccgtcaagaaagcgcacttctatttttgtagccagaagagaagttcaacaaagttaggggggctttatttatctcctttcaacatccggtgggaaggataaatggctataggggc

SEQ ID NO: 146503 - DNA, 2022 bp, Arabidopsis thaliana landsberg
cactgaacgtctgtgaagttcacgaccaaaccagtcttactctctcttaactaagaacattgagatggcagacaatttgaatttggcgggtgttctgggagtcttattggtattaaccatcttccataatccgatcatcgtctacgccggcgagggtgttcccaacgtagctttgttcactttcggagactcttactacgacgccggaaacaaagtgtttctcagccaaaggaaagatcttccacaaacctattggccctacggaaaaattccggactaccccaacggcaagttttccgacggccacatcgtccccgacttcatcggtacgcttttgattattctaagatatctatttgattattacagatgtgcatatatatacaaccataaatatagaaacaagataattattaaacatggtgactaatgactatgtagctgatttcatctctattccgaatggagtactcccaccggtgcttaaaccgggcgttgatatttcacgtggagtcagctttgccgtcgccgatgcttctattctcggagcgccggttgaatctgtaagtccgttttcaatatttgttgttttgttttaaagagatagactttagggtttctaggtaaagagacaatgttaaaaaaagtattagataaatgaaatcattacaaaaaaacgttattttaaaatcttatgaaacactattttttaatgtactaatattaataagttttattttcttgtgtttatatccagatgacactaaatcaacaggtggttaaattcaaaaatatgaaatcgaattggaacgacagctacatcgagaaatcactgtttatgatatacattggtacggaagattatttgaatttcaccaaggccaaccccaatgcagacgcttcagctcagcaagcttttgtcactaacgttattaaccgattaaagaacgacatcaaagtaagttgtcaaacaaccaatgtacaagctttttcgcactttaattatgttcaaatgactaactataacaagttattttacagttgttgtactctttgggagcgagtaaattcgtggttcaattgctagcaccattgggatgcttaccgatcgtgagacaagaatacaaaacccggcaacgagtgttacgagctgctcaatgatttggccaaacaacataacggaaaaatcggtccaatgttaaacgaatttgctaaaattagtactagcccctatggttttcagttcaccgtcttcgatttctacaacgccgttcttcgtaggattgcgacaggaagaagtcttaactacagtaagaaaaaaaactaactgttccattaactaaattcgagtgatacgtacatatctcttttcaaactgtttatttaatacaaatgtatcataaaatatttgtacaggattcttcgtaacgaatacttcgtgttgcggtgttgggacacacaatgcatatggttgcggaaagggaaacgtgcactcgaagctatgtgagtaccaaagatcttacttcttcttcgatggacgtcacaacacagagaaggctcaggaggaaatggctcatcttctatatggagccgaccctgacgtggtccagccaatgacggtccgtgagctaatcgtctacccaactggagaaactatgcgtgagtattgggaacccaacaacttggctatccgtcgtcggccgtctcgtgacttttacttgggcctctccgcctattattagttggatggctttgagctgaatatttcgatatatatgagagctattgtcttataatgtataatcgatatcgtaacgtggaattatgcctatatgacgtcaaattatgcctttgacgttgtccaataaactgcttttgaatatctgttgtatcctctaattttggtaatctatgcaaaatagaataaatttataattgtcgttgtttgtacaacttgatcattggctcattgctacgtggactaataattgtttttaatgaaaataaataaataaaacaaaa

SEQ ID NO: 146504 - DNA, 1842 bp, Arabidopsis thaliana landsberg
gagacacagatctgttgaaggtgtttatgtacgatctaccctctgagtttcactttttgatattgaattggcacaaaaaaggatctgagatttggccaaatgtcaacaacattagtacaatcccatcttatcctggtgggttaaatcgtcaacacagtgtagagtattggctaacacttgatttattagcttcagagacacctgaaatcaagagaccttgtagtagtgcagctattagagtgaagaactctaatgaagctgatatagttttcgtgcctttctttgcttcgttgagttacaatcggaaatcgaagctccgtggaaacgaaacaagcagtgatgatagattgttgcaagaaagattagttgagttcttgaaaagtcaagatgagtggaaaagatttgatgggaaagatcatttgatagtagctcaccatccaaacagtttgctctatgcaagaaactttcttggatcagcaatgtttgttctttcggatttcggaaggtattcgtctgctatcgccaatcttgagaaagatatcattgcgccttacgtgcacgtcgttaagactatctctaacaacgagtcagcttcgtttgagaagcgtcctgtattggcatatttccaaggagctatctatagaaaagatgtaagtgactttgagttttcctctctaatcgatatcaatcctgttactgattctaatcttaaacatcgtagggtggaactattcgtcaagaactgtataaccttctgaaagatgagaaagatgttcactttgcatttggaactgttagaggaaatgggactaaacaaactggtaaaggaatggcttcctcgaagttttgtctcaatatcgcgggtgacactccttcctctaaccgtcttttcgatgccattgtgagccattgtgttccggttataatcagtgatcagattgagcttccatttgaagatactcttgattattcgggtttctccgtgtttgtgcatgcttctgaagctgtaaagaaagagttcttggtgaatattctcagagggataacagaggatcagtggaagaagaagtgggggagattgaaagaggttgctgggtgttttgagtatcgctttccttcgcaagttggagattctgtgaatatgatttggtcagcggtttcgcataagctttcttcacttcagtttgatgttcatagaaagaatcgctaccgtagatctgaaatgtttgatagaaacggttcgagttaagatcatgtatgtgaaatatactacattctctttatgcttcatgtctgttttcttttcttgagttgaaaaagataacagtcaaatccttcaactcaaggtctaagttaatttgacagtacaagtcaagttttcactttatagttttgtcagtaagcttaatcttagaaggcttaagaagaacaaacatataaatgatggagaaaataatcacagattcataaaaacataaaaagtttagatcttcaaaagtaatcaaagtaatgtaacgaaaaaccagaagaagaagatgatccaaaaagccttgtgatgtaactttatcggctcgggacacactcacaattgtagaaacttagccgccaacataacacttggccaacataaacacacaaaacacaatcacagactcataatctctagcttttaaatagataagatggttgcattcttcatgtttggtattgtcgctgctatagaatcaagaacgataaaggcttcactttccgctggaaccaatcacctcttccgctctgctggagttgtcttggctgcaaagccaacaacacagttgagagcagttagatgcaagagaatgt

SEQ ID NO: 146505 - DNA, 1484 bp, Arabidopsis thaliana landsberg
gatttagcgagagcttcggctgttggggctgtgcatctattgtgtctgttggctccgtttaactataaatgggaagctctccggttcggtgtgattctcgctatagtgactagtcttagcattacattttcataccataggaacttgactcacaagagctttaagcttcctaaatggcttgaatatccattcgcttactctgcccttttcgcgcttcaggtaaacatatatcgttttgaccaaaaatattaatagaactaatatatatccacaattatctttgcatcatcttttcttcccagggtcatccaatagattgggtgagtacacataggttccatcaccagttcacagattcagaccgtgacccacatagtcctatcgaaggattctggttcagtcacgtcttttggatattcgacaccagttacatcagagaaaaggtaacaaaaattttaaagtctctacaaacccaacatatgtgaatcgatcttaagttattatgagaactcacttggaagatcagtaagtaactaaaggtgaactatacgtacgatgttgtaataatgtaacagtgtggaggacgtgacaacgtgatggacttgaagcaacaatggttctataggtttcttcgaaacacaattggtctccacatcttaacattttggaccctcgtctatttatggggtggtctaccttacctaacttgcggcgtggtaagcactctatttatttttgtgcaattaaatttttgtatcaaataaaaaatggattaacgtgatgaatattctagtaacattttgttcgttttgaaataaaaattccgtgatgctacaacaaaaaatgaattcccgattattttctaccattcacgtcattcataaaaaaatacaagtttttggaaaacagctctgctatatgtaaacatgctagaaatatagttactaaaaatagaacatcattaatctatttaaaactattttctagcattttatgttatcttgcaaaacttttttcaaataaattattgctcttccatttcacaattcatctaacatactaactattacaaatataatattttcttggcaacagggtgttggaggaacaatcggttacaatgggacttggctcataaactcggcatgccatatttggggttcgcgagcatggaacactaaggacacctctcgtaacatttggtacttaatttatagacctttaaaccttaaccgaatctgataaagcttcatcaaaattagtattaagtgaatgtgaaatggtgcaggtggctagggccattcacgatgggagagagctggcacaacaaccaccatgcctttgaggcctcggccaggcacggactggaatggtatcaggtagacttaacttggtacctcatttgtttcttccaagctctcggtttagccacggatgtcaaattgcctaccgatgctcagaagcgaaaaatgtctttagctcgt

SEQ ID NO: 146506 - DNA, 1291 bp, Arabidopsis thaliana landsberg
cctcgtctaaatcgaaaatttcagttctctgatcaaggctgctcaatgagcttaagcttttgaatcactatttttggttaaggtttttaggtattataatggttcatatgtgattgtcattagataatattgaggtacctaaagctgtttttgtgatgtttacagatatctgtcaaatgtgttttgggaagcaatttcatcaggaaatgttctctccttgtatcaaggccttgggactaacaatttgcagtcttttatttcgtccttcatctatttctatagttatagctatttcaagaggttacattcccaaaggattggttctaagtctattggaacaaaggctaatctcctcattgctgctgctgctggtgcttgtacctctgttttgactcaagtacgttttttttgtttttttgcactcagctctgcttcaaaactatatgctttgcttaactttaagttgtatgtttttgtagcctctagatacagcttcatcgaggatgcaaacaagcgagtttggaaaatctaaagggttgtggaagacactaacagatggttcatggggaaatgcatttgatggccttgggatttctcttttattgacctcgaatccagcattataagtacatttctcatgtaaagccatgagctatcgactcgagtagctcacttcaatgtcacttgacaacatgactggctgaaatagttggatactctttgcagtatacagtgtttgatcagctgaaacagcaccttcttaagcagaaaaatgcaaaagccgagaatggttcttctccggtagtgctctctgcctttatggcgtttgtcttaggtgcggtctccaaaagtgttgccaccgtgctcacatatccagcaatcaggtattttacctgttggacaaagattactagtattcttgatttcaccctagtgaacgttctggctcagatgaacttctcaagtcacataattttaagactttggctgagtcagacatcatattgggctcaattttgcaggtgcaaggtgatgattcaagctgcggatgagtcgaaggaaaacgaaacaaagaagccgagaagaagaacaaggaaaacaattccaggggttgtgtatgccatatggagaaaagaaggaatgttagggttctttaagggcttgcaggctcaaatcttgaagactgtcttgagctcagcattgctattgatgatcaaggagaaaatcacagcaacgacatggattctcattctagctatccgtagaaccctgtttctcacaaacacaaagg

SEQ ID NO: 146507 - DNA, 1359 bp, Arabidopsis thaliana landsberg
  unsure (1)..(1359): unsure at all n locations
acgtttttttccttccccacaggaatagaagaaaaccagccagcggaggatttaaaacaactagccacaacacaacgcttcaaaaatatattattctgccacttttttcaatcttccttcaaagattcttattaaagcgacacacaactcttttccatttaaatttttgattttttttggttctctaaagaaggagagaaatgttggctatcttccacgaggcgtttgctcacccgccggaggaactcaacagtccggcatctgagaaatgctctaaacaaccaaaacttccagaagaaaccctaaatgatttcttattacgttaccctctcaacactttctccatgtctttcggacaagctgctgttcttgcttacgttcgtccctgtgcttccttctccatccaccagaggtaacacatacacaaatcttgcttaatcttcttctgttttaaggtgttctgctccattaatcttctgtttttgttaggttgttttgtggatttgatgacatctactgtctcttctttgggagcttgaacaatctgtgtcagctaaacaaacagtatggtctcaccaagacaacaaacgaggccatgtttgtgatcgaagcttataggactcttagagacagaggtccttatccagctgatcaggtcgtcaaagacttagacggtagcttttcctttgtggtttatgatagcaaagccggctctgtcttcactgctctggtactaattcacaaaatcagtccacgcctgttggaactcaatttcaatgtttaaagatttgaataagtcaatttgatgtaattcatgtagggatctgatggaggggtgaagctatactggggcatagctgctgatggatctgttgttatatcagatgatttggatgttatcaaagagggttgtgctaaatcttttgctccattnnnnnnnnnnnnnnnnnnnatcttgatatgcttggtaacacaaagacttgtatgtacttgatggaatgagatatgtaactagtgaagtgtttgatgaattttggcagggtgtatgttccatagtgaaggagggttaatgagctttgagcatccaatgaacaagatcaaggcgatgccgagggtagacagtgaaggagttctatgcggtgccaacttcaaggtggatgtgtacaatcgtgttaacagtatccctcgtcgaggaagtgaagccaattggtctctctgaatacttttaataacactttcaatttggtttctttttcgcacttgtgcttcttctccgctttcatcttagttatgccctgtccctaagcttgccatgaataaaactgataaataaaaaagcttttaatgttctgtttctca

SEQ ID NO: 146508 - DNA, 541 bp, Arabidopsis thaliana landsberg
gatatatcttgaaaaaagaattaagattagagtttggtatgtggaatgtggttttttggtgggtttggttttatgtgattaagtatctctacttatgtattattggtttgtaacagcacctttaagaagaaggcaccgaaagccatcaaggaaatcaggaagttcgcagagaaagctatggggactaaggacgttagggtagacgtgaaattgaacaagcaaatctggagcaagggaatcagaggtccaccaaggaggatcagggttcgtgttgcacgtaagagaaacgacgatgaagatgcgaaggaagagttcttctcccttgtcactgttgctgaaatccctgcagaaggactcagtggtcttggcacaaaggtcatcgaagaggaggattaagagaatcagtagaacaagttttgtttggttttttacttttgttgctgtgtttcaattaaaagtcttgacctttcactttcttcattgtagtgcatcttgaatttacttatgcagtttattgaagagacccattttcttcttcatg

SEQ ID NO: 146509 - DNA, 1690 bp, Arabidopsis thaliana landsberg
gattgatttagtgaattactcttttagttgggaatcgaattgtgattctattggctgctgaatttacccatcgatctaatcttgggggctgccatgtttttatattgtgatttgtttttctgatcttgatcttatttgagaaatttcgaccaacgaatgtctatttttgtggattctaatgattggttttgctgaatcagaaaagtggttgaaatataataaccttctaaagtgatgtcaaaacttaatcttcactggtcaagaattgttactttaccttactcttgcggcgatgattagtttgatggattggtttgttttttaattagcatccatcatgttggaggctccgagttatctggtgtcaagggacttaccatcttcatgtgagggagagagcaagtggatatacaatgcacactgtgtgcttcagctctccctaaggaagcgtttgttggatgatactgatgtagaaggaagttccgaaaagaaaatgttacgggttgatcatggaagcacaggtgaatccgacaagattacagatagtcttcagcttgctaaaacctatcagagctctatccagagtcaccaaggtggtggtggtgatcatcacagttcaccagttactcggcttgaccaaaacgcgcttctcaactgcttggctcactgttcgttatctgatttcgggtctatagcgtcgacgaatagaaccttccgctcgttgattaaggacagcgagttgtataggttgagacgggcaaagggtattgtggagcattggatttacttctcttgcaggctcttagaatgggaggcttatgatcctaatggagatcgctggttacgtgtaccgaaaatgacattcaacgagtgtttcatgtgttcggataaagagtctctggcggttggcaccgagcttcttgttttcggaaaagagatcatgtctcatgtgatttaccgatatagcatcttaaccaatacatggacatcgggtatgcaaatgaatgtcccgaggtgcttgtttggatcagcgagtctaggcgagatcgcggttatagctggaggatgtgatccgcgtgggaggatattgagttctgcagagctttataactctgaaactggggaatggacggtcatcccgagcatgaacaaagcgaggaaaatgtgctcgagcgtgttcatggatgggaatttctattgcattggaggtatcggagagggaaactcgaagatgctattgtgcggtgaagtctatgatctgaagaagaagacatggacattgatacctaacatgttacctgaaagaagcagtggaggtggaggagatcaagcaaaagagattgctgctgcaacagcggcttcagaggctccgccgcttgtagcagttgtaaaagacgagctttatgctgcgaattacgcgcagcaagaggtgaagaaatacgataaaaggcttaatgtatggaataaggtagggaatttgccagagagggcttcttcgatgaacggttggggaatggcgtttagggcttgtggggatcagttagtggtggttggaggacctagggcaataggaggagggtttatagagatcaatgcttgtgtcccaagtgaaggaacacaactgcattggagagttcttgcttctaagccatcgggaaactttgtgtataattgtgcggtgatgggatgt

SEQ ID NO: 146510 - DNA, 3537 bp, Arabidopsis thaliana landsberg
  unsure (1)..(3537): unsure at all n locations
atggacaacaggtatgtattggttccttgtttcagcctttatatgttatgctccagtctcttatcactttggctggacaggggaatctctacagtgcatgcgatctttatctcattcatggcattatactttgcgtacttctctgatttgttttatgaccaaagaagccttgaaaccctgacggtgtatagtaactcgactgtgtctacctttggctcaagagtaagttttgatctttcttcattttatctcacaggtcctactgatgagcattgatcaacttatatggtacttcagtatgtgaccgaggcattgagcataggtatcatttggttactttcttgcggatcttggaatgatcttaagagtatacccttctttaggaggatcagaatatgtaagttcgacacatgaaagcttatgtggtcttcaattacttgacaatcttgtgttttttgtttcagatattacatcactgcttatctggaacagcagtagcgtattctttgttctctggagaggctcagctttacacatacatggttttaatctctgaagtgactacaccagagatcaatcttagatggtaccttgacattgctggtttgaaacgatctaaagcttatcttgttaatggagttgctatattctgtgcttggttggtgagtttcttaaaacgtttgtttttcgttgtaaatgtctgaaaacttgatctccttttttatagcaatgatgttttgtttgcagtcagcaagaattcttgtgttcatctacatnnnnnnnnnnnnnnnnnnnnnntatgatcaggtaatcaagatttcggtttgattatctctaaaccaaacggtctagcctttaggaaaaataggaattactctgtgtttttttttgctgttgtattggttaggtttagagataatgaattgatgatcaatggatttttcggcaggtgatagagatgcatacattcggttatctactggtatttgttgtaccgatttcattgagtgtcatgaacttgatctggtttggtaagatagtgaagggattgaagaaaactcttgagaaaagacagtgaagaaagagttgtgtttttttttttatgtaaatataaaactcttatgaagaatcttacaagtttataagcaacaaagatatggtttgtttctaacttttagcttatacactaattatgttcaaaatctcattcccattattcccacaacagtccctatgcatgctgaatacttaaatccatgtacgaaatcaatagaggacttaacccaaaaagacttgggcctaaatctacattgggccaacgattatattcgtagttttttcgtgtcatattaacttgccgtgtaatatttgtttacttgtattttttgttagttctagaaagaaagcaacattaattcaggaggaggaggagattggttgttgttgacgacccgtttccgctcactaattttttttaacctttttgtgtctccgtcgtcttttgatcttcaatctcagttttgagctgaagattatcgtatcgacctgcgattctcttcagatcgataatccatggctgcagctggaaacaagagcattaacgccaaattggtcagtcttattagctcgattcttttgagttcccttgtggttgttttgtctctctccgatgatcgtaaaattgattgaatttgcagacccgttttgttagattttcagttttctggatttgattctgtttctaatttggagaattttgatacgtgatgttgaattggagagctttgatcagattttgttgttagggtttatgttcgattttgatttaggtttttccataatagggttttagggatttatctgaacacggtgcttgcaaacagtgttgatttggtttctgtttttttttttttgcttattttgatttgtttctgtgtacttggttaagtctttcaggtgttgcttggagatgttggtgctggaaaatcaagtcttgtgttacggtttgtcaaagatcagtttgttgaattccaggttaatggctcttctattgatgtttatgttgttgttttcacattctgtgtgtgcttcttgactttgatatatgtttatgttataggaatcaaccattggtgctgcttttttctcacaaacgttagctgtgaacgatgccactgtgaagtttgagatttgggatacagcgggtcaggaacggtaccatagtttggctccaatgtactacagaggtgctgctgctgcaatcattgtttttgatgttacgaatcaggtacataataaattaagtagatgcaaatgcaatttagtggcattctattaaattaagtttgtttgattttcttgctatcttcttaggcttcgtttgagagggcaaagaaatgggttcaggaactgcaggcacaaggtattgtatagctgagttctggatttgatagttctttgttagtttatgacttccagttgcaggcactgtcaagctttagtttctgtctgtgggttttactgaataaatgtatttgtgtgaataggtaaccctaatatggtcatggcccttgctggaaacaaatctgatttattagatgcaaggaaggtgacagcagaggtaagcaagtccttctctgtcctgactgatttttctcattatgaggttaggattttactgtcaaatataaagttgagctatgtgtgtgtaatagctgatcatcatgttgaacgtgttaagctgtattttgaaatttcacatgtcacgtttgacaggagtcagaacattaggtgatatctctttgttgtaaaattacaatctaccttattgacattaacctgacaaaccaagccacctaaaccgaccccacacacttaacaaatcataaattaggcttgttgtatagacagttaatgtttcattaagaagtatagtgcagttttctctaaccagctttggagaatgatatatatgttttcatatgacctttcttatcccgcaatcccgcaagtccatattttactgtcttatgccaaaagcctagattttagataagtagcatttctcaagactgatccttttgaagtatctgttagaatcatttacgttgtgcattaaagttcagttgtgacttgcaaaggacagaaaaacacagttctgttgtgtgtcagagatatgcatctctaatgaagtagacattatatacatagacaatgtgcgcaccctttaactttgcttctgaatctcactgattcacggatttcctgatgatatctcacactcttgatcctttgcaggatgcacaaacatatgctcaggaaaacggtcttttcttcatggaaacttcagcaaaaaccgctactaatgtcaaagagatattctatgaaatcggtgagctttccttacactttgataaccagttcacacaatttttgtctctcgtatcctaaaccctatcatacttattctttaggctggaacagcaagaaggctaccgcgagtacagccaacagaaaacgcaacaggaatggatctgc

SEQ ID NO: 146511 - DNA, 1933 bp, Arabidopsis thaliana landsberg
atgattaattttacctctacgagatctttcaattcgtctccttcttcttcttcttctaaacgagaagaggaggttctagacttgtttagttttagtaatcagctacaacgagaagacgctattaatccttgcaggacaagtggtgaaaaacgcatcgttttattataataatgttaacaatatgggcctttcacgatggcccaataaaaacattattacaacgtctattaggatagcggcccacgtctcaaagaaagttgagtcataaaaagccgccaatttcaccaaccacgtctcaacttttgactaaaaagtaaacgtaagtgtagactacagagggtattattgtcagattctccataagcctcttctctctctcagagtgtggtttcatactatttatgtaaaaggaagcaacgggtgagaagaattaaaaagccgcaattttgggatcataagagttctcttcttcatctgtgattcattccgttgttacccgccccaccagccaccgtactttttctctctctccggcaaaatccgagtctaaaaatgacgagtaagagcaaaatcctgttcatcggaggaacgggttatatcgggaaatatatagtggaagcgagcgcaagatctggccacccaaccttagttctcgttcgaaattcgacgctcacaagcccttcacgatccatcaccatcgagaatttcaagaatctcggcgttcagtttctcctcgtacgtatctatctctttacgctcttctctttcctttgatcctccgtacaaatgtttacttcaatggtttagtgattttctgattctgattataatactaaaactggatagggagatcttgacgaccatacgagtctcgtgaattcgatcaagcaagcggatgtggtcatctctactgttggacactccctcttgggacatcaatacaagatcatctccgccattaaagaagccggtaatgttaaggtaatcaactttagtctaaatcttagtctcatatgacatttggaacccctacaaatgaattttgttacttcttgtattgacaatgtagtttgcaatgcattggttttggtgtcttctgtgatactttttagaatcaatgaacttggatgttgtactaagcatagagttgagtaacaattttatagactctgatatcaaattgaccctccaactgatgcactaccgtcacacctgtcttaccagagattctttccctccgagtttggaaatgacgtagaccgtgttttcactgtcgaaccggccaagtcagcctatgctacaaaggccaaaatccggcgaacaattgaggccgaaggaatcccatacacttatgtctcatgcaacttcttcgctggctacttcctcccaactctagcttaacctggtgctacttctgctccacgggataaggtcattgttttaagggatgggaaccccaaaggtaagactactcttagttttcttataatacaaatcgagatccaaattctcttagagtaatatgattatgtttggtttaaaaaacaccaaagtgaagctgaaaggtctttgtcagaaccttataacatggatcaaaggatactatgtttcaattatctgaaacatccgcagtttcttgtccagctactcccttcttattgaggtgatattttgcagctgtgttcaacaaggaagaagacatcggaacttacacaatcaatgccgtagatgatccaagaactttgaacaagatcttatatattaggccaccaatgaacacttactcattcaatgatcttgtctcgctttgggagaacaagattggcaaaacacttgaaagaatctacgttccagaagaacaactcctcaaacagatcataggttttgatcctaaacctttcttcttcttcttccaattatgactagatattat

SEQ ID NO: 146512 - DNA, 3195 bp, Arabidopsis thaliana landsberg
tttcccgtagaatccttatacgcttcaacaagctctatttcctcctcggccacctcgtgtttctgccgacgtcaatggtggattacccattccacctgtttggtattcaatcagccaagcctgggaagtatgttgctatcgtcatgtttgttggaattgtcacgcttgggatgctttctgctctagctttcttcgtgtgccgtcataaagccaagcacgccagctgatactcagaagcttgttactgtaggtggcgatggcggtggcggttctcgaagattccaggaagatccaggaccaccgacgacgacgtcttctacatttctctatatgggaactgttgaaccgagccgagtttcggccagtgagtctaccagcggaactaatggaccggttaattcgtctccgtaccggaaattgaattcggctaagagatcggaacggtataggcccagtccggagcttcaaccgcttcctccgttagctaaacccccgcaaccctctgataactctccgtcggctttatctccttcttcatcatcttccggtgaagaatgccgtgacacagcgttttacacgccgcacggatctgcgatcagcagcgatgacggttactacacggcattccctcgctccgccaatggatcacttcctcactccaagagaacatctccgaggtctaagtttggatcagctccgacgacggcatcatctaggtcgccggagatgaaacacgtcatcatcccatcgattaagcagaaactaccgccaccagtacaacctccgcctctaagaggcttggaaagtgatgaacaagagcttccttattcccagaacaagcctaagttctcgcagccacctccaccgcccaatagggcggcgtttcaagccataactcaggaaaaatcaccagtgccaccaccacgacggtctccacctccactccagactccaccaccacctcctccgccgccgcctcttgctccgcctccacctcctcagaaacggccgagagatttccagatgctacgaaaagtcaccaattcggaagcaacaaccaactccacaacgtcaccttcaagaaaacaagcattcacgactccaagtcttaaaacgaaggctgttgaggaggtcaatagcgtatcagcaggttctcttgagaaatcaggtgatggggacacggacccaagcaagccaaagttaaagccactccactgggacaaagtacgagcgagctcagatcgagccactgtttgggaccagctcaaatcaagctcattccagtgggtagcattttttactacatatttgtgccgcatgcatttttgaatttgacgtttttagtgacttttttgatctgatcatgctatatagattgaacgaggataggatggagcatctgtttggttgcaattctggaagttcagctccaaaggaacctgtgagaaggtcagtgatacctttagctgagaatgagaacagagtgcttgatccaaagaaatcgcagaacattgcaattctcttaagagctctcaatgtaacacgtgaagaggtttccgaagctctcacggatggtaagtcattgtctccaattttatttatttttgaagggaaggttccatttgcatcttaaagcagcattttcatagattgtgcacatttaggttcctctgtttggcacataactcgtttttaaaaatattgatgccttgatgggctaatggagatcttgcggatagatagagatgcgctcatcagagttaacattggtgaaaatctaaataatactaaaatggcttaggccacaagttataatcattgcaaagaaaattgacatatgaaatgattatctctgctttatattgcttctaacatgacagttcaacttatgaaacataccacatgtaaaggagaaaaaggtccatcctataatattttacaagactatcaaatatgttgtagctgacattcaataagattctctgagcaccattgatttcattacgttctcgttctaagatgcatgagcatttgtggtccctattattttaatttaatagtacttgtggcacctgtaacaggtaatccagagagcttaggtgctgagcttctagagactttggtgaagatggctccaaccaaggaggaagagatcaaactgcgagagtactctggtgatgtctctaaactaggaacagctgaaagattcctcaaaaccattctcgatatcccttttgccttcaaaagagttgaagcaatgttgtatagagccaactttgatgcagaagtcaagtatctaagaaactctttccagacattagaggttagttacttaacaagacacttaatgattaaatttctcaaacgaattgtcctaattctaatcccttggttgctttgtaggaagcaagcttggaactaaaagcaagcagactattcctaaagctcctcgaggctgttctaatgactggaaaccgaatgaacgttggcacgaatcgcggagatgccatagccttcaaactcgatacgcttttaaaacttgtagacatcaaaggagttgatggcaaaaccacattacttcattttgtcgtccaagaaatcacaagatccgagggaacaacgacaacaagaggtgaaaccattctccatggaaacaatgacggtttcagaaagcaaggattacaagtggttgctggactcagtagagatctggttaatgtgaaaaaatcagccggaatggatttcgatgtactgagcagttacgtgacaaagctcgaaatgggtcttgataaactccgatcatttctcaagacagagacaactcaagggaagttctttgattcgatgaaaacgtttctcaaagaagcagaggaagaaatccgaaagatcaaagagggagaaagaaaagctttgtcaatggtgaaagaagtaacagagtacttccccggaaacgctgcgagagaagaagcacatcctttaagaatcttcatggtggtgagagattttctcggagttctcgataacgtttgtaaagaagtgaagacgatgcaagaaatgtcgacatcgatgggttcagcttcagctagatcgttcaggatttcagcaacagcttcgttaccggttcttcataggtataaagcaagacaagacgacacaagctcggatagtgaacacagcagcaactcttctacgtga

SEQ ID NO: 146513 - DNA, 3469 bp, Arabidopsis thaliana landsberg
gtcaaacttctttttgcatgatcatatcattcacttccgcttaatttttcagtgatcttattttgttcacgttcacaatccaggttcactaaaatattgtcttgatcattcaaatttgtataaaacaggtggatactaaagtaaaaggaactctagactatggagaatttgtagcagtgtctctccacctgcaaaaggtagcaaacgatgagcatctccgcaaagccttctcttactttgacaagcatgcaaatgggtacattttgccccaggagctttgtgacgccttaaaggaagatggaggagatgactgtgtggatgtcgccaatgatatattccaagaagttgacacagacaaggtaagtgtcaaatcttctgtctatggtatgatctcatcatgttcaaaagaaactcaaaagagctttcttttgcaagagtgttaggaaaccaaagttgtgaggaagtcctaaaaaggcacaaaggacaggagatgtgactttaaatcttttttctttttgcgctatttgtttgatgataaccaaaccatttgaatttacagttttacacataggtaatggaaacatgctttgcaaaaagttcttaaaagcctgaggacaaaacatgtagctttaaacacttttttcagttttattcttttggcatttgtctgttgtgtaagcggtccccataaactaaaggcaaaatgatttctctgttgtagtggaaatactatctgtagagagttcacttctcatatcgttaaacagaaccttagagactatagttagtgtaaaaatgtttcttctggttgtgcctgacatggatttttgacattaggatgggagaataagctacgaagagtttgcggcaatgatgaaaacaggaacggattggagaaaggcgtctcgtcattactcaagagggagattcaatagcctaagcatcaagctaatgaaggacgggtctttgaacctaggcaacgaatagcgaatcaaagtgaagaagccgcaatagggtctttagtgtctgtctctcacgccacgttctcgtgcacgtcaagtattaaaccaagagaaggtaaaacttgggattcagaattcatatctttttgtacatctttcgttttttaacctttctatttttggtgattatgttatctgtgttcttttttttattggtttatgggttgagttgtgtttgtttagtttgttctggtagaaatccaaaagacatgagaatcagtgtttgatgtgtagaaggaaaaaaaaccaaagaccatttctggtaatgatgttgtaatattcttttgtcttccttaacctctataatgatatgatgagtcattcacacaaccctatcctctattttgcgcaaagttctaagcgatgatgactttgtatcaatcggtaatataatgacgcttgtttcaaatcaaacacgaaagctacctagtacctactttttcccatctcagctctgagtatcaacatcagtgattacactagcaatccctgcattattgacctgcaaaccaaatcaaataatcactcaacgttatacaagaatcttaaccaactcttatgagcctttctttattggagatcaatcacttatctgataggaacaaattaaccacaaaagggacttgctttcttgtcaaaaggttaccagtaacatcctagctagtgccaatcgttttcaacaagatttgagattttagatgctaaatccaaaacctatttcatactaagtaaactgatagaggattgtactaatcataccaagatatccaagttttccaattttagtattcacaaatctgtatgtaaagagttgtgacacatggagccgatgaattatgaaatataatattctgattataaaggcctttgtctacaacttcaagtcccttttttatcagctctagaggtcaaaactacgctaatcattttgctacctaattgtctgccaatatttagcccaatccctctgtgtgcagcagaaactatatcactaggttattgccttattggattggatatttgcattgcattttagaatccaattacaatgttgtgttattcaatcaataatttacatatttaaattgacaatgctgtatttcacaattattagttatattttggtgttattcaatttatgatttttaaatacaagttatatgttagaccaaaataaaaagaaatataagttataagttgctgaaaataactataggtgaaagaatctataaaccacaaaaaataactccaagctcggattgtttttctccgaataaaacaaaatattcactaaaatcattaagcagagacgccaacacaacacaactcaactctttgtgtctttgtacagttgtacgaatggtcatgtactatgttattattattattccggaaagctccactactctctcaatcattttgaaattgtctcctcaatattttgtttggctcactagctttgttatacgtatggtatgggcaacgatatgaaaggtatataaatcacacaattaaaattcaagatagtgatatttgaagttgtgttttggacaaaaacaaagctatcgttgttagcttgtgagataggaaatttcgaggaaggtctttatatgtaattctcgcatgcatgtgagatgttgatcgatcattttccccacaatatttacgagatttctgtccctataaaaaaagattgtgatgataatagtcaagtggaattcctaagcaaactaagtgtatgctttactccctggaaccgaaccctacatatcttgaaatttgttatgtaaattcagccgatcctctagtccagtttcgcccttaaccgttacctatttcaagttttgataagagccatcgtggtatgaatgttaacccgctacttaactagttacaatttacaactacataagttttggagtcacgtgttatatatatgatttatagacatttgaattattggctaatattggcccagtcttggtctctccgtgataatggatattctcttttgattccatgtcccttgtcaaatctctaacaactacactctgatgatttggaacaagctggaaacaaaaaaaaaagttcttacataacaaccctaaatgattgatcagtaaatgttatattctaacttcagatttagttgtatcatgtataaaggaaaaaaaaactaatcatataggattgttaattaaccaaagacatcaatatatgactattaatccaatgcaataagattaattatatagtttttaaatatttaaattaatttaattaacttgaaaagctttcaaattattattagtgtacttgaatgagcgaaattggccaaaatgcaaacagccgcttatcgcctttatgtcttggtgctaaaactgctgccgcttcgaaaagccaaaggcaaagcgttaattataaattttttggtacaacaaaagtga

SEQ ID NO: 146514 - DNA, 1823 bp, Arabidopsis thaliana landsberg
aagagactcgttggattcgtgaagccgaaaaaaaaaaaaaaatggtaattctcagcaacgtctcgttgttctcctgctgcaacatctctcagaaaccatctctcttttctccgtcttctcgtagttctcattgtcccattcgttgctcacagtcacaggtaacctccaaaattttttctccaacctcctctgaaccgctttgagaaagaagaaaaaaaacggttgtgataaagaaagagccaaatttgaatttagtagttgattacacttctagcttttgtttagtgaagattcgtaggaactgattcatgtttgatctttgtggtctatcttatgtagttatgttagaacatatgttcatgtttgtatgtatagttgatactagtattgttgatacattgagaagaaaactgattttgaggtaatgtttgacctagacaagatccagttttatatttccgttgagattcagacaatattcttttttgtgtttttctgtttttgggcaggaagggaaagaagtggttaccagtcctttgagaagtgtggtttggtcattaggagaagaggtttcaaagagaagtctatttgcacttgtctctgcttctctcttctttgttgatcctgctcttgcttttaaggtaaccttttgttctacttatctccttttaattctattcttgaatctgtagtgaaagtaaataaaggaacttacatatagtggtagtacacaattggtatagattataaaaggtcgaaactttaaagcaagtgatgatcagatcaccatagataagttattgtgagcaaacctttcgttttttatggaaattttatcatcctatctaaattggaaaccattgagtcttaagattaggcactttctttgttagcaactagaatgataagttgaaacagtttgccctgtagtttcactgtcaagctaatggtagtatggtactttgtttaccattgtatatatggcctccgaattattttaggtgtctgtagcaacaaagcttcttggaaatgttatcttagttcttgatggatttcatattctagtgactaagatatcataagatgttcttctctatagctcactttattttctggatttggatgaaaccgaaagggtggaggtccctatggtcaaggagtcaccaggggacaggacttatctggcaaagatttcagtggccagactcttatcaggcaggacttcaaaacggtaatacattatgcagttatagaaaggacttcaaaacggtatacattatgaagttatagattgttatatatcatcatgaacaccatattaatcatccttttatttgatggtattttcgccagtccatcctaaggcaagccaacttcaagggtgcaaagttgttaggtgctagcttctttgatgcagatctaacaggtttattttcttttctttattgaggtagtagaagaactgtaataatagagaccacttctcattcatggatgttaaactcttatcatggtgaatccaggtgctgatttatcggaagctgatctccgaggtgcagatttctccttggcaaatgtaacaaaggttgtattcgatgttacatatacgtgttgctatatgatcttaaatgtgtataaagctaatgataacaaaaagatctttgacattaatggcccataatagttaaaaatgctacatcttgcaggtgaatctaacgaacgctaacttagaaggagcgactgttactggaaacacatcattcaagggatcaaacattacaggcgcaggcgaaaaaagaaaagaaaactttcatgataacaat

SEQ ID NO: 146515 - DNA, 1204 bp, Arabidopsis thaliana landsberg
  unsure (1)..(1204): unsure at all n locations
attagatcggcgccactttctaancgcaaatgggaatcacgagaaacttgatcctgggtttggcttgtttagcctttgtctccattgctaaagctctgcctcatgaaccagaacttggctcggctcgtgtcgtcttccaggttcatttctcgtctcctcttctctgctaagtttaaccctagtcatagttcatgccgttatttgatttgattgtgttaaaagaaactttacagtgtataatcggatcaaactctcaacttgaatttgggcaaaatcgattttagttttctttaactttctacccaaattcatgttccaggaacttgaaatgtgttaatggtattcggaatggatgataatggttgtgcagactagttatggagatatcgaatttgggttctatcccactgtggcacccaagacagtggatcacatcttcaagcttgttcgtttaggaggatacaacactaatcatttcttcagggtatatggcttaaaggctcaagctttgataaaagttttgcatctctggcctgttttttttttggaagaaggggctaagtgtgagtcattttgcaggttgataaaggttttgttgctcaagttgcggatgtggcgagtgnacgatcagctccaatgaatgaggagcaaaggaaagaagctgagaagaaaattgtgggagagttcagtgatgttaagcatgtcagaggtactctttccatgggaaggtatggtatcttttgatcttgtgtagcttggattgtttatatgtgttctgtgaatgtcctcgtgtagctcgtgactgttgctttttgttgtgttcatatcattttggtaaaggtaattgcatggtgatgtttcgtctttccgtgattttgtttttgttcggtagatatgacgatccaaacagtgcacaatcttcattttcgatgcttcttggcaatgctcctcatcttgatcgccaggtcagattgctaattcagcgcagactattggctttatcttaagatgactagtagtaataagattggaggtattcaacagtatgctgtgtttggtaaagttactaaaggagatgaaacattgagtaagctagaagaagttcccactcgccgcgaggggatttttgttatggtatgttttcaagaaaaccagaatttcgttagcttagtcaatagttggatttcattcaactttggtcatt

SEQ ID NO: 146516 - DNA, 3123 bp, Arabidopsis thaliana landsberg
  unsure (1)..(3123): unsure at all n locations
attttagaaaatactaaactatttactgattgtgaaaggcattggcacgccattatctataaaagttggaatgatgcatgaggatctttgataatacagtccaacacgttatgtttttcatgttttacttggcaatacgaataatacaactaattaatattaccggccaaaattcaaagatattgacacatgtaagatagatacaattacacacacttaagtaataattatagacggatacggataattgaatagaactaatttaacaaagtcaagattctgtgacattacattttgtttttaaaaatatttgaatcctaatggataaagggctaaaaacttcaatgaaggtgttattagtagtgccccttttttttgtttcttctcccttcgcttgttttggcttcttcagtaagagacatttggcttttgagtttaacgtcatttggtagtgatcacttttcctttaacgaaattaagatgagaaaactgcaaattaagtacagtattaattaactaagatatactgtatattataggtactgcatgctacacttttcttttcgggggcttgtttaaactaggattgtgctacaaaccagatattttattttaaaattaaacataaaaatatcatttatttacagtaaaatatatctcattatagaatggatgaagtataatagcatatggtaagaaaaaaaaaacctcaacggtggatatgtttattctctctatctcctttacaaaacttcttctagtttgtatatattgtaaaaggttgtctgcatttacataaggcaatatccacgcggatcggagattaaagaatacttcagtcgcttatgtaacacaaagttaatgtaatgaagttcataactcatcagtcaccagtcacaagttaaattgattagattctagaccaataagtatccatctcctttttctttttggtcgtctaataagtatccagttctttgcattttgacaaaattaatttattacctaattaacaaagaatcacattgcggaatattcaccactcaccatctactactagctagctagccacaacaagacataaaatcaaattggttttataaacatataaaaaaataaacgcatgattcgtcttgtaacgcgacgggccgacttatgcatttttaatcactcaaaatactgatcctagaggccttatatatatatatatatagatagagagcctgatatatatgtattgatccctctctctaaagcaaaaaaacaaatctcaaaataaaaaggtggattaaaattaagtccctaaagtatcatcatgattaaaaagttcagcaatatggattacaaccagaaacgagagagatgtgggcaatacatcgaagccctcgaagaggaacgtcgcaagattcatgtatttcaacgtgaacttcctctttgcttagaccttgtaactcaaggtatgtataaatatacaatgaaatatatttatctataaaaacatatatttactacatcaaatgtaaaatttgtgatctatttttttctaaattaaataaaaattacaatatatttatgaaaattctagtatgtatagtaacgtacattttaccatttccatattatttcttaagcgatcgaggcatgtaagagggagttaccggagatgacgacggagaatatgtacggacaaccagagtgctcggagcagacgaccggagaatgtgggccggtcttggagcagtttctaactattaaagattcatcgacatccaacgaagaagaagatgaagaattcgacgatgagcatggaaatcacgatccagacaatgattccgaggacaagaacacgaaatctgattggcttaagtctgttcaactctggaatcaacccgaccacccacttcttccaaaagaggtaatacattaaataattaagatcaaagctcagacgaatcttaattatgagtatgcaatgctatagtggctaatttttaacatgttattatgttcttaactcctctccaaaattattggttaataaaaaaagtctcaaagaaaacgctctaatatttgtgatttgcgtttcaggaaaggttgcagcaggagacgatgacaagagatgagagtatgagaaaagatccgatggtgaacggtggcgaagggaggaagagagaggcggagaaagacggaggaggagggagaaagcaaagaaggtgttggtcgtcgcaattgcatagacgcttcttgaacgctcttcaacacttaggtggacctcatggtgcgttttgaatttatttatatgatttacattgttttcaaactatttgaataaatttgttgttgttatatagggtttttgagattttggttagtatattgatttttagtaaatgaattttgcagtagctacgccaaagcaaatcagggagtttatgaaggttgatgggttaaccaatgatgaagttaaaagccatttacaggtaactatatgtctatattaagcacatgcaaataagatgttcatcttaagttgttttttttttttttttcctaacttaaaatctatgctatgcaataattatagaaatatagactgcatacaagaaggccacgccaaacagtccctaacaacggaaactctcaaacgcaacatttnnnnnnnnnnnnnnnnnnnnnnnnnnnnnnnnnngactactctacgggcaagactaccggaggagccaccaccagcagtaccaccacaaccaccggcatctatggaaccatggccgcaccgccacctccacaatggcctagccattccaattatagaccgtcgattattgtggacgaaggatcgggaagtcatagtgaaggggtcgtggtccggtgtagctcgccggcgatgtcttcttctacccgtaatcattacgtcaagaataattaatttgtttttactgtactctaatgttttgtggtcatttaatactattattttgtttattctctctatactgtattagaatttgatgccgggattaaagagtgtatagagttttgcaccaaatcaatctttctattttacttataatgtatttcatatttattttggagttagttaatttccatcttctttttttgggt

SEQ ID NO: 146517 - DNA, 6192 bp, Arabidopsis thaliana landsberg
agggaaattctggtggcaccggaactcctacttcagctggaagtgccggcattcgtacgttttccttctctgcttgttaaatagttttaagtatcaccgctctacattttccttctcctttgcctaactattgtgaagttgtagtttgccttccttgctttgaaggttctctcctgaacgattgaaaaagttaactcttttcttatggcttaattattctgatagagggcccttgccaagccttgaacttttaaagatttacctatttcaaagatatacgctggttatttgcttgcaatcttgtgagatcgtctaagtttggaaactttagttctgaaagcttcacatctgttaaatttaactggcaatctgaggtggcagtgtttcctcaacatttattgcatcctatttcatttggaatcggtagagcaaagagcttgatgtagtaccagggcacagtattggctgtggaatgttagatcactaattccgtttatttgctgatagattctatgttctagttcttgttatttcttaaggttcctagatttatctggttgtattaattaatttgggtgttcttttctctgcagggctagctggggcaactgctgatgttcattgttatgatgtactttctaataagtggactaggtgagcattaaatgtgaatgtctttgggttttcacgctaattatgaaaaatgcatgagatcctaccccgtttaaaagtgtggataccagttaattaaatgaattgaggctacaggcttacaccttttggagaaccaccaaccccgagggccgcacatgttgcaactgcagtcgggaccatggtagttattcaggtaggggagaaatgatgtttttatattatgtgtatgatttaagtttatcaatgtaagatgagcatttccagtcagctatgaaagtgcttataaattctttctgttgtacagggtggaattggtcctgctggtttatcggctgaagaccttcatgttcttgatctcactcaacaacggccacgatggcacaggtttgaaaatatgcctgccactatctcggttgaaaattcattttactagttcgtgtcttgatattgattatgtctctatccagggttgttgttcagggtcctggaccaggacctcgttatggacatgtcatggcactcgtggggcaaaggtatctcatggcaattggtggaaatgatggtaagcagttttccatattggcttattctcagtgttttatgtaagggtatcatattctcattaaagcttcacccttctgaactccattcgaactactaggaaaacgtccacttgctgatgtatgggccttggatactgccgccaagccttatgaatggcgtaagttggaaccagaaggggaaggtccaccttcctgcatgtaagtttgattagactcctttatgattgtgagctttctggagtaattgtttatatctgtttgtacgttgtaactaggtatgcaactgcaagtgcgcgctccgatggtcttcttctcctctgtggtggaagggatgcaaacagtgtggtaagtgaagagatttattacagtcatacccaattatctctttgaaacaaacactgagccacttatagaggcatgattctattttggcttttgcttttagtgtgagataaaaatgggaccgtgagatttagtcaattaatttgtagaggttgagttttgtcactgagcaaattgaaaagtattttatttccccagctacaaatttattaatggtccaatgaacgatcttcattctatgttccagagcagatggagatgtaactcttctctgctaagtaaattaatcaagagtttgtgtgtgtttcaacacagactctgaagaagtaacaaacataaattgtgtgcaagacctcgtgaagcttctacgagaaaaggaactataatttcttttgtcaacaaggaatgagcttattatcaattatgtgtttatacatgatcatgagaagttgtcaattctgcgtaaagtgaaatatgaaacttaatggactgctttaatcttgaatggttgattgaggagcttaatttttttctacgtttgaattgatagcctctggccagtgcatatggacttgcgaagcacagagatggacgttgggaatgggccatagcccctggtgtctcaccatcttccagatatcagcatgcagcagtatggatgcttcttcctctttggttctcttttctgtcctcatcagaattattaaattctttggttaattatttaggtctttgtaaatgcaagacttcatgtgtccggtggggcacttggtggtggacgcatggttgaagactcatccagtgttgcaggttagcaaatgaaaagaggcagtctgatgtttgtgctgttggattatcattgaggaaatacttgagtttccatataatttctgcaccacttttagtcttctgttggccattgttgaaatgtgtctcatgtatagacgatagttgtatattttggttttgtactaaaatgtgcattgagttcatctacaattctctgattatttcatctattgtctttgtacagtattggatactgcagcaggtgtatggtgtgatacaaaatcagttgttactagtcctagaactggtaggtatagtgccgatgcagctggtggcgatgcttcggttgagctgactaggcggtgtaggcatgctgctgctgcagtcggtgatttgatatttatctacggcggtttacgtggaggtaaagagctggcagaactttgctaatgtacctttgatgctttgttacagaccaacattgtttagatatcacaattcttttgcatgcttcttaatgaggataaaccaatatatacggttggattgttctttaaatgtggcataatgtacattgtgtagccagtgtgtgctactgtagaattacgccttctttactaggtattgcttttcgtcagaatctgagagaccataacagaaatagcgaatatataaaattcctgcattctttagaaattatggtttcactacttaattatatattgttgatactttaggggtgttactcgatgacttattggttgctgaagatcttgctgctgcggaaacaacatatgctgcttctcatgctgctgcagctgcggcaacaaattctccaccaggtcgattacctggaaggtatggtttttcagatgaaaggaacagggagttatctgaatcagctgctgatggcgctgtggtgctgggaagccctgttgcaccccctgtaaatggtgatatgcatactgatattagccctgaaaatgcattacttccaggaactcggttagctaacttccctaaagaatgatttatcttgtgccgtattgttaaaacagtgatgaatttagtgacaatgatccatcaccactttgtaggagaacgaataagggtgtggagtatcttgttgaagcatcagcagcggaagctgaggcgatcagtgcgacgttggctgctgccaaggcaagacaagtcaatggtgaagttgaactccctgatagggattgtggtgcagaggctacacccagtgggaaacctacattttcgctaatcaagccagattctatgggctcaatgagtgttacacctgcagggattcgtcttcatcatagagctgtgagtgtcacacttattgtattgaatatatcaagtcttgcattatactactttgaacaccatgttcttcatttactagtatttcttaccccaaattctcaccactaaagcatttctggtttataatgtttctggcactttgttatttaggtggtggttgctgctgaaaccggtggcgccttaggtggaatggttagacagttatccattgatcaatttgaaaatgagggacggcgtgtcagttatggtacaccagaaagtgcgacaacagcaaggaaattattagatcgacaaatgtcaatcaacagtgttccaaagaaggtaaagattttgattatcgacataattttctgtattattgggatcctacatgtggatttaaaaacacagtaatacatctggtaaagtgtgatgaaattatgaaaagggtacaatcttgaactattatataatactttcgttctgtggcattggttaattgtgatagaaatcgaataagctattgtataggtatactatctcctggtttccattactggtaactcatagttgaagattcgtttgcatcctcttattgttcaattaagcatcgggtgcctaaagactcgcttagtgattctggagttttaacaatatgtgacctaactatgtcttaataggttatagctcatcttttgaagcctcgtggttggaagcctcctgttcgacggcagtttttcctagattgcaatgaaatagctgatctttgtgatagtgcagaacgtatcttcgcaagtgaaccgactgtattacagcttaaagctcctatcaaaatatttggtgatctgcatgggcagtttggggatcttatgcgcctttttgatgaatatggttcaccatctacagctggagacatatcgtaagtgcatcactaaaacttgtgacatcagtggccctacttcttgctactttttgctggacattgctcattttgttgtttaattgtcagatatatcgactacctcttcttaggggactatgttgatcggggtcaacacagtctagaaacaatctcccttctacttgcactaaaggtagtcctaagtgtattatgtcagttttgccttgatgcaggtgttctagttgcttttgaccatagaaggtttgacgttctatttttggtactgcaggttgagtaccagcataatgtacacttaattcggggaaaccatgaagctgcagatatcaatgccctttttggcttccggatagagtgtattgagcgaatggtaatgtaatctgcttctgaatctcttgtttccatgtttatttgtctcatgttgtggttgctttgtagggtgaacgtgatggaatctgggtgtggcaccgaataaatcgtttattcaattggctacctcttgctgcatcgattgagaagaaaattatctgtatgcatgggggtattggtcgttctataaatcatgtggagcagatagaaaatattcaacgtccaattacaatggaagctggctccattgttcttatggatttattatggttagtccttagcttctatatgttggtctgcttaatgttttggtcgagtcttactaatttgttaatttggatttgctaggtcggatccaactgaaaatgacagtgtcgaaggtttaaggcccaatgctagaggccctggattggttacttttggggtaagtaattttcttgtgttttaattttatgttgtctgaatttcgtttttcctcccttcagaaaaccaataatctctttcttttctcacaatatttattctgtgcaatgaggtgctgctattgttagaccaagaatatatgatatttttttcttgaaaccaaggaatatagtctagtttgctcccaataatttaccatatgaagaagtgttaattgcttttgcttttcatttttacctgttctgttactcaccaaaacttggcaattgtagcctgaccgtgtcatggagttctgcaacaacaacgatcttcagttgattgtacgagcacacgaatgcgtaatggatggatttgagcgttttgctcaggggcatttgataacgctcttttctgctacaaactattgtggtatgtacatggactcactaagtgccataaccggattttgatattttgatggggttattttctgttttcttaatagtttttatactaaatctcaggtactgcaaacaatgctggggctatcttggtactagggagagatcttgtagtggtacctaagctcattcatccgttacctccagcactttcatcgcctgaaacttcaccagaaagacatatagaagacacatggatgcaggttcatattgcttcatttcattactgaatcttagtccatagttattgacctgaaacattggtacttagcgtagtatgtacttttcgcaggagctgaacgcaaataggccagcgacgccaacccgaggacgcccacaaaattcaaatgaccgaggaggttctctggcttggatgtga

SEQ ID NO: 146518 - DNA, 1261 bp, Arabidopsis thaliana landsberg
atggatctgacccaaggtttcagagctagatccggcgttgttgggccggtggccggactagaatctctcaatttcagcgacgaatttcggcacttagtgacgacgatgcctccggagactactggcggctccttcacggctttactcgagatgcctgtgactcaggccatggagcttctccatttcccagattcatcgtcttctcaggccagaaccgttaccagtggtgatatttctcctaccactcttcaccctttcggggctttgacttttccttctaactcgcttctcttggaccgcgccgctcgtttctcggtgattgctacagagcaaaacggtaatttttccggcgagactgctaactctttaccttctaatcccggcgcgaatctggacagagtcaaagccgagcctgctgagaccgattcaatggtggagaatcagaaccagagctactcttctggaaaaaggaaagaacgcgagaagaaggtgataccaattgttcacacaatcaaacttgttaattaaacaagagagattagtccctaatttctttattccttaatttctaggtcaaaagctcgacgaagaagaacaagagctccgtggagtcagacaagttgccatatgttcatgtcagagctcgtcgtggtcaagctactgataaccatagcttagcagagagagtaattcacaatctcacagacatggtttgtattaattaattagtggcaatatgctaattaatcattaactcttgattataggcaagaagggagaagataaacgcacgaatgaagctgctacaggaactggtcccaggctgtgataaggtttgtctttagataattgaccttttaatcaaaaagctaatcaataattagatcttcatttgtgcttaaagacagaatctttctttattaagaccaacccccaaaaagtgattttttttctataatttgatcatgtggtttgataagggtttagtgctaaattcctcttatatgaaaaaggttttgtggtgtgacaaagaacaaaaccactagtttggtaatttcactgccttgaagatatgtaaactttattttcgtgtggggaagaatatctcacgggtcacaaccatttaggtaaactagtagtagtaatacggaagtgatgtgacattgctcaatagattcttgtttcttcttcccaaagtgtattcatttgagcttgaagcttactccataaatgccgataatggattattatatgtgggaat

SEQ ID NO: 146519 - DNA, 1181 bp, Arabidopsis thaliana landsberg
atcttgccttggagaagagcttgcgtagagatagtgcagttagggtaataaggggcttgaaagaggctttttataatgctaagatctatatttatgatggactctatgagattaaagagtcatgggtagagaaaggaaaatctggacacaacaccttcaagtataaactagttagagctcctggtcaaccgcctgcatttgcttcatggactgcaatccagaaatggaagacgggtgtgccttcaaggcaaggactcattcttcccgatatgacttccggggttgaaagcatacctgtttcacttgttaacgaagttgataccgacaatgggcctgcttatttcacctactccacaactgtgaaatactcagagtcgtttaagctgatgcagccttcttttggatgtgattgtgccaacttatgcaaaccagggaacttggattgtcactgcataaggaaaaatggaggtgacttcccctacaccggtaatggaattctagttagccgaaagcctatgatatatgaatgcagtccatcttgcccgtgctcgacttgcaaaaacaaggtgactcaaatgggagtaaaagtgaggctggaagttttcaagacagcgaatataggatggggattgcggtcatgggatgctattcgtgctggttcttttatatgtatctatgtaggtgaggccaaagacaaatcaaaggtgcagcaaactatggctaatgatgattatacttttgatacaaccaatgtgtataaccctttcaagtggaactacgaacctggcttaacagacgaagatgcttgtgaagagatgtctgaagaatctgaaatcccgctgccactgataatcagtgctaagaatgttgggaacgttgcccgattcatgaatcatagttgctcacctaatgttttctggcagccggttagttatgaaaataacagtcaactctttgtgcatgtggccttctttgccatttctcacatccctccaatgactgagttaacttacgactatggagtatctagaccaagtgggactcaaaatggcaatcctttatatggcaaaaggaaatgcttctgtggatcagcgtattgccgtggctcatttggatgatgatggagagaaaggcgatctctggtgaacaactggagtcggatgattttggttgcaaaaagg

SEQ ID NO: 146520 - DNA, 819 bp, Arabidopsis thaliana landsberg
atggaatctgaaatcgcctccgagtttcttcctttctgccggatttacaaagacggtcgtgtagaacgactcatcggcaccgataccatcccggcctctctagatccaacacacgacgtcgtttcaaaagacgttatatactcaccggagaataacctctccgttcgtctcttcctccctcacaaatcaacaaaactcaccgccggtaacaagctccctctacttatctacatccacggcggagcttggatcatcgagtcacctttctccccactctaccacaattacctcactgaagtagtcaaatccgctaactgcctggccgtctctgttcagtatcgccgtgcaccggaagatccggttccggcggcgtatgaagatgtatggtccgctattcagtggatttttgctcattctaatggatctggtcctgtagattggattaacaaacacgccgacttcggaaaagttttcctcggcggagatagcgccggcggtaacatatcgcatcacatggcgatgaaagctggtaaagagaagaagctagatctcaaaatcaaaggtattgctgttgttcatccagctttctggggaacagatccggttgatgaatacgatgtgccagataaagaaaccagaaacggaatcgcagaaatttgggagaaaatcgcgagtccgaatagtgttaatggaacggatgatccggtgtttaaacgaaacggatccgggttggatttttttgggttgggatgtgataagggtttggttggggtacctgggaaagatgtgtttgtgaggcaagggttggcttatgcggcg

SEQ ID NO: 146521 - DNA, 1747 bp, Arabidopsis thaliana landsberg
cttggttgatcgaatcatcagtgttctatatgcatatcaaccagttgaaggttgcgggtaggtccgatattccggtgcctgaagggacacataaaaccttcgtggtatgtttccactttatggcctttgatatgtttttgtgagaaagatggatgctatgtaatgtgtttgagattcgatatatgttttctagatctttagtaagaataataattcacacaaatgtgtttagttccaatctgtgttataaatcaaatggtaagttatattgtgtctttttcacatgtcatacctattagattttttagcattgataacttgttgtcttttcttctctaaagggcgatacgaagcttcgaatagctaactttgcccatggaaaagatgggcttggcaaccaaaaaatccctccacctaaaggaaaaccaattgaaaagtctggacctgagtttttagttgaacaagcaaagctttaccctggtgaaatcacggttgttgctttgggaccactaacaaatctcgcgttggtaagactttctcatccgcaatttttatattccggttcttacttatctctgttcctatcatcttatcggagatttcattaccttgataatgcaggctgttcagcttgatccagagttttcgaaaaatgtcggacaaattgttcttcttggtggagcatttgcagtaaacggaaatgtaaatccagcttcggaagctaatgtaagttccttcacccgttaaagtaatgtgatattcatacacataacacatcactttctatcaaaatctcttcttttagttttcacatctgtttaaccaattttttggttagggtagatttttggcgatcccgaagctgcagatattgtgttcacatgtggggccgatataattgctgtgggaatcaatgtgacccatcaagttattatgacaggttatcttggataatcttttttccttatttgatgttttatattgaaaatatacaaatgctgtcaacagaaccgtgatgatcctgattgttgcctttatggctcgaggttttcattacttgttgcgaccaagaacataatttagttaaacagagctttctaatggctttttttcccggtgtttctgctggatttagctgatgacaaggacaaactagcatcatcgaaggggaaattagctcaatatctctgtaaaatccttgatgtgtactatgattatcatctcacggcttacgaaatcaaaggtacgataatgataatcatttgtatgtgtgtttatttcatttggtaataagttcagttgtacacaaattatataacaagaatttccacgactacgtatttttatcttaacctcttcttttttttgtgtgtgtggggcaggtgtgtaccttcatgatcctgcgacgatccttgcagctttccttccttctctattcacttatacagaaggagttgctagagtgcagacaagtggtatcactaggggactcactttactgtacaacaatcttaagaggtaagatttttcatacatacaatacaaacattcaaaatagacagttgtgttatatataatagaggatgtaaatgtcatgtgtggtgatggaaaaaaacttgttgttgtgatgtgaaccaggtttgaggaagcgaacgagtggtcagacaaaccaacggtaaaagtggcagtgacggttgatgctcctgcaaacgtgaagctcataatggataggcatatggagtcttaa

SEQ ID NO: 146522 - DNA, 5447 bp, Arabidopsis thaliana landsberg; identical to SEQ ID NO: 15318

SEQ ID NO: 146523 - DNA, 1007 bp, Arabidopsis thaliana landsberg
atggtttcgtctatgatttcgatcaaggcggcgctaatcactaccggaatcgtcgccgtgtctctgtttctgaagtcctctgttcctatcgcagtagacttctctgtctcacgattcccgatcttttggagctcctttctctcgtggctgaaaccgccgtatctcttcgtcgccatcaacgtcataatcaccattatcatagcttcttccaagttttatcagagcgttggagatcaagacggtgaagacgacgagattttactcggtggcgaatatacgattcccaatgtcatcacccaagctcctccgcgacggctggttgatctggacgcagattttgatttcgtggcgacggttccgccgcagatcctcgttgcggaggtggagatattggaggtcgtgtttgaagagaaggagatggcgatttcaggacagatcaacggtggagatgagtttgcggtgatgagatcagagttgaatcagccgataatggaggaatcagagaatctgtctccggctgcgaaaccactggtttcggttagttccggccaccggaaaccgatcaaatcgagttcaaaaggtaccggagaaagtaagagtatagtcgaaaacttttgaaaatattaatttaataattgaggaaaggatgacgtcattcaacgtaacggctagattttatttgaattttcacgctatatgacgacaatgaccgattataaccggtttaaatcgaaataaaccgtagaggggtaaataggtaatattcttatataggaaattcttattttgcaggcgttaatagaaaaaagaaggcgttgaaagtggtgaaacagaagcggcccgagacactggagaacacgtggaacatgataactgaggagggaaaatcaacgccgttgacttgtcattaccggaaaaccagtatgtctggaattaacgccggcggcgatgtaaaacctgtcttgaggaaagcggagacgttcagggacgtgactaattatcgacag

SEQ ID NO: 146524 - DNA, 1774 bp, Arabidopsis thaliana landsberg
cttaaacataaatttttgttagatgttgattcaccgtgctctggaccttctgaaaatggaaagggtgtgaaaagaccgtttatcccaaagagattggtgatcggcaatgaagagtacgtaattctcaatgcattttatctatttatatactccacattctggagcctcaattgaacatttgaatctatttttgcagatatgttcggttcgggaatggtaaccagcttgtcagagatccaaagaaacgaactcgtgtgttggcaaatgagaaagtcagatggagcctgcacaatgcccggttgcggttggctaaaaagaagaagtactgccagtttttcacaagatttgggaaatgcaacaaagatgacggaaaatgtccctatgttcatgatccctcgaaaattgctgtttgcaccaaatttttgaatggattgtgtgcaaatgcaaattgcaaattgactcacaaggttttcctactaagtcattgctgcataattgtacttacagaaatctctaactggataacttatttcttccacaggtcattccagaaaggatgcctgattgttcttattatctgcaaggtaagaatttccactgtactaagatcccattgcggctactcacaatactaatacctataatgcaggcctatgcaacaatgaggcatgtccatataggcatgtgcatgtcaatccgatcgcccctatatgtgatgggtttttaaagggatactgttccgaaggagacgaggtaaggattccacttaaaattggcatctaatacgtgttgacatgcatatccacctttcctttgcactgctagtgactctcttagtgcccttgatcctatctaattcttttgattacttcagtagcatattaagtatactaataccataaggagtataagggaaagagatccctctctggctttatgtcatacattttttttctccatctcaattcgcaaacacatgatgaagattgcggattgtctctacataatggtcacagtgtcggaagaagcattcctacaactgcccggttttcgaagccactggatcatgctctcaaggattgaaatgcaagctccaccaccccaagaaccaaagcaaaggaagaaagagaaaaagaacaaacgaaccatcacagaaaaatgcccgtaggcgttactttagttcacttcacaacatcctttccgagtctgagccaatggtattcaataggcgttctactgacagtgaagtttttggaatggaaagcctcgattttataacccttggcactgctgagtatgaagccggtgatgacaatgatccagccaccgtgcaatctatctccagtgacagtgaatcactaatctcaatatacaatctaatcacaccagtagctctgatgcagtaagaagcatcagtttgttttggtgagtacaaaggtaagctcaaggggattcagattcgtcacattcaaggatgagaaatccatgaaggatgtgatcgagggattggctggacaagagctcgatggtcgcagcatcactgtgataatggctcagttacgaggaagtggtagaggtagtgaggatacagcagcagtggtggcggttactcgggagaaggtggttgtggctatggagttggtggtggtactcaagaggaggtggtcgtggcggtagaggcgaaggaggatacagcggcagtgttggcggttaccaagaggtggtggcgtggcgcagagcgaaggaggatacacggcagtgttggcggtgagga

SEQ ID NO: 146525 - DNA, 907 bp, Arabidopsis thaliana landsberg
atgaagccttcactatatataaacagcatcgcgaggttagaagatcttacattatacattctaacattggtaagagatggcaaaccaaagaaaaccaatccttcctctattacttgaaaagaaaccagttgagcttgttaaaccctcaaaacacactcattgtgaaactctttccctctccactttagacaacgatcctttcaatgaagttatgtatgcaacgatttacgttttcaaagccaatggaaagaacctagatgatcctgtctctttgcttaggaaggctttgtcaagcttattttatactctctccgtatcaaattaatatcatataattaaagtaatgattcagctattaatatcatattaagtgatgatttagcttattagaagatcttgcaaatatttatttttgtaatatttaggttaatgatttttatttatttattatccaacaggtcacagagacaataaacattcgtgctggggatataaaaaggcttaaagactctatgatgaaagaatgtgagtaccttaaagagagtttcactacttatgaagtacttagttcatacatatggaaattaagatctcgagccctaaaactaaaccctgacgggatcactgtcctcggcgtggctgttggaatccgacatgttttggacccaccacttcctaaaggatactacggtaacgcttacatagacgtctacgtcgagctaactgtgagagaactcgaagaatcatcaatctctaacatcgcgaatcgtgtgaagaaagccaagaaaacagcctatgaaaagggtatatcgaggaagagctaaagaacacggagagattgatgagagatgattcaatgttcgaaggggtaagcgatggattattttcttgacggactggaggaata

SEQ ID NO: 146526 - DNA, 2786 bp, Arabidopsis thaliana landsberg
atggcgactgaattctcgtgggatgaaatcaagaaagaaaatgtggaccttgtaagatttttacagagtttaattcgttctcgagatcttgaactgttgaaaatctgtaataatttttgaatgatttatattataggagcggatccctgtggaagaagtgtttgagcagctgaaatgctcaaaagaaggtttgtccagcgatgaaggtgctaaaaggcttgaaatatttggggcaaacaagcttgaagagaaatcagagaacaaggttttgaagttcttagggtttatgtggaaccctctctcatgggtcatggagcacgctgctattatggctatcgccttggccaacggaggagtaaaggcgccggattggcaagattttatcggtattatggtgttgcttattatcaactccaccataagtttcatcgaggagaacaatgctggcaatgccgctgctgctctcatgtcatatcttgcaccaaagactaaggtatgcaaatttctcaatacatatatataggtatgtattttctaaaaaggagagttatataacctatgtgtgaatgtaggtgttgagagatggtaaatggggggagcaagaggcttcaatcttggttccgggtgatttgataagcatcaaattgggtgacattgttcctgctgatgctcgtctcctcgaaggagatcctttaaaaattgaccaatctgctcttactggtgaatcccttccaaccaccaaacacccaggagatgaagtattctctggctcaacctgcaagcaaggtgagattgaggctgttgtcattgccacgggtgtccacaccttttttggcaaggctgctcatcttgttgacagtaccaacaatgttggccatttccaaaaggtattatgactgacctctgaattatatttccttgcggtgcaagcaatcttatgatttaactctaaaatggttttgatgaatgttgcaggtcttaaccgccattggtaatttctgtatctgttcaaaaggaataggaatgttgattgagataattataatgtatccgatccaacatcgaaagtatagagatggaatcgacaatcttcttgtccttctcattggaggaattccaatcgctatgcccactgtgttgtccgtgacaatggctattggatcacataggttgtctcagcaaggtgccatcacaaaacgaatgaccgccatcgaagaaatggctggtatggatgttctctgcagcgataaaactggaactctaactctcaacaaacttacagttgacaagaacttgattgaggtttcaagacaaatctcttcatcatcatcatttgtttttaaattggttacgttagaagcttcatgtcttgtggatttctctgttctttaggtattccccaaagacgtagacaaggactatgtgatactactttcagctagggcttcaagagtagagaaccaagatgcgattgatacttccattgttaacatgttgggtgacccaaaagaggcaagagctggaataactgaagtgcatttcttgccattcaatccagtagaaaagcgaaccgcgatcacttacatcgataccaatggagagtggcatagatgcagcaaaggtgctcctgagcagataattgaactctgtgatctcaaaggagaaacaaagagaagagcacatgagatcattgacaagtttgctgagcgtggtctacgttcactcggggttgcacgtcagagagttcctgagaaggacaaagaaagcgccggaacaccgtgggagtttgttggtcttttgccactctttgaccctccaagacatgacagtgcagagaccattagaagagctcttgatcttggtgtgaatgttaaaatgatcactggagatcaattggctattggtaaagagacaggccgtaggcttggaatgggaacaaacatgtatccttcctcttctttacttgaaaacaaagatgacaccaccggaggagttccagtcgatgagctcattgagaaggccgatggattcgctggagtctttcctggtatagtaaccatcctctatttcacttttccttcctttttatctctctaacctaattctatgatcttgcgtagagcacaagtatgagattgtaaggaaactccaagaaaggaaacatattgttggtatgaccggagatggtgtcaacgatgccccagcgctgaaaaaggcagatattggtatagcagtcgatgatgcaactgatgcagcaagaagcgcctcagatatagtcttgacagagccaggtcttagtgtcattgtcagcgctgtgctcaccagtcgagctatctttcaaagaatgaagaactacacaatctatgcagtctccatcacaatccgtatagtcctcggcttcatgcttgtggctcttatttgggaatttgacttttctcccttcatggtcctcattattgcaatcctaaacgacggaaccatcatgaccatttccaaagatagagtcaagccttccccaattcctgattcatggaagcttaaagagatttttgctactggagttgttcttggaacctacatggctctagtcactgttgtcttcttctggctagcccatgacacaaccttcttctcggtaatctatacaatatatactagtatatataagtatttacttttattattatgatctatatatcatctttgtgttgtgttggtgtgtgtaggaaacaactcgtaactgggggatataacgggtatggatttggtttcagtacctcactcct

SEQ ID NO: 146527 - DNA, 1019 bp, Arabidopsis thaliana landsberg
  unsure (1)..(1019): unsure at all n locations
atggagtcggagaaagtggtggtggacgagctgccgctagctattgtgcgccgggtggtgaagaagaagctgtcggagtgttcgccggattatgacgtcagtattcacaaggaagctttgctcgcattctcagagagtgcgaggatcttcatccactacctctccgccacgtatgtacacttcacaaaccctaactttttttcgaatttctgcactatgatagtgaatgatttggaatgttccaagtttgggtttatgttaatgtgattcaattgatgaatgttagtgtttgtgaattgtgatcgatcgaattgatggatttagtttaatttgggggtgaatgatatagggcaaatgatttttgtaaagatgcaagaagacaaactatgaaggctgatgatgtgtttaaggcattagaagaaatggatttttcagaannnnnnnnnnnnnnnnnnnnnnnnnnnnnnnnnnagtgttttgttctgaatgaagatcctattgtcactatctgttgttactttcatggagtgttagtagaaatggcttaggttgtgatttgtcttgttatggacactggcctaggtgtgtgcactttgagcttatgatgtcaatcctagtgtaatccacatgactggttttcagattttaagaagaagaatgcggggaaaaaggcgggtgctgcagctgcttcgaatcctgctggtgtagctgctttgaaatcttcaagtggaactgcttcgaagcccaaagagacgaagaagaggaaacagaaagaaccatctacgcaaaagggtgcaaggaaaagcaaaatagatgaggaaactaagaggaatgacgaggagactgagaatgacaacacggaagaagagaatggaaacgatgaggaggatgagaatggaaacgatgaggaggatgagaatggaaacgatgaggaggatgagaatgacgatgaaaatacagagagaatgggaatgatgaggagaacgacgatgaaaatctgaagagaattggatgatgag

SEQ ID NO: 146528 - DNA, 1083 bp, Arabidopsis thaliana landsberg
agacgaagtgagaaaatgaagctagaactcttaagcaaagaagtaatcaaacccgcttcacctaatcatctacaaaccctttctctttctctcttcgaccagtttcttccttcaacttacgtttccgccattttcttttacgatgatcactcaaaccaagaagacatccagaggctcaaaagctcactctctcaaactctgtctcttttttatccactcgctggacaaatcaaagatggagttactgtccattgcaacgatgagggagctttgtttactgaggcacgggctgaaatatttcttttcgattttctgagaaacccatcagatgctgaattgattcaaaagttcattgtctctccggaccatgcagatccagaaacatggccgttgttgcacgtcaaggtcatcttctttaaagacaaaggatttgcggttgcagttagcgtgtcgcacaagatatgcgatgcggcctcgttgtcaacgtttgtttgcagctggacaaaggcttcaaaagggtatgcggacacagttgatcctgaatttgtgggggccgatttctaccctcctgctgatatttctatcgagtttcctccattactggtacacgaaacaaaatctaagacaaagaggtttgtctttggttctttgatgattgaaaagcttaaaaacagagcttcaagtggcaaacgtgtaccacaagctacccgtattgagtccatcacggcgctgctgttaagatgcatgacaaaagcagggcattcaaagtcgggtaaggtgaaagaatttgcaataacacagacaatggacttgcgacctagagtttcttcctctctcttgccgcacaaggcaattggaaacttcttctttttaccattacttaaggaaagctcagagagtaagatggaaatcgaagaaacggtgtctaagctgcagaaaactaaacaggagctgaatgagcttatcagaaacgattcggaagacgcatagagtagcgttgaagccaaagagagaatcgcaagcgcgatgctgagttcgttgtgtgagataagtcctgagatggagacatatgctgtgtctagc

SEQ ID NO: 146529 - DNA, 1628 bp, Arabidopsis thaliana landsberg
gggatgatggtgttaacattatcagtaactataccgggaattaagccaccagaatgttccacgaataatgtggaaaattgcgaaaaagcttcggttttacaattagcagttttctttggagcgttatacacattagcaatcggtacaggcggtacgaaaccgaacatatcaacaataggagctgatcaattcgatgtattcgacccaaaggagaagactcaaaaactatcattcttcaactggtggatgtttagtatcttctttggtactctcttcgccaacactgttcttgtctatgttcaagataatgttggctggaccttgggttatggacttccaacattaggtttggctatttccattaccattttcttgttgggcactccgttttaccgccataaacttcccactggaagcccattcaccaagatggctcgagtcatcgtggcttattttcgcaaagccaatgcaccaatgacgcatgacatcacgagcttccatgagctgccttctcttgaatatgagcggaaaggcgcctttccgatccaccatactccaagtttacggtaatgtgtatatttatttagtataatctcaatctaaattcatattatatcctaagtatatcagaaagtacctaacatgcaactatgatgcagattcttagacagagcttcactcaaaacaggaacaaatcataaatggaatctttgtactaccacagaagttgaagaaacaaaacaaatgctgagaatgttaccagtcttgttcataactttcgtcccaagtatgatgcttgcacaaatcaacacattgtttgtgaaacaaggaaccactctagaccgaaaggttaccggatctttcagcatcccaccagcgagtctctccggatttgtcacactctcaatgcttatttccatagtcttgtatgaccgagttttcgtcaagataacccgaaaattcactggtaatccaagaggcattactttgcttcaacgaatgggaattggtcttatctttcatatcctcatcatgatcgtcgcatctgtcactgaaaggtattatcttaacgaaaaagaaatatcaaataattttcttgtgttgcattagtttacttaaacttctttatttggtatttatgtaacaggtatagactcaaagtcgctgctgatcatggtctcatccaccaaaccggagtaaaactaccattaaccatctttgctttgcttccacaattcgtcctaatgggtatggctgattcgttcttagaagttgcaaagcttgagtttttctacgatcaagctcccgagagcatgaaaagcctcgggacatcatattcgacaacgagtttagcgattgggaatttcatgagcagtttcttgttatctacggtatctgagataacaaagaaacgaggaagaggatggattttgaacaaccttaatgagtctaggttggattactattacctgttctttgcggtacttaatctggttaacttcgttttgttcttggtcgtggttaagttttatgtttatagagctgaggttactgattcaagtgatgggaaagaggtggaaaagaaagagactgaatgacacataacgaataatatagaattctctata

SEQ ID NO: 146530 - DNA, 3957 bp, Arabidopsis thaliana landsberg
ttctccgtagtatcttctcccttataagctctgaagtgttggctcatctctttccagattccggtttcgaaatttggtaattgctccataatcttctgcaattcttttgtgaaatcgtattcggatttcactataattttcgattttttttttttgtgttaagcaatttttgaatactgtggttgttttagggagataagcgatggcaaacgccaatggaaaagctgcgactagtttactggagaaaatctcggctaaggcgaatccggaggccgatgatgctacggagatcgctgggaatatcgtctaccacgccaagtacagtccacatttctctccattgaagttcgggcctgagcaagctctctacgctaccgcagagagtcttcgcgatcgtctcattcaggtaaccaagtaatttctggactgtttcataagttccgtttgatgaagatatgctggtatagaaatttatggttttccgtggttatatccatctggatttgcagttgtaggagctaatctatatgtgtgtgtgaatgtgttctttgtgtttatgtgagagtgatataaaatttgggttgtgttgcagctgtggaatgagacttatgttcattttaacaaagttgatccaaaacaaacttactacttgtcaatggagtatctccaaggtcgtgctttgaccaatgccattgggaatttgaaccttcaaggtccatatgctgatgcactgcgtacgctgggttatgagcttgaggagatagctgagcaggtacattttaagttaccatttttctctttgaagacttgggacctaaataaattattttttgatctctccatgtttgcttgtaggagaaagatgcagctctaggaaatggtgggttagggagacttgcctcgtgtttcttggattcgatggccaccctaaatctgcctgcttggggttatggtttgaggtacagacatgggttgtttaagcaaataatcacaaagaaaggtcaagaagagattccagaggactggcttgaggtgatgattgtcagtgtggtgatttcaacttatggttttctgagaactgtaactcatcctctattaatgggaatttgcagaaattcagcccatgggaaattgtgaggcacgacgtggtattccctgtcagatttttcggcaaggtgcaagtaaatccggatggatcgtaagtattattgttggaacttacatgacttagcatacgtctgtacttgaaatttctgtgcatatatacactagtgagttttgctacgttgttctctgacttttcatcgaccttgctattaagcattgtagtggatcaattgactattttgcagaaggaaatgggtagatggtgatgttgtacaagctcttgcttatgacgtgccaatcccgggatatggcacaaagaacacaatcagtctccgtctctgggaagcaaaagctagagctgaggatcttgatctttttcagttcaacgaaggagaatatgaattggctgcacagcttcattctcgagctcaacaggttatgacaagtcatctttacctactgctccatcttcttttgctttgtggctttttgtttctctctaacaatgtagctatatatatgtgcagatttgcactgttttatatccaggagatgctaccgagaatgggaagttattacggttaaaacagcagttctttctctgcagtgcttcgcttcaggtttgtcaaattggttttaggttcctttcatgttcttcatttttcttaagccataatgtattgattaacttaggactctctgatggatgtcatggactgtaaatgttaaatagctggaaaataaaaataagaaaaaattcaaattggcatgttaattagaaagagaatccaaaaaaactactacaagtaaatttaccttcgattgagtcataattttttatatttcctcttcacaatatggaaatccattgcaggatattatatcaagatttcacgagaggagcaccactgaaggcagccggaaatggtcagagtttccaagtaaagttgctgttcaaatgaatgacacacacccaactcttgcaatacctgagctcatgcgattgctaatggatgacaatggacttggatgggatgaggcttgggatgtgacatcaaagtaaaatatttatgcatgaacctttcaatatttcccaacaaagttttcacacttttctgttgggacttatttatatggtttacaggaccgttgcttacaccaatcacactgtccttcctgaagcgttggagaaatggtcacaatctttgatgtggaagcttcttcctcgtcatatggaaataatagaagagattgacaagagggtattttgctgatcattctaaggatttgtttttatcatatggtgcaataataaaatatataccattctgcagtttgttcaaaccattcgcgatacaagagttgatctggaggataagatttcaagtttgagcatcttagataacaatccacaaaagcctgtggtgagaatggctaacttatgtgttgtatcctcgcatacggtaagtggtcccactgtcaaagttatgttatattgtttcttcccatgtagtcttggtttcaagtactcattatgagggcctttttgcaggtgaatggcgttgctcagttacacagtgatatcttgaaggctgagttattcgcagactatgtctctatatggccaaacaagtttcaaaacaagactaatggcatcacacctcgaaggtggttacgtttctgcagccctgagctcagtgatataatcacaaagtggttaaagactgacaaatggattaccgatcttgacctacttaccggtcttcgccaggtctgattttttatttatctgataaccagatctgcaatgggtttttatcttgttattctgatgttatcttttcttcttctagtttgcggacaatgaagaactccaatctgaatgggcttctgcaaagacagccaataagaaacgtttggctcaatatatagagcgtgtgactggtgtgagtatcgatccaacaagcttatttgacatacaagttaagcgtatccacgaatacaagaggcagctgatgaacattcttggagtagtatacagattcaagaaactaaaggtatacttggctaacccatccatgtggattcctagtagtttttctatgtttccccttgcgttaaatgttatggtagacctgtaaaaaagtttagatacttcagcgtattcctttcctccggctaaattttatcttgagtttttataccttaaccaaggaaaaggttcttaaaccaccacaattctaatattaggcggcaatgcatgtatttcttgtgtgacattctcttgtgcatctgaatgttacaggagatgaagcctgaggagaggaagaaaacagttcctcgtactgtcatgattgggggtaaagcatttgcaacctatacaaatgcaaaacggatagtgaagctggtgaatgatgttggtgatgttgttaacagcgatccagaggtcaacgaatacctaaaggtaacttagaggtggctaagcgtgatgcttgctcacctgagattgtttttgatcagaaactgtcaatattacacatgtatgcatctctcaagatgaactaggtttcttttcgtgaagtcttatgctactcaagcctcctttccgagagcgaagctttcttattgagccaagcctgatgcaaatgcaataaatcactgttctccttttattttccgaacatagcttgaagaagttttaactggttctaacgcatttgcttctccaggtggtatttgttccaaactacaatgtcactgtagcggagatgctaatacccggaagtgagctatctcaacacatcagcacagcaggcatggaggcaagtggtaccagcaatataaattgct

SEQ ID NO: 146531 - DNA, 2490 bp, Arabidopsis thaliana landsberg
  unsure (1)..(2490): unsure at all n locations
gaggatattgtcgagctcggtagctccttcgcctggtatgccattccgttttctctttcctctcgatttgtgactgtttgtttgaattgggttcattgttgtgcgaacattagtagctgtgttactttatttgaaagtagaatcagagtgcgcaagagttgattgaaactgtgctagaaaactgggattgtatctaaactgatgcgtcttctgatgatatttgatttatttgactgcacataatactttgtttggaaactttgtatcagttctaaggctatcaatcacttcgcaagctccgatcatcttaagaatatcaagcaatttctgtcgaaaaatggcccggcaatggattgcatagacgagttccgaatttcagaagctgatgtagctaaggtatgcactatttacttgaatattatgctcttctgtttttacagatctcaattgcaacctttgcggtttaagagtgtagccatgttattcgttgaaatctctaatgaaattctattcatgctggatgcagtgggagaaaaaatgtcagtcatttggaaatgaagatgcatcttttgaagggtcctgtggacagctgtctgggacatctaatgatatccacactaaacttgcgtttgaaactatggatagaattaaaaaagttcctgcacaccatataaattcatataaatcaaatgatgttatgcctttacagtataatacgaatgagtatcagatatcactttcagagattcctggagttatacataatggttcatatctgaacatggatgattcccaattccctctatgtgatgtatcaggtatttttggttgattccgacctccacaatttgtcagtttccaagtgttttacaagttgtgtataatagtctctaactctctataattatattttctagggaacgggtttggtgaacattccattccttatagaagcaaggactactcgggcaacggtaattattgcacccaagaggtgggtttcagtcatagtaacattgatattctgataatctggttatggtgcatctatatgacgcttcttgttagtttcatcatgaggattctttggctcagaattttgggtataggctagtttttctaaagtttatggtcataagtattccttggttcaggaatttcttatgtgttatatgcgtaatttgcacatcaaaaaatcttctatatatgagaggtattttaggaagaatgaattttattaaagtttggggtaagaagtacctttgtctgttgtttttatcatcaaagttccttcactgtttggctatctttttccatgtgttcaactacatcatacctccagagctatctcattggctaactccaaacttttatatgagcctgtgactgacattgtcttcatctagaattatcaggtgaaccaagataagaaacaaattgaggggcagtacaatcctccaggtaggcctctgctttcaaatttgatctgcgttgtgttaatttcatggttagggctttatcgtctaggtctatgaatttcattaccgtagccaatcttatatgcactagttttaatgcatgggttttattcttgtcaggtgtggtgggaatgactagcatttcgtcctcacattccactgatgctggcgggaacgttcactctggagctcctccaccttggcttgatgcaaatgatgggaatttttctagtgttcaactaaaccaatcagatgtggcccgctttcaagcaaaggtacctggaaagaatcgtaagctaaatcctaatagggttggcgctgcatgggctgacaggagaaagatagagatagaaatggagaagagtggacatgcaatgaagagtaacattgatgcagactggcttcccaactttggtcgggtttggcaatcaggcactagaaaagaatctaggaaagaatttgagaaggaaaaacggaagttagtaaaaattgaaagcatatctacagaatcataaccagtctaaatacaaccgtacattagcaaacggncggtaagtttttacctactactggtctcatgtcggttaatattttttctacttctcaaacgtatttgtttggattgatatttctgttagcgacatatcatgtggtttccttttatactcaacataaatggatacatattgctttgttgctactgttttaaatttagttcgagaaatactgttcagtggccttatgtatatacattaattgtgattgcagagaagagagagtggtgagtaatggcggtggctgacatccagaatggcaactagtaaggattatctcatgtaggaattttataatcctcgtttcctggagatcctactcaaatgtatcttgttttcatgttgagctatgatagaatttagaagtatgtgatcctgggactcctttcaagtagtgtaaaaaatggataaaattttgtttttggtacgagagattttaaagggttagagttttacgt

SEQ ID NO: 146532 - DNA, 2602 bp, Arabidopsis thaliana landsberg
atgtaccaaggtattggttacacggagcattttggctttaatttgttgattcgaaagcctgttaggttagctctcgtcaatggtgattgagtctgggactaggttaacttgagggtctctgttgcggtggcacttagatttggttaatgaactcgttgtctagggataatttattgagcatgtcaatcacctgtaaattgaggaatcgaaactactcaattacccaaacctcgggaattctttatctgattgaattctttgtttactctactgttgtttacttcagcttatcatctgttgtttaatttctgcaattctttcttgttactcgaccagtatactcgaccacacccagtgtctggcaacagactgtgcagtcgagtatatctgtttcatatcctgcctgttactcgatcacatcctaattcgggcatcagcctgttgtggtcgagtgattttagtaattatgttattgtttctgttttctgcatgttcacttaggactgttagaaaccccaatactgttattgcttggcttgacttagtgacttctgatcaaatctcatctgtttgcatcacacccatttgcattgacacctaaaatactacaacgacatgattggtgttttaggattaattgactaaaaacctattatcaataggcgaattggagggacatggaacaaaagaaaatgaggcaatagtggaggttgatgatactaagatcatgagattggatcacgtgaagatagggatgatgatgataggggtgatgaatacgttgagccaccgcctgttgttgaatctagttagtttaagaaagaatgggaagacggtatcggtttgactttgcgacaagaatttccaagcagggcagcattgcaagaagtggtggacaaaggtgcatttgctaacaattttggttatgttattaaaaagtctgataaggagcggtatgtcctaaagtgttcaaaagtaaattgtgactagtgtatacgggcttcatgtattcaagatacaagtatttactctattagaaggtacaacaagatgcatagttgtacccggattagtaagagtagtacaaggatgaggaagagtaaatgtacccctgaattagtagcagctcttcttcatgatacttttcgtggactgttggaaactccagctcctaaggttatcatggagcttgttcagacaaaattaggtgtgaagatatcatactccaccgcattgagagggaaaagacaagccgtttgtgatttaaaaggtagcgcggaagatagctacaaggatatcaattgctatttgtacatgttgaagaaggtaaatgatggtacagtaacatatatgaagttggatgagagcgggaaattccaatacctattcatagctttgggagctagcattgaaggctttcaagcgatgaggaaagtgataattgtggatgcaacacatttgaagaacggatatggtggtgttctagtctttgcctcagctcaagatccaaatcgtcatcattatatcatagcggttggcgtactcgacggtgagaatgatgctagttggggatggttctttgagaagctgctaagtgttgtacccgatactccagaattggtatttatgagtgacagaaattaaagcctcatcaagggcatacgtaatgtgtattctgcgactcaacacgggtattgtgtttggcatttatcccaaaatgtcaaaggtcttgccactaacatcaatagagacgtacttgcttggaaattcatggagttaagtcggattaataccatgtcagaatttgaaatggagtatagagtatttaaggtgagatatcctaccgcggcttattatttggaggatacaaccgtgaaagaaaaatgggctaggtgttgtttcccgggggaacgatacaatttggacactagcaactgtgtggaatcgttgaattctgtttttctcaatgcaaggaactattctttactacccatgctagatgcgatcatggccaaaatttctgtttggtttaatgaacatcgcaaagatgccgcttcaggatctaatgataataagtttgtgcctttagtggagaactacttgcatgatttatgggtttatgctgagaaactaaaagtgacagagctaaacacattccggctcgagtacaatgtccggggagtagaagggaacgaatattttggtcaacttgcacttgaaaacttgtagttgcaaggtgtttgatatccaaaagtatccatgtattcatgcgttagccgctttcattgcattcgaaagtgatacaacaaggactcgaggtatgaaattacatgaattggtttcaaagtattattgggcggaattgtgggcattgacgtattataggactatttatttagtcccggatagatcacagtgggatatcccggatgacatcaaagcgttgaaggtattacctctgtctcagaaaatgaagaagggtagaacaaaagtgcttaggtttccatccaccggagaaagacgtcccaaacgtcaaaggactgaaaacaaaaggaggttgaggcagccgctgcaatggttgttatttggcacccatagtatt

SEQ ID NO: 146533 - DNA, 1932 bp, Arabidopsis thaliana landsberg
  unsure (1)..(1932): unsure at all n locations
ggttgaataaaattggcttaggggtgttattaaaaacgctttgtatcctgttctgtttcttgcctatttgaagtatggagtcccggctttaggtagcggtttaccgagaggtgcatcgatcttggtgctgactattttgttgacgtatctgaactacaggggactaactatagttggttgggttgctgtgcttatgggggttttctcgatccttccatttactgtgatgggtttgatttcgattccgaagctaaagccttcgaggtggcttgtgatggacttagggaatgtgaactggaatttgtatcttaacacgcttttctggaatctaaactattgggactcgatcagtacactagctggtgaagttgaaaaccccaaccatacacttccaaaggctttgttttatggtgtgatcttagttgcttgttcttacatcttccctcttttggctggaatcggggcaatcccgctagagcgtgagaaatggacagatgggtatttttctgatgtggccaaagctcttggtggagcgtggttgagatggtgggttcaagcggctgcagctacatcaaacatgggaatgtttatagccgagatgagtagtgactcttttcagcttctcggaatggctgagcgcggtatgcttcccgaattctttgccaaaaggtcacgttacgggacacctttactagggattctgttttcagaatcaggtgttgttctcttgtcttggctaagctttcaagagattgtagctgcagagaatctgttatactgttttggaatggttttggaatttattacgtttgtgaggttaagnnnnnnnnnnnnnnnnnnntcaagaccgttcaagatacctgtaggggttttgggatcagtcctcatgtgcattcctccaacagtactgatcggtgtcatcatggcatttactaacctgaaagttgcgctggtgagccttgcagctatagtgattgggcttgtgttgcaaccttgtcttaagcaagtggagaaaaagggatggctcaagttctcaacaagttctcacctaccaaacctgatggagtaaagaccaccgaagatggtgatgcttttggttttacttttgatcttacaggtaatgatcattgcttctggattttggatcagaacttaaaagtttattctatgccttactagatgaagacttttcttttcaatggattttggatttctttgatttttcattatacagtaacttacaccgcatgggagacatttctgatcatagaaaaaggacaaaattacttgctatatttcgccatcttacacaatcctcttagagttttagtcgattcattgacaacaagggatagtctacgtacaagaaagaaaaggaaacaacaacaacaaaacaagaagaagaaacagtgaacacacaagcttatgttagtatgttacagatagtatatataatttttttcgtctatccaaaattctcctaattaataacactaatgtttatgacttatgagtctatcacttaacactaattacgtttttaaccctttgtaaccctaattggctcctgcttcatgttgtatataactgctctcagaaacctaagtcgtcactccctctcccttggttctttcttcctcttgaaagctagaaagaagaaaatggaagaagctcttagcgaagctcttagcgaagctcttagcagctttgacttcgatgaacttgtagcttcgcttgctgatgccatcgcagcaacatcgactcccaagcctttggtggaattttcactacatgctttgatggctgaattgtttaagagaactaaaaccttacccaaagctgaagtcaccaggacattcttcagagctgtttccattggcttgctgagaggtaacattaggaaagatcaactggagagcacctgtgatgctg

SEQ ID NO: 146534 - DNA, 4873 bp, Arabidopsis thaliana landsberg
ccacccattcttttctgtttcttactttcagcttttatacactctttctctatcttcgttcgttgactaggtaactggagactcggtgccaattacttctcatctgaatacatgctcaactatgttatggccacatatagcaaagctcaggtctcgctataatttcgttttgtttttgtaaaatcactcccgagtggataaactcatcaattcgtataggtttcaatcttgaatggtatcgtcatgggaggcggagctggtgtatccgtccatggtcgatttcgtattgcaactgagaacacggtaatctttccttaaacatgtccatggatgacaaataggtcgctccaaaatatgctcatatctttcgactttctccaaggtttttgccatgcctgagacagctctggggctctttccagatgtaggcgcctcctacttcttgtcaaggctccctggtttttttggtaacagaagctatatttcctttttttgcatcttcttaaagccaccaaagtttgaaaatgctttcttgtcttttttgttcaggggagtatgttggcctcacaggagctagattagatggtgctgaaatgcttgcttgtggccttgcaactcattttgtgccttcaacggtatgaacttcctttgcgtgcgtctatttcgtaagacattctgaattgactttacacatcagatattgtatagctactagtgtcaagcactatctgcttcaccaaggattgctacttagttaggtttactcctttccacagaggttgactgcattagaagcagatctttcagaattaattcaaatgatccaacttttgcctcaacaattctcgatgcatacacccagcatccgcgcctgaaacagcagagtgcttaccgcaggcaagtctatatgatttttatctcttttactctttctactagtatggttttacctgattacattttctcggttattgaccatgattataacacattttttctataatttcaatttcgtattgctgtcaggttttcaatcgctctttacagaactcatttctcatctgatctttaattgaaaatttataaaagtgcagaggacagttatttcttatctccccgtttgttgcgcaggttagatgttattgataggtgtttctcaaggagaacagtcgaagaaattatatctgcacttgtaagcttttcatttatatatagagatgttgacttgcgatcctgagttgactgatttacctttgacaacgcactctaccatcatatgtgttgcttaggagagagaggccactcaagaagcagatggttggatctcagctaccattcaagcatcgaagaaggttcaccagcaagccttaaaatctctcttagatcggttagttcccagaatgtgcatcacaggcaatgttgacaaagagctgactgtgaatatatatttcagataagggaagggcgattgcagggggtggggcagtgtcttatccgcgagtatagaatggtgtgtcatgtgatgaagggagaaatcagcaaagattttgtggaggttttgcaagctttttccatctgaaaccgtctttgttgtagaccgtagttacaacagcgtgtctttacttatgcaggggtgcagagccatattggtagacaaagataagaacccaaaggtttaacaagtctctccatttgttatttgtggttggtaatatgtgacattgttgataacaatatctgaaattatagtgggagccaaggcgactggaggacatgaaggatagcatggtggagcagtacttcgagagagtggaacgggaggatgatctaaagcttccgccaaggaataacttgcctgctttagggatcgcaaagctgtgaagtggagaaggtgatggagcactattgtttacgtctgtgggaaagaaaaaagaaaataaatgtaacaacacttgtgttgaataggacttgcatacattacataaatcattattgtatttgagaattgacaccaaagcagcagagcagaattgtgttaagatttgttaatggtgttggaggcacaaccatggcaaacggacgtggaagcacgtctatagtcattgttcattgatccgaatctccctcctctccgagcgcagtttaccgaagccgatcgtatcgacgcttcggacaatgaaggctccaaggagaacattagatgggctgaagaatacgccagagagcaggaaataagcgccatcaaattatccctagccaaggcagaaaacgagatgaagctcgtaagatcccaaatgcatagcgcaatctcctcagcaccgaacatcgaccgcattctggaagaatcccacaacacgccgttcacacacaaaatctccaatgcgataatctcggatccaggaaaactaagaatcgagtatttcaacgggtcttccgatccaaaagggcatttaaagtcgtttatcatctccgtggcccgagccaaattcagaccagaagaaagagacgctggtctctatcacctgttcgtcgagcacttgaaagggccagccctggactggttctcgagactcgaagggaattctgtggatagctttcaagagctatcaacacttttcctaaagcaatattcggtgctaatcgatcccggtacatcagacgccgatcaatggtcactatctcagcagcctaatgagccacttcgagatttcctcgcaaaattccgatccaccctagccaaaatagaaggaatcaacgacgtggcggctctctcggctctgaagaaagcactgtggtacaaatccgaatttcgaaaggaactaaacttgtccaaaccactgacaatccgagacgccctgcaccgagcctcggattacgtatcccatgaagaagagatggaactactagctagaagacacgaaccaaccaagcaaacgcctcgcatcgataaacctcaaaccggcgctccgaaccacaagaaaggcgtccaaggcggtacgtttgttcaccatgaaggacgaaatttctccggagcccataattaccaggccgatacaccccgaggcgaagccacccgaggccgagggcgaggccgcggacgaggacgcggtcgagaatcctacacatggacgaaggatcaaccctcagggaacgagcaagaatattgcgaattacacaagagttacggccatcacacgtccagatgtcgtagcctcagagcgagattggcagcaaaattcctggccggagaaattggtggaggcttaaccatcaaggatttagaggcagaaaaaggtaaaaccgagcaggtcaacgctgtggccaatcccgagcagaccgcccccgcggcgaaccccgaaggacctaaaagaagccggggtaatcgcgaaacagacgacgatgaaacagaagctgctcggggaaggatcttcacaattttaggggattcggctttctgtcaagacacggtagcatcaatcaaggcataccaaaggaaagccgacgcaaatcgcaattggacgcggccatttaatggatcaaatgacgaagtaacctttcacgaaagcgataccaacggtttagaccgtccacacaacgatcccttagtcattacactgaccatcggtgatttcaacgtcgaacgagtcctaatcgacacgggaagcacactggacatcattttccttacaactctgcgagaaatgaagatcgacatgacgcaaatcgtgccaactccacgacctgtgctcgggttctcaggggaaaccagtatgactctcagaaccatcaaactgccagtccgagccaaaggaataacaaaaatcgtcgatttctctgttaccgactagccgaccgtgtacaacgcgattatcggcaccccatggctaaatcagttctgagctgtcgcctcgacgtatcatctatgcctaaaatttcccacaagcgacggcgtgaaaacaatctggggaaaccagaaaaatgctcgcatctgcttcatggcatcacacaagctcaggaaccccgtcactgagtcgacggccgacgcgaatcataagaaggccaagcttggccgagctgaagaaaggtcaatctccgagcagttatagcagctaaagatcgaagaagctcgggaatctacgacaccaactcccgatccggtcatctcaatttgccttgacgacgcaaagcctgagcgatgcgtagaaatcggcggagatctgggagaagaactaacagctgaactcactaccttcctcaaagaaaacgtcaatactttcgcctggtcccctgaagatttgcccggagtaagtgttaacgtcgtatcacacgagctcaacatcgatccaactttcaaacccatcaagcaaaagaggagaaaattgggtcgggagcgagctgaagccgtaaaagccgaggtagaaaaattattgagaattggttccatcactgaggcgaaatatcccaattggatcgcaaacccagtcgtagtaaaaaagaaaaacggcaaatggagagtctgcgtagatttcacagaccttaacaaagcttgcctaaaagacagcttcccattaccacacatcgatcgcctcagaacaagcgagaagtgcagcgcctaaccggaagagttgcggcccttaaccgtttcatctctcgatcaacatacaaatgcttagccttttacgatgtgcttcggggaaacaaaaagttcaaatggacgacccgatgcgaagaagcttttcaggaactcaggaagtacctagcaactccacccatccttgccaaacccgtaatcggagaactactatatttgtatgttgccgtattagacactgcggtcagcggagtattagtcagagaagacagaggcgagtag

SEQ ID NO: 146535 - DNA, 1123 bp, Arabidopsis thaliana landsberg
aatctctcaaaatggccgtaagttttgtttcaacatctcctgaggaagaagacaaaccgaagctaggccttggaaatattcaaactccgttaatcttcaacccttcaatgcttaaccttcaagccaatatcccaaaccaattcatctggcctgacgacgaaaaaccttccatcaacgttctcgagcttgatgttcctctcatcgaccttcaaaaccttctctctgatccatcctccactttagatgcttcgagactgatctctgaggcctgtaagaagcacggtttcttcctcgtggtcaatcacggcatcagcgaggagcttatatcagacgctcatgaatacacgagccgcttctttgatatgcctctctccgaaaaacagagggttcttagaaaatccggtgagagtgttggctacgcaagcagtttcaccggacgcttctccaccaagcttccatggaaggagaccctttctttccggttttgcgacgacatgagccgctcaaaatccgttcaagattacttctgcgatgcgttgggacatgggtttcagccatttgggtaaaagttaaaacagagctaataatctaaaaaagaaagagatagagaaatcaaacatttaacatgtcttttgtcttttcctctgttttttttttatatagaaaacgtcttaaaccaataaccggtttcttctataccgaccactgtaccgtaactgtagaagacttatgttaatgttggtttgtggttgcaggaaggtgtatcaagagtattgtgaagcaatgagttctctatcattgaagatcatggagcttctcgggctaagtttaggcgtaaaacgggactactttagagagtttttcgaagaaaacgattcaataatgagactgaattactaccctccatgtataaaaccagatctcacactaggaacaggacctcattgtgatccaacatctcttaccatccttcaccaagaccatgttaatggccttcaagtctttgtggaaaatgaatggcgctccattcgtcccaaccccaagagcttttgtggtcaatatcggcgatactgtcatgggtaccctatttagatttataaaaactcacgatcttgggttagat

SEQ ID NO: 146536 - DNA, 2672 bp, Arabidopsis thaliana landsberg
atgctcagtgcacaccagataggctcggcagattatgactacgacagcgcgctaccgatgatgacaccggtatagacgaaactgcggccgagcacggtgagtggacgacggacgatgccgcgatcagcacctctcattagtgtctagagaatatctcatcggcagagatctgttcatctactgtggccacggtgcactggattctaaagccttacctcagatttctcgaatttcagaagtccgagcaagtaaaagcccacatctacaaaactagtttgagctggttggtgtaacggacgagattcccaatctcatcatcatcatctctatcgctacccaaaacctgttacttcttcgtaacggctctaagtctcttctctcgttctctccacacacagaaatatctcgatctaggtttctaaaattggattctctatctcaaacgctaatcgaagagttttctctgaatcgttttcttaaatctaatctcgcgaagtttcagtgacagattcaatcaaacttcaaaatcatcatcagttctggaaaatttacgagaaatctcccgtttcaggcaagttttctctcaatttgttgcttcgcaatgtcaaaatcaatcatataggctttcaatcaattgcttcgaatttagcttctaattttgagaatgacatagttagggtttcgttttccctgttacaggcttaagcatttcgaaatggcaagtgttcaaaaagatccgattcttcaagtagagacaacttgtggatctcttttattcgaactccaggttattggcagattaagagtctttctatatatgatactgtttctatttttgtgtgtgaagtgtttagagatcttgtttggtttgttttgtgcaaaattagattatttgggatgaagttggagaaacagaaactgatagagatcaaatgttgcttgagcttgaacgtgaatgtttggaagtttatagaagaaaagttgatcaagctaatcgatgtagagctcatcttatacaagcaatagctgatgctgaagcacaattagctgcaatttgttctgctatgggagagcgtcctgtgcatattagacaggtaattcttcattatgagtaatttgatatggacttatggttatgcaattttcgagcttaagatatttatttgtatgtgttagtctgatcaaagcgttgggagcttgaagcaagagcttgggaggattcttcctgaactggaagagatgcaaaagaggaaagttgaaagaagaaaccagttcattgttgtcatggagcaaatagatagtattactaatgatattaaaggtcaaggagaacttgttcattccgaacctcttatcgatgagactaacttgtctatgagaaagcttgaagagttacactgccagctgcaagtacttcagaaggagaaggtgaaatttgatttgtacttgaatattttgcttctttgtttttgtttggttattccgaccattatattgtatttactccttttgtggtgttgtttctctcagattgatcgtgtggagacgattcggaagcacctgtgtactctgtattcccattgttcagtacttggaatggattttaatgaggtcgttggccaagtgaatcccacattgagtgatccagaaggaccaagaagtttaagtgatcatacaattgagaaattgggggctgcagttcagaagctgatggaggtcaagatacagagaatgcagagggtaagtgatatattactctgacgagttatgtagaattttctttgctgttgttactcattgttgcttattgaatttgatgcagcttcaagatctagcaacaaccatgttggagctctggaatttgatggatacacccatagaagagcagcaagagtatcagcatattacctgcaatatagctgcatcagaacatgaaataactgaagccaatagtctctctgaagacttcattaaatacgtaagctgtggcgatttttcatgtttacactgttctatacatgaccatgcttataacttatggttcataacatgacaggttgaggcagaagttgtccgattggacgaggtaaaagcaagcaaaatgaaagaacttgtgttgaagaaaggtcagaactagaggagatatgtaggaaaacccacttgttgccagtgtcagacagtgctatagatcagactatcgtggcgatagaatctggtattgtggatgctacaatggtcctggagcatcttgagcaacatatatctaagatcaaagaggaagcactaagccgaaaagagatacttgaaagggttgagaaatggttatctgcctgcgatgaataaagttggcttgaagaatacaacagggttagagtcagaatcacaaaatctttttaaatttaaataagcttgttacatattctgagatttttcactcttcaggatgataaccgatacaatgctgggcgtggatctcattttactctcaagcgcgctgaaaaagctcgttatcttgttaccaagcttccaggtaagttgctctttgtatcaataaattatgtgtttatgatgctctgaatagagaattataaaggtagtattcttttcatgtttattcatgcaaggatggttgaagcattggcctttaaaacaatagtttgggaacaaaaaac

SEQ ID NO: 146537 - DNA, 2602 bp, Arabidopsis thaliana landsberg
atgggtattgctgctgttgtccatctctatgtgtttccagcagcgccttacaagcgtggagaaagatgtgttcgtaatgtagcagtcatgtcagattatgcctctatagatgtaccacctgatccagaagaggttaaagatagtgaacgaacaactagaacgcggtatggtagacatgacgatagagagaaacgcttgaatttcccacaaagtgtccgtgatgttgtgcttgggagtggtgaaatcgtaagctggtttcttctataacgaatttatttattttcttaactgttttctcatgcataaccaaaagtttaattttatgttgctagattgtggatgacatgagattcacagtttcacatgtggtggaaccggttgaaagaggaatagcgaaaataaacagaacattccatcagatatctgaaaatgtgaaaagatttgagcagcagaagaaaacaacaaaggatgattcatatgtgataccactgaatcaatgggcgaaagaattctcagatgttcatgaaaacctctatgatggagggagtgtgagcgacagcggtttgggaagcacaaatcggcatcaccagtctagagtctcgggattgtggactagaatgcgaaggtaagaaaaacaaaaggtggtgcaagtgcaaacgaagctgaaacaattctgaagatgccttttttgtggaagtctcatcttcgtcacatctaacaaagaagttgtagatttatgggatgatgcttactctgctggatttaaacacaggtaacaacagatgatgctactaactagttttcctctacctttacacaaactttattgagaagttagatttgtatctcgtaatgacagtttcttacacaaaaataaaataaaatacaaatttgtcatgactaatatcttatgaaacatcttctcatatattgtgtttgttctcaattctgaaccctgcccacaacaaagagttaagtttttttttatttaccttactgtgtcctaaagctcatctacccgaagaaactgtacccgatccaacttaacacaagatggtaagagtttcttatcggacccaagttcgatttataatgggctaaattatattcgagcccaaatcgtgacagggccgactctttttttttttttttttggggagagattagccctaattgagagagccgctttaaatagttgttcatggagcgaagaacagagtagagaagatgaagctaacgtggaacaagaaccctaagaaacgatctcgtttggttttatcgaatttcccggatcttcctttcgagaaggatgattctctagagtctcaatctcatcttcattttcgtgaagatgatattgatcgtagacaaactaccgatcaattggactcgtcggaggttggagggaatcatcctcgtgagaatttcgatgtcgaagctaagaaactcgcagagtccattagagcccaaggagacaagttcgctgaggtaaaccagctgtagctaaataaaccctaaaatctataaaatttaggtatttaaatttcagcaatttgtgtactttggttcatcggaaggagttagcatcacgttgttgtgatcacattggtgatgtgatcgtggtagataagtttgagttgcatagtggcagtcttcctttgtttgttaacccatattttcatgattcgaggcctattaaacctctgttatatctgctttttgaaaagttgtcatttttctgaaatcttcttgcctcaatttccaacagcagattcatctttcattggatgatccgttagtttttgatagaaaaaatgaggcgggaagaaattaagactgacttagaaatagcctttaaaataggggtttatagacctcgaatgatattctgctactatgctactgcaaactttatcaaagaaaagtaagacgcccctaaagtaaaggggaagctttagtgaatgtggaatggaaagaatacacatgaaaagagtcagatttagtaacgaacttggcgttacgatcatgaaacaattatatcagacttagggttagtaagtttgtatcttccagaaaagttgagacatttttctatgcaacatgttagcatatgaaaggcctcaggttcatcattcatgccatttcttgtaatggtataactttgtttatggaactactaaagtgaattctcttctagttttatcttgtttactcatcgtgatattgctcttgaaggaaggaaaataccagaaggctctagggaaatgggaagctgctcttaatcttgttcccaaagatgcaatcctgcatgaacagaaagcacaagtgttacttgagcttggtgatgcatggaaagcactcaaagctgcaacacgtaatgcgtgaagcttttctgtattgttacttttatttatgtacaatttagggtacgatgaatattcttcaaaaaccctcttaacagttcctatggttttcgtcacaggagctactgagatagatccatcgtggggggaggtgcttatacgatgtttccctttccctattgattctgcatggaaatataaatgtagaagctttctacaggaatgggttccttatttgt

SEQ ID NO: 146538 - DNA, 408 bp, Arabidopsis thaliana landsberg
tagagaaaaggattcatcgggcttctaggtcaactaaccgtcaccggatcagtaacagacgaagaattcgatcggcgattcgaagaaatcagatcgtatggtgacgaccacgtgatctgcgtgatcgaagaagaaacttcggggaaaatcgctgctacgggtagtgtgatgatagagaagaagtttctgaggaattgcggtaaagctgggcacattgaagacgttgttgtggattcaaggtttcgcgggaaacagctggggaagaaagttgttgagtttcttatggatcattgcaaatcaatgggttgctataaggtgattctagattgtagtgtggagaacaaagtgttctatgagaaatgtgggatgagtaataaatcgattcaaatgtctaagtacttcgattaa

SEQ ID NO: 146539 - DNA, 1189 bp, Arabidopsis thaliana landsberg
acaaaacaacgattcttttaaaataagaacctctctgtttctctctctctctatatatatctccctccccgctgatcgatggcggcttctgttgatcctttggtggtcggaagagtgatcggagatgtgttggacatgttcatcccaaccgccaatatgtctgtctactttggccccaaacacatcactaacggctgcgagatcaaaccctccaccgcagtcaatcctccaaaagtcaacatctcgggccattccgatgagctttacactctcgtatattcatcttctcacatctatatccatttatgcatttataaacatatatgtgtatatatgcacataccttacatgcttcctcgtcatcatgatttaccgtcatcattatagtagaaacatgcatgcatacattacttcaaagccatttctaagaggttcaatgcagtcgaacacaatctctattcaagaaatgtttaaatttaaacatgtatatatattattacattgaagcatctattaatttaacatctattttcttaatccatttagatatactaaaaaccaaactttgcagagactcccatgaattttgagacgtgctgcactatttacacatatttactggtacactcacatagatgttgacgtaatttttatattaaaatagatagataaatatcaatgagtttctaacacataattaaatgtgttagtcacggtttagctgaaattttgattacaaaaataacgtttaattagttatctgagctaaccgacgtgttgcatgtgttgcaatttcattggccgtatgtgaatgcaaatatttcgatgcatgcaggtgatgactgacccggacgcacctagcccaagcgagccgaacatgagagaatgggtccactggtgcgtaccaagttacgcactctttttttttttttttttagtgaagcaattgtacaccaacgtaaacaatttaacgtataaataaaggtgcaataaaacactattaattatatttcttattttcaggattgtcgtggatattcccggaggcacaaatccctcaagaggtatgaattgaatactaaagattaaagctaagttttcgattttgaatacaattacttgactttactttaggattgtctttggctctttactatattttttgacgacggtaaacagattaattgct

SEQ ID NO: 146540 - DNA, 1008 bp, Arabidopsis thaliana landsberg
caacaaccattaaaaccaaagatcaatctcttcttaatagtcaatcatatatcaaaaaatttaaactcttcttgatcaatggcttcttcttctgctgctatgtctcttgaatccatctctatgacaactctcaacaatctctctcgtaatcatcaatctcaccgcagttctcttcttggtttctcaagatctttccaaaaccttggaatctcatctaacggtccagatttctcctcccgatcaagatctactacttccaagaacctcaacgttactcgagctttcttctggaattggggcaagaagaccgaaaactccagaccaagtaagtttaatagtttatagatccttttgtcttttagtacactgcgactaagtcaacgcctgttaatccgatatttttcctagatttgagacaaatcaagatttaaagactaataatcctttttgttagctcagaaatcaaaatgctttatttcataagcaaaatcgattagatctttaaatgccctgctcaaaattgattggtctaaaaaataatcagatcttaaaaaaacaaagtaccgaattcataaattcgagttttaattattcaggtaagatccaagaactaaacgtgtatgagctcaacgaaggagatagaaacagtccagcagttcttaaactcggcaagaaaccaacagagctttgtctcggagatcttgttccatttaccaacaaactctacaccggcgatctcaagaaacgcgtgggaatcacggcaggtctctgcgttttgatccaacacgttcctgaaaagagcggtgacagattcgaagctagttacagcttctactttggtgactatggtcacttgtctgtacaaggacaatacttgacttatgaagacacgttcctcgctgtcactggtggctctggaatctttgaaggtaacgtacgaaacaggtataagctatcgtcagacttgtgtatccgacaaaactgttctacacttttaaccttaaagcg

SEQ ID NO: 146541 - DNA, 1422 bp, Arabidopsis thaliana landsberg
attttaacggtggaattggggagtcttgaagcttatttttcctcctggtctcttttttcttatgtggtggtgcttgagagggtttttgtatgatataaatgctctagatcagagaaaaggtctaacatgaagttatcaaatattccgcaacgctatgtgatagtcttcttaactttcctcagcacatgtgtgtgttacatagagcgtgttggcttctctattgcatataccgttgctgctgatgctgctgggatcaatcaatcgagtaaaggaaccatactttctacattctttgttggctatgcatgttctcaagtccctggaggttgggcagctcagaaaattgggggaaggaaagttcttcttctgtcgtttgttttatggtcatcgacgtgtttcttggttccacttgatccaaacagagtcgggcttttggttgttgcccgtttacttgttggtgttgctcaaggtttcatctttccctctatccacacagttttggctcagtgggttcctcctcatgaaaggtctagattggtttcgataacgacatcaggaatgtatttaggtgcagctttaggaatgtggcttctccctgctttagttgagcttagaggtccggaatcagttttcttagcagaggcattagcaggtgttatatggtcattgctttggattaggtacgctactgacccacctcgatctgagcatccaaaagctgctgctgctggattcggaggtgctctgttaccgactaatgtaaaccaccataaagttactcatatcccgtggaagaaaatcatgctcagtttacccgtttgggcgattgtggttaacaatttcacattccattacgctttatatgtgttgatgaactggcttccaacgtatttcgagcttggactccagatcagtcttcaggggatggattcatcaaagatggtgccatacctcaacatgtttgtattctccattgttggtgggttcatcgcagactatttgatcaccaagagaatactctcggtaaccagaacccgcaagttcttgaacacagttgggttcctaattgcttcagcggcattgatggtcttacccatgtttagaacagaaaatggtgtgatcttatgttcctcagtggctcttgggtttttggcattaggaagagccggttttgcggtgaaccatatggatattgctccaagatatgcaggaatagtgatgggagtttcaaatactgctgggacattagctggaatcattggtgttgatttgactggaaagcttcttgaagcttctaaattggtttactcagatttgtcacatccagagagctggagagttgtgttcttcatcccgggtttgctctgtatctttagctctgttgtgtttctgctgttttctactggagaaaggatctttgat

SEQ ID NO: 146542 - DNA, 2215 bp, Arabidopsis thaliana landsberg
agctcccttttgtttggatctcctctatatgttccatccttttatcaatcaaggtttccaatggtcttatttcttcatatgtggtaacagatcgatgaaatcatagccaggtcgatggaacaagaagagaattctctccgggcttcttctagtcgtgcttctactcgtattacccgaagctctaataccgtaagtcatggataagaaaatttcctgtgtttgcgtcttttttacctggttctttcgattttctgtgttcagatgcgagactaatctttatcaaacatgaaagagttctttcgtaaacttgcacttaaaaagaatctggctttagggatcatgttagtctcatccgttgttttaatgccaatgtatattaattacagatcgcagcaaatccacgtgggagaagtcgcctggaagcacgactgcaacaacattcttcaaggaggcgattcaatcctccacaggctcgtgctcctgttagagcaccagcacggggtcgaggttatcgtttaggcggtgcatctgcttcactacgtacagctctgaatttcagttttccaattgatatgggcttagactcggtactctttttaactccgtttatatcctgaatgttgcctaatgttgttaagtaccgtagaatcatccttaccctttttaatgtaacagagaatggatattctggaggaattagagaatgctattggacactccattaccagtagtaatcttcttcatatggatcgtgactttactgagtatggtatcttattgatagaatttcgtcattatcttactatgattcttcaatatatgaagcttgatagttcaaccatttccggtgcagagatgattacgaattgctgctagctcttgatgaaaacaaccatcgacatggcggtgcttctgctaatcgcattaacaacttgccagagtctacagttcaagtaagctaaaggttcacttgtaaaattcagctttttcatatcgaaattttgttactaaaagcttctatttgattgcttatgtgttaatttgcagactgataattttcaagaaacttgtgttatctgtctggaaactccgaagattggagacaccatacgtcatcttccttgtttgcacaaattccacaaggatgtaaggatctttactgattcaaatgaaaaccccttattaagaacagagattcgaaaagtaaccattgtttatttattgtgcagtgcattgatccatggctaggacggagtaaatcatgtccggtttgcaaatcctcagttacttgacaaggctttcaaattcatcggagaatttgaaaactaccattttacccttccaaaccggtcgatctctggaatcattttgcgggtaagtcaaacattcttggccatcaaatttgaactcattaaacggggttttactaccgtttacgcgcgagggatgattatctgtgtatctctgtgattattttctcgggtttaaatatatctagctaagaactttttgtagattaagaaagttgatactaccacttattcactttagtttaaacatataccttttaaaatcaatttaaatgcacaaggctttgtttaatcgttttattcactttacttgcacgaagaagcaagatacaatcatattcaaagagtaaaacaaactaaagagaaacgacatacatttcagttattgttacatatataacgaattagttttcttaaatgacatgcattggattttagctcctcatcaatgcacattacggttaaacaaattctcagtgacctccgccgccaattcctccaccaatttctttaccggctcctccgccgattcctccaatggctccaccgtcaactcctttacctgctccaccgtcaaatccttttccgactcctccctcaattccttttccgattcctccctcaaatcctttgccgactcctccatcaaatccttttccggctccaccgtcaactcctttgccaactcctccatcaaatcctttcccggctccaccgtcaactcctttaccggctccaccgtcaactccttttccgaagccaccgtcaactcctttaccggctccaccttcgaatcctcctacaccaaatccaccggctattcctccaccaaagcctccaacactgcctccaatccaaccgccacctgctccaaagccgcctccaccgctgataccaccaccgcc

SEQ ID NO: 146543 - DNA, 3205 bp, Arabidopsis thaliana landsberg
  unsure (1)..(3205): unsure at all n locations
tcaagttcaacaaggaaaaggaaatcaaattggaaaaggaaaacttaaacaagaaacaaaagaagaaataaagcttatgtcttgcataagaagcaataaggatgatgctacatcaataaatctttcaaaaactaagagaattcttccgttgcatcgagtattttcgtcaaggtaagtattgtttaaatgcatgtttttttttgtctaagttttatatgcatgtttataacgcaaactacattattgaagaacaaacatattgatttatcccgtgatcagtgacatataaaaaggctgctaaatccatagaaaagttgttttagagagagggatacgtcatacgtggatgattgggtaattcaagtaaactgagtcactcttacaaaagtaagaatcagattggagaaaggtgggagaaatagttttgattaagcactttaaggattctctgacccctttcacacactctctctttctctctaattttcttttcttccacttgaaacaaactagagagattagagagagatactatataggaaggcaaacacacaaataaaattattttgattatataacccaatttgcacaattccccataaacccatatttaaggaacttgagtttctaattctgctggtcttttcataagatataataggagatataatggtggctcatgagaggatccataatcttcaaaaaccaacgtgcatttgcattatctggttttgcctcttggcttctctctctcaccatggaagagcatcatcaacctcatcatctatcttcaatctttctctcccacaccaacacccattccctgaacatgttgttcttaatgttcaaaggtataacttttctcttacatttcatttgatttcatttaagggtttgattcattttcatgctttatcttgtgggtctttctcattctcaagtaatctttgaaacctctgtttttcttttcttataatgacaatatcagaaacagagcaatcttctctgtttctttcccaactaacattttaacatgctctgtttcttaatgcagaaaacttaacgattctctctcaagaagacaacttctcacttatcaacaagacgacggcaccacggcggcgtcaccaataccttcttgcatcaccggaaacccaatcgacgattgttggcgctgcgacccaaactggtcggcaaaccgccaaagactcgccgattgctcaattggtttcggacaaggaacactcggaggaaaaggcggtcagttttacctcgtcaccgattcctccgacaacgacgcagcgaatccaattcccggaactcttcgacacgccgtgattcagccagaaccactatggatcatcttctccagcgacatgggaatcaaactcaaacacgagctcatcatcggaagctacaagacaatcgatggaagaggcacgaatatccaaatcaccggccatggttgcctcacgattcagcagnnnnnnnnnnnnnnnnnccacaacgttcacattcaccactgtaaaccctccggcaacactttggtcgcttcgtcgcctacacatgttggatttcgaggagtctccgacggagacggaatctcagtatcagcttctcatcacatttgggtcgatcactgttctctcggttactgtgcggacggactcatcgacgtcatcctcgcttccaccgccgtcacaatttccaacaactatttctctcatcacgacgaggttatgctcctaggtcacgacgaccggtaattatgtccacttatttcccaaaaagccccttatttactaatcttccaattaaagagttaaactttaggatttatcaatttaacccaaatttaatggcttatggtcatggtattgtattaaaaaggtacacggctgacaaggggatgcaagtaacaattgcattcaaccatttcggagaagggcttgtccagaggatgcctcggtgtaggcacggttatatccacgtggtgaacaacgacttcacggcatgggaaatgtatgcaatcggcggaagtgctagccctacaattaatagtcagggtaaccgttacaccgcacctattgatcccaatgccaaagaggtataaattctacttacccgtctattatgtatcaaatcgatttcacaaaaaacgtacataaccaagcattttacacataatgtttttgaatgtttactacttcaaagaaaacaagttcttgaattcaaatttttctcaaatttggtagaattttttaaagttattatgggaaagtttaaagttctcttaaaaacaggataagtatttgtgggatcggtgtgctttttctgacgtgtcatgcaatattggtccacttgcgcgttaatccctcgcgccggctgagtgacctgagtcttatatgccggttacattatttgtcgtctacgacgttgacacttaacacagtcacatcctccaaatcaaattaaatgaaacgagaaacattgtagtgtgtctttgactttgacgctttggtgtcgcgtggttctcacgttactgtgttgttttgtaaaggtaacgaagcgcgtggactcaaacgagaaacattggtcgggatggaactggagaacggaaggtgacgttatggttaacggagcttttttcgtgccgtcaggtgacggagtgagcccagcatatgccagagccaccagtgttcagcctaaagccgccgcgatcattgaccagctcacggtcaatgccggcgttttcggcgatccaaggtattattatcaaatcatctattcaattgcttcctccacccaaactagcatctactttattacgtttatttttgcctctatacttttattcgattcttttaattatttctaacactatattctagactatataacattcaacattttttctgtagaaacgtatatttcctagttatttcattattttgtgagaatttcaaaacgttggtgctatttttagtaatgaatttataaaaacgattgctaatcctaaaataatttgggtttgtctattgtgatatttatttaatattgctttacctaactgactttttttcaaaatttgaagattaggtttcttcacttaatatattcatctttttaatttacaaatagatgataaaaaatttgaaagaaattttatatttttccaaaattataatttcggacgtgaagggta

SEQ ID NO: 146544 - DNA, 2171 bp, Arabidopsis thaliana landsberg
aatccttacgcaatgaatctccggttcatcgccgccgacactctccaaaaaatcatcatgttgtcacttttagtcctatgggctaatttcactcgctccggtagcctcgagtggagcatcacaatcttttccctttccacacttcccaacactcttgttatggggattcctctcttgatcgccatgtatggcgaatactctggttccctcatggtccaaatcgtcgtcctccagtgtatcatctggtacacgcttctcctttttctcttcgagtttcgtggcgccaagatgctcatcatggagcagttccctgagacggctgcttccattgtttctttcaaagtcgaatccgacgtcgtttcgctcgacggccatgattttcttgagaccgatgcagagataggtgacgacgggaagcttcacgtcaccgtgagaaaatccaacgcttcacgtcgttcgttctgcggcccgaacatgactccacggccgtcaaatctcaccggagctgagatttatagtctcagcaccactcctagaggctctaatttcaaccactctgatttttacaacatgatgggtttccccggtggtcgtctctccaatttcggtccggcggatatgtactccgttcaatcatctagaggtccaactcctcgaccttcaaacttcgaggagaattgcgccatggcatcctccccgagattcgggtattaccctggaggaggagccgggtcttatccggctccgaatccagagttctcttcaaccaccacatctaccgccaataaaagcgtcaataaaaacccgaaagacgttaatacgaatcagcagacgactcttccaacgggcggcaagtcaaacagccatgacgccaaggagcttcacatgttcgtctggagctcaagcgcttctccggtctccaacgtgtttggcggaggtgcaggcgacaacgtggcaacggaacaatctgaacaaggtgctaaggagattcgaatggttgtctctgatcaacctcgaaagagtaatgctagaggttcttttttttttttttttttgtcatcaaatattatttagctaaaattgcggaaaattgtttacataaataatatgctagaggtttgttggtttaattttattattattcgaatactattatttttgtatgtattcatgatttttggttttctcaggtggtggtgatgatatcggcggtcttgatagtggagagggagaaagagagatagagaaagctacagcagggctgaataaaatggggtctaattccacggcggagctagaggcggctggtggagatggcggcggcaacaacggaacacatatcccgccgacaagtgtgatgacacgactgatattgataatggtgtggagaaagctgatcagaaacccaaacacgtactccagtctaatcggtctcatatgggctcttgttgcttaccggtcagtgagtccaatcattttcttacttacagattttatggataaatgttataataagaaaaggaaataatataatcatctatgcatggaataattgtagtgggaactaataatgagtatgggttgtttttggaagcaggtggcatgtggctatgcccaaaatattacaacaatccatctccatactctcagatgctggtcttggaatggctatgttcagcttaggtaaacactaaccttgcttcatgcaaatctagacttgttttgatgatgatctaatctttaaagttgggtccaaatttgttctcatcttatctgttaaaaaagattcatttaatgcaaagtgggtctgtgtgtttaattagtcgtagttgtccagcttgtaattggtaaaagtcatataaactgtacaaagcacttacccaaagagagaatcctgaccctctgacccagacatgttggtgtgtccggtccccacgccgagtccccactggctctgtctacttatttgggtctcaccaagtagatgacctaactctttgctgtcaattttctcaaatccttttagttaacgaattgcttatttttggtgtaattttaaggtttattcatggcacttcaacccaaaatcattgcttgtgggaactctgtcgccacgtttgccatggcggtcagatttataaccggtccggccatcagagctgaactgggat

SEQ ID NO: 146545 - DNA, 574 bp, Arabidopsis thaliana landsberg
  unsure (1)..(574): unsure at all n locations
cgagtcaaaataatattcgagcaaaaaacaaaagaaatggttatggagcaagctggaacgacatcgtatcggtcgtgtcagagtttgaaggaacaatactgaagaacgcagnatcattctctnacttcatgctcgtagccttcgaagcagctggtctaattcgtttcgctatcttgttgtttctatggcccgtaatcacactccttgacgttttcagctacaaaaacgcagctctcaagctcaagatttttgtagccactgttggtctacgtgaaccggagatcgaatcagtggctagagccgttctgccaaaattctacatggacgacgtaagcatggacacgtggagggttttcagctcgtgtaagaagagggtcgtggtcacgagaatgcctcgagttatggtggagaggtttgctaaggagcatcttagagcagatgaggtcatcggtacggaactgattgtaaaccggttcggttttgtcaccggtttgattcgcgaaacggatgttgatcagtctgctatgaacagtgtcgctaatttgtttgttggtcggaggcctcaactaggtct

SEQ ID NO: 146546 - DNA, 847 bp, Arabidopsis thaliana landsberg
cctggaaatagagacttgacatcttgagtattatggagattaatgctgatgaagaagctgggatcaccaaagaagaaacagttccactcctggatgatcaaaatcgtaatcgggacttacctgacatagaaaggaacactatgatgcaaaaggcaataggtaagacttttcagacaacagctaatctagctaatcttttacctacggggacagttcttgcattccagattttatcgccaatttgcacaaacgttggacgctgcgatctaactagcagattcatgactgcgttgctagtttccatctgcggattctcttgtttcatacttagcttcacagattcttacaaggatttgaatggtagtgtctgctatggatttgcaacaatccatggtttctggatcattgatggctcagctactcttcctcaagaactttccaaaagctacaaactacggtttatcgacttcgtacatgccattatgtcgtttctggtttttggagccgtggttttgtttgatcagaatgcggtaaactgtttctatcccgaaccatcagctgaagtagtggagcttctcacaactttgccagtagctgtaggagtcttctgcagtatggtgttcgctaaatttccaactacacgccacggtattggttttcccctctctgctaaatgatgttctgaatcaaaatgtaaaaatcctcataattcttttggaatttctgaaattctctgttgtattgtgcgatttaccatttcttctgagatgatctcttgataaaatatctcaatgtttgtgtagttgctccatccgaccatgtttgttcagctggcttcatctaatct

SEQ ID NO: 146547 - DNA, 1229 bp, Arabidopsis thaliana landsberg
tgttacagatactctcgcaaagtctcatcctttctcagcaaaaaacactaggaaatggttgaaaggtacagtgttcttcatatgcttgcttctgtagagctgttttttgaaattagccccccacgcttcacaatgttttatatgcaggcaaagagaattttgatttgctgcttaagatatatcatgtcgcagtgcgttgacggtatcaagcatttatgcacctctgttttagggtgttttgatcttgatttgtataaacaatctggtggccttggagatcctgaattgcttgcaagagacactgtttgtatgccctatcaccttctcgactcgtttttttttgtttttttttttccggttataagattcgatgcaataccatttgaggaatgcaaaaatatttcttctgaagactattgatgattgaatttggttttggaatgcagttagtgtgagtgaaatagaagctctttatgagctttttaagaaaatcagcagtgccgtgattgatgatgggctaataaacaaggtataactctaacttgtttgatcttcttcctcatttggtaaagctttagtgattgatctaacaatctgtctaatttactcatctcttgtttgtatcagaaagagtttcagttggctttgtttaagacaaataaaaaagagagtttgtttgcagatcgggtaatgtttctttcttcacattataagtgttcttaaacccatttttgtcaagatcaagtttataagaaatgctgaaatatgtgattttgtttctaggttttcgatttgtttgatacaaagcacaatggaatactggggtttgaggaatttgctcatgctctctccgtctttcacccaaatgcgcctatagatgacaaaattcactgtacgtcccttttagcttgtatctcaaaaacaagattgggataacacagtaatgatatatactatttttttgcagtttcatttcagctatatgatcttaaacagcaagggtttatcgaacggcaagaggtaaagcttccatatcttcaaatagcttcatatataaccttgtagaagtgcgctttattatcctcactgacattttcgtccatcatttgtccaggtgaaacaaatggttgtcgctacgcttgctgaatctggaatgaatctgaaggatactgtcattgaggatataatcgacaagggaaggtacttactttttttcctcttcaccctat

SEQ ID NO: 146548 - DNA, 1878 bp, Arabidopsis thaliana landsberg
tttcgcgattacgggtttagggtttgagtttcgtgtaatccgtggaagcaggagatgaactagacctttaattttatgacccttcttgtgatttcaaagtttggatttttcaactcaattgagattgattgaattgaaaagctacttctttcttgttgcaaattggatatcttgaaattactgatcttgtgttttttctttaatggggatctaggaagatgctcaaagaacaaatctagaatgtgattcttacaaggagaagattaaggagaatcaggagaagattaaactcaacaagcagctgccttacttggttggcaacattgtcgaggtattcaactagttttcttatcttattttggcactttcctgtagagttttacctattggaaattgtccgttagtttatggcctctaaatgtttgttatttgtacccttacctgcttggatttgaagtgctaactgttttgatatcatattatgcccttagattttggagatgaatcctgaggatgatgctgaggaagatggtgcaaatattgatcttggctctcaacggaaaggaaaatgtgttgtgttgaaaacgtctacacgacaggtgagacttccatattcattctccagatatgttctctacattatctggttcttttctcgtttcatgtctgagcaaagacttttgtttcttgatgtggagtgcagaccatctttctaccagttgttggactcgtggatcctgatagtttgaaacctggtgacttggtcggagttaacaaatatagctacttgattttggataccttgccatctgagtatgactctagggttaaagccatggaggtcgatgaaaaaccaacagaagattacaatgacataggaggactagagaagcaggtaagtttatcccattgtgttgatctggtgtattgactttgcttcagcgtgcatattgaatctaattgtgtttatttctggaacagatccaagagcttgtagaggcaattgtgcttcccatgacgcacaaggaacgttttgagaagctgggtgttcgtccaccaaagggagtgctcttgtatggtcctccagggactggtaaaactttaatggctcgtgcctgcgcagcacagaccaatgccaccttccttaaattggcaggccctcaattggtcaggtatatatatgagtgtcagattcaattctcatctcttagagttctttaccctgtctggatataagattttagtgttctggcaataataattacatgtgaagagctataatgatactttattgtaatgacatgatgacatattcaatttatatacagatgttcattggagacggagcaaagcttgtccgtgatgcctttcaacttgccaaagagaaagctccgtgcattatcttcatagatgaaatcgatgccattggtacaaagcgtttcgacaggtacaaatctttttctgattccaattcatgtatttctgcactttctcagctatttgctcaaatcacattctttggttgagagtacagtgaagtcagcggagacagggaagtgcagaggactatgttggagttgctcaatcaacttgacggattcagtagcgatgaacgtattaaggtgagtgtctttatccattctaaggactaatcatactggtcttaaaaatcgttctcaaagaaacagtaacaaccatacctttctattttttcaggtgattgcagctactaaccgtgcagatattctggacccagcactcatgcgttctggtcgattagacagaaagattgagttcccacacccaaccaaaaaagcgagagcaagaatcttgcaggtttgtctctcccatttttcaaacatgacccttggtgataag

SEQ ID NO: 146549 - DNA, 1841 bp, Arabidopsis thaliana landsberg
atgattttagcgcatcttccaagattccatctctcaatcctcgcgaaaccttctttctctctctcttcttcgcatttcagtttcttaaaccctaagccttcggtaacagtatctcgaacccttttctcattcgcgtctaaatcgaatctcgccactgttgaacccaacccattatcggtctcagattcaaccgatttggatgatgcacctgtcgagattgcgctcgacaagctttttattccgccggagaccgatatatccggtgaagactcggcgagtttaacgacgaggatacttaagggttcgaatattgtgctgagcaagtacgcgagggacgcacaggtggttcaggctgattatgtgaagagtagtgtcaagacggaggattgtccggccgatgggttgccggagtttgcgcttgttgggagatccaatgttgggaaatcatcgcttctcaattcgttggtgaggaggaaacgccttgccttgacttctaagaaacctggtaagctgagttttgctccatcgtgcttatcatttagctggtgtgtgatttctacattattttgagtgtcattatatttatggatcaaaagcttccattttggggacctgaagcactggttaagtagatgatagattaagagaacaacttggcttattcccgttgaaatgtcatgtgaaactgaagcaatcacatctttgagacagagtgatgtagtcagttttttaatgttcatgaggagattggagagtgttggtaaagcagtaaggagaagtcagtttttgttgttgttggaagcttaggtcaattgatttattgaaatgattcttctataactgggttttgctagagtccacactaatcatgggctaacgcctagcatttgaattctgtagtggccaagtgaggcattgagtgggaatcagtctctagtctcaatcaatagtcaatagtcaataggacaaaaccaatagactatccccacttggttagattgaacagatttgccttggagcatcggcatttgttggtttctagtacttttgaagatggggtattgttgtagagaatacgaaccaagatatggcatcagtggatataatctttgagtaatatgtgttgctgctagaccatgctataataatttcatgaaaatgggatttggatgtatatatgatgaaagtatctctatagtgtcgaccgaacatctcattcacaaatactccttcctagtgaaccacttagaaaggttgatagacgtgatattagaattggaaactgataggcatccatgccgtgcttgtgcttgtgcttatgctacatataggttgattataacttctggtagtttattcttcatgtaggaaagacgcaatgcattaatcatttccggatcaacgacaagtggtacttggtagatttgcctggttacgggtaagtttaactgatattattttgtttttcatgccatagcaccttaaaattgctctggcaagtctctgtctttcctagttttttgtttgtgtctgttggatacaattacagtttctgtgccagggaatttgaggactttcagtatagaaaatgaaagttgatacattttatatatccaggtatgcatcagcaccgcatgaactcaaacaagactggaacaaattcaccaaagactattttctaaatcgatcaacattggtctcggtgtttttactagttgatgccagcattcctgtaaagccaatcgatctcgagtatgcaagctggcttggtcaaaaccaggtataaaaagtacctaaaccttgaaaaccccactttaacccattattggcaatcaggtcaa

SEQ ID NO: 146550 - DNA, 1715 bp, Arabidopsis thaliana landsberg
accctaactcttgagttttgctatggagtccgtcgaaatgaacaatcccaattcgcaaaccctagatcaacctcctccttcctccaacggagacactgctccactcgcattggatcatatgaatcctcagaattcggagtctgtggctttaaacggttcttctactcctatccccgatactaatggttcatcagcaaagcctgagctcttacgtcctttgctatcggagaacggtgttagcaagacgctgagtggtaacgataaggatcagtctggtggagaggaagagactacaagccggaggaagcgtcggagtcggtgggatcctccgccttctgagtccattaataaccctagcgccgaaggggtactgattccggtactgggactaggaagcgtaagtcgagatgggcagatgatgagccgaggacgcaaattcagttacctgacttcatgaaggatttcactggaggtattgagtttgatcctgagattcaagctttgaatagtaggttacttgagattagtaggatgttgcagtctggtatgcctttggatgatagaccagaaggacagaggtctccttcaccagagcctgtgtatgataacatgggaattaggatcaacactagggagtatcgagcgagggagaggttgaatagagaaagacaagaaattattgctcagattatcaagaagaatcctgcttttaaacctccggcagattatagacctcctaagctccataagaagcttttcattccaatgaaggagtttcctggttacaattttattggtctgattattggtcccaggggtaatactcagaagagaatggagagggagactggtgcaaaaattgtaattcggggtaaagggtctgtaaaagaaggtaggcatcagcagaaaaaggatttgaaatatgacccttctgagaatgaagacttgcatgttttagtcgaggctgagactcaggaagctcttgaagctgctgctggtatggttgaaaagctattgcaacctgttgatgaagtgctcaacgagcacaagaggcaacagctcagggaacttgcaaccttgaatgggacaataagggatgaagaattctgtagactgtgtggtgagccaggacatagacagtatgcatgtccttctcgtacgaatacctttaagagtgatgttctttgcaagatctgtggtgatggtggacaccctactattgattgcccggtgaagggtactactgggaagaaaatggatgatgaatatcagaacttcttggcagagttaggaggaactgtacctgaatcttctctcaaacagagtgctaccttagctcttggtccgggaagttcgggaagtaatcctccatgggctaataatgcagggaatggtgcaagtgcgcatcctggcttagggtcaactccgactaaacccccctccaaagaatatgacgaaacaaatttgtacattgggttcttacctccgatgctggaggacgatggtttgattaatctcttttcatcctttggtgaaattgtgatggcaaaggtaatcaaggaccgtgtgactgggctgagcaaaggctatggttttgtgaagtacgctgatgtacagatggctaatactgctgttcaggcaatgaatggctatcgtttcgaaggccgaacactcgctgtcaggattgcaggcaaatcgccaccgcctattgcgcc

SEQ ID NO: 146551 - DNA, 1159 bp, Arabidopsis thaliana landsberg
agaagttttactaatttaaatccttgctacgttctcttaccgttcttccttgtcctagccacgaatgcaacacatacaaacaatttcctcccaaggccacggactgggtattacggtagtgcatgctggaatgtagaatcgatagttcggtccgtggttgagtctaactatcttgctaatccagccaatgctccaggcattttgcgtatgcactttcacgattgtttcgttcaaggctgtgacgcctccgttctcctagccggacctaactctgagcgaacggcgattccaaatctatcgttgagagggtttaatgtcattgaagaagctaagactcagcttgagatcgcttgtcctcgaacagtctcttgtgctgatatcctcgcactcgctgcacgtgacttcgtccatttggtataacttacttttctaattttacttaattatatacataagtctatcgtgcgtcttgggttttaacgtcacatgcatatatgtctatctattgacaacgtgattaaatgaaagttttatacgtatgcatataggccggtggaccatggtggccagttccattggggagactcgatggccgaatttctctagcctcgaatgtcattttgccgggacctaccgactccgttgccgtgcagaagctgaggtttgccgaaaaaaatcttaatacccaagatctcgttgtccttgctggtacgtagtgattttataaggcctcgatcgcttgtgttaaaacattgttttttcgattatgtttgcatgtgaaaattctaccttttttatatatttctgcaaacgtaaagtcgtaaacaaagaatcaaagctagcttaacattcaaaggagataataaatactttctgtatgttacaaattacatattttgaaattgtcatgaagacacctggctaattcacatagagggcttggtatataacagctggacatacgataggaacggccggatgtattgtgtttagggacagattcttcaactacgacaacacaggaagtccggacccaaccatcgccccgagttttgtccctctgatccaagctcaatggccctctgaatggtgaccccgcgactcgtgtagtgctggacacggaagtggtgaccaatttgatacgtcgtaccttaacaac

SEQ ID NO: 146552 - DNA, 1598 bp, Arabidopsis thaliana landsberg
ccaacaccatttaataacccatccaacccaaaagcatacaatacaatgtctactcttgttttattcctccaacttttttccatcctaccattagcacttgggttgaaccacccaaattgtgacctgaccaagactcaagaccaaggctctaccctaagaatcttccacatagacagcccttgctcccccttcaaatcatcatccccactctcatgggaagcgcgtgtgctccagacgctggctcaagaccaggcccgtctccagtacctgagcagcctcgtcgccgggagatctgtagtccccattgcctcagggcgtcaaatgttgcaaagcactacatacattgtcaaggctttgatcggtactccggctcagccgctgctcctagccatggacacgagcagtgacgtggcttggattccttgctccggatgcgttggctgtccttctaacacggccttttcccctgctaagtctacatccttcaagaacgttagctgcagcgctcctcagtgtaagcaggtatataattttgtacttacacacctacagtactacatatctaataaatatgtttttggaatgttttttgattaatttattttatcctcacacttacactttcatagcttcataaatgaaccggtagtattaaaaaagaaaaaatagtttatgaatgtctcaccatactatattgtagtcaaattttaatattagtaacctgcatttgttttcatcataaagatgtgagcatgagaatgttaattgctgccccaaaatgaaaatatatttgacaaaatatcagatctagaaattttttagttgatatacaaaaaggacagtttctattttattacgtgaaaaatgtattttcacagagagtgggttccacgtggttataattgataattccacccacattcaaagaaaaaacggtcacgggattacagaaccactaaacacttgaccgacacagagacactgtactgcattaacaacaattcacgtgaacacttgcttcaggtaccaaaccccacgtgtggagcacgcgcgtgctctttcaacctcacctatggaagctcctccattgcggctaacctctctcaagacacgatccgtcttgccgccgatccgatcaaagcttttacattcggatgcgtcaacaaagtcgccggtggaggaaccatcccaccacctcaaggcttgttgggcttgggacgaggcccactttcactcatgtcacaggctcagtctatttacaagtccactttctcttactgtttgccaagtttcaggtctctgaccttctctggttctctcagactcggccctacctcccagccccagcgcgtgaagtacactcaacttctcagaaaccctagaaggtcttctctgtactacgtcaacctcgttgcgatccgcgttggtcggaaagtcgtcgatttaccgccggcagctattgcttttaatccttcaaccggcgctggaaccatcttcgactccggtaattactcttgtccggtttggttccggttaggttttagttatctgtttcaattggtattaattgcgtattggtttaaactaaaaactaaatc

SEQ ID NO: 146553 - DNA, 1242 bp, Arabidopsis thaliana landsberg
cacaatatctttcaactcaaaatctttttcttttctttgtatcctcctcatatttttattcttttgtaatgacaggttgctttagcttgtctgaagcaatagaacgaacttacaaatccgggttcaaaagatccggtctacgacccgtaaccatcgacttgaaagatggaaccgtagtcaacttttgggtatccaaaaccaaacccgaatccaaacccaaacctaatctcctcctcatccacggcctcggagctactgccatctggcaatggtacgacgtagctcgccgtctctcacgttatttcaacctctacatccccgacctagtcttcttcggcggatcttccacgacccgacccgaaagatccgatattttccaagcccaaacactcatgcgggccttagaagcccaatccgtcaaaaagtttagcctcgtcggtcttagctacggcggattcgttggttatcgaatggcgtcgatgtacgcagacgcggtggagaaggtggtgatatgctgcgccgccgtgtgcgtggaggagaaagatatgaaagccggtgttttcaaggtgtcggatcttgatgaagcttcgaagattcttgtgccggagtctgtgaaaaagctccgggaacttatgggttacatattttacaaaccggcgttggcaagactggttcctacttgtcttctccatgatttcatcgaacatgtgagctactttcttctttttttacttcttcaaccaaatcatattacgacacgtgtctacatgtcttaagaacatatactatacgaaaaagtgatttaaatgttgaaaatctagtaagtgcgaatatagtttagaaatagtaagatttgaacttttaaagattctatctgtttgaagataatgtacttaaattgtcaacttggagtttaaagtaaaatttgtcacattttgagttaatgggttcattagatctatcaacataattgataattccactaacagatcttatatagtaaataaaattcgttcggtagttctttgttgaatactaagacacggtaaaaaacgagtaaacattatattcgtgccaataagaattattttggtgttcttacaatgtatttaacttggtacaatgtgaaactacacaggctttgacaagagataatatggaagagaagagagaactgattaaagccataccaaaagacagaataatctcagagattccaaagctcaacaggtatcaaacaat

SEQ ID NO: 146554 - DNA, 898 bp, Arabidopsis thaliana landsberg
tgcaactgcaatctcttctcttcccttcccagcttgggtccaatcggacaagatctccaatttcgcatcttctcgtcctctcgcctccgcaattcgcatctgcacaaagttttctcgcctttctttgaattcgcgttccacttcgaaatctcttattcactgcatgtccaatgttaccgccggtgactcttcttgaacttcacattgcatttcacaattcattctcctttgttttgtattgaaaaaggctctgactttatctgcattcactctcttgtggttttgttggtcagatgtgcctcctgtatcagagacaaagtcgaaattcctaaaagcttacaagcgacccatcccgagtatctacaacacggttttgcaggagctcattgtccagcagcatttgatgaggtataagaagacttatcgttatgatcctgtttttgcccttggatttgtcactgtatatgatcagctcatggaaggatatccgagtgatcaagaccgagatgccatttttaaggcttacattgaagccttgaatgaggatcctaagcaataccggtttgcttcttcctgcttccatcttctccttgataatgaatgtcttcttgttgaatgtctttttctaaagatgataactttttttgtacagaattgatgctcagaagatggaggaatgggcacgaagtcagacttctgcttcactagttgacttttcctctaaagaaggagatattgaagcagttcttaaggacattgcaggaagagctggtagtaaggaggggtttagttacagcaggttcttcgctgttgggctcattcgtttgcttgagcttgcaagtgctactgatccaactgtcttggacaaggtgattctattcgtcttcggtttgctaat

SEQ ID NO: 146555 - DNA, 1075 bp, Arabidopsis thaliana landsberg
cttcttgtttccttcgctcgattctcttctcttctcctactaaccttcgttcaaatcaccatctccccactttcttccccaagaatcatctcatttgctctcattccacttcttctcgcttcgaatcgctctcggtttcatcgatcggaactggatctaccaagaaatcatccgatactcggagaaaggtaaagagcatggctaggacaaatataggaaaggaggagaagaaaagagtcgagatttatgatctcgaagagaatttagcgattgatttggctaaattcacagcagatctctccgataagttttgtaaaaagagaggtgctttcactgtcgttgtttccggtggctctctcatcaaatctctccggtgtgttgttcttatctctcttttgagtttttgattcgaaaccatgagatttaagggtttgcaaagttttgatttagggtttagtatctgcgaatttgagatttgaatttagcttgtgtatggatagatccatttctttggtagttatggctgatcaagaacatagctttttcacattttgaacacactttcttgataatgtttcaggaaattagtagaatctccttacgttgatgctatagattgggcaagatggcattttttctgggttgacgagagagttgttcccaagaatcacgatgatagcaactataaactcgcttatgatagttttctatccaaggtattgaacacgttctcttcaggttaagagtcagctacaacttcttcacagtctaatcatttctctttaggtaccaattccgcctggaaatgtatatgcaatcaacgaagccctctccgctgaggctgcagcggatgattacgagacctgcctcaaacatttggtcaacaccaacattctccgtgtatctgaatcaactggctttcccaaatttgatctcatgcttctaggtatgggacctgatggtcatgtggcatcattattccctgggcatggtctctgcaacgaaagaaagaaatgggtagtttcaatctctgactctccaaaaccaccgtctgagagaatcaccttcacgtgcc

SEQ ID NO: 146556 - DNA, 1432 bp, Arabidopsis thaliana landsberg
cacatggtgcagccgcatatggttagggttctgggtcgctgggcgtttcatgatactggattgacctcttctggtgatctctgttatctcggtggcgaggttcgtaatgaattttcaattctttgtgtttctgtgcatgtgattgcataacaaatttagtgtgaattctgagtattgatttggaattgaaagtaattgggattgtcaattcttctttccagtggaggcgtgatgttgcatttgcaggatttgaagttccgatacaaatggacattttggcggagaagatgatatttggagtggctggtattgatcctcagagaagagatgagttgatcaaggtgagtagataattcaaaaatctgactttgatttgatgggttaggttctgttaatgcatctttacatgagattctttgaagttttgggaaggattcaaatttactttttaagtatttgctatagtcttaactcatttgttcattctgaattccaatgttaaaacaaaaaatcagctagagcatggtctgatctttgatctttgtcacataccaaacttacgagcacttcattgtctggagtattattactctgtttttttacatcaaatcaatgtgattctccaccttactgttttgttctaattgtgtttggttcaggtgttggatatcgacatctcatggagactgcacaaggtatccgatggccaaagaagacgtgtacagatctgtatgggactcctgaagccattcaaggtaaacccttatctccaaccaaaagtatacaggttttagccaaacctgatgcttcagaagatgaaatggtttgatgcttaaaacaatggactaagatcattatagtatctaatcatgaaacttgcttcaacaatttatctgaatcctactttcttgaatcttctataggttctccttttggatgaaataactgttgatcttgacgttctcgctagagcagaccttttgaagtttctgagaaaggaatgtgaagaacgaggagcaaccataatctacgctactcatatattcgatggcttagaggactggccaacacacattgtaatataaccacacaatctcatttctctgttttgctcctctactaaaactacctacaaacaacacataataacatcacatctgccattgttaggtgtatgtagcaaacggaaaattgcagttagcattgccaatggagaaagtgaaggagacaagcaagaagtcattgatgagaacagttgagagttggctgaggaaagaaagagatgaagagagaaagagaaggaaagagaggaaagctaatgggcttccagagtttgaaacacggactgaagaaagccgtgtgactggtgatccagcacggatgctgaacaatggctgggctgccgggagacttcactctacggttgcaggtg

SEQ ID NO: 146557 - DNA, 1581 bp, Arabidopsis thaliana landsberg
ggcaattccttaatatcttcagatcacaggccctgataatttctcttctccgacagagagagagaagcagatggtatcatcacgagccgaccatcggaatatcagagaaagagagaaaaagagagagagagagagagaggatgtctggtgtggttgctcttggtcatgcgagctcgtggggcgcagcgctggtaaggatctcgccgtatactttctccgcaatcggaatcgccatctcgatcggtgtctcagtcctcggtgccgcctggtaaatcgaatcttattcttcttcgtccccgcagattaaagcattgacctttttcatcatctttttttggtttgtcttattcaggggaatttacattacgggaagtagtttgatcggtgcggctatagaagctcctcgtattacttcgaagaatctcatcaggttcgttaaaagtttcaagcttttttaattctagttttgttcctttggttgatcaattagtggccattttaaggaactgtgtagattccatgtcttgttctgaatagcaatgagaattcatcgctgagtagcttgattcatttggatatttcaatgccacatctctgcaagattagattgtcacataatgatacaagttgttgacctgggattcaggaggtagaaatttagaattctcaaggactcatctggttggtagggctagtaactttggatcgtgaaggctctggctttgcggattcaagcactggatgtaatgataatgaagtgtcttttgtctttccacgtatttcagcagaaacatatatataccatcgagatagctaaatgtcaaattaggggatatagatttaaactttgtgtttacgttatttgtggtgccttcctattccgctccttcattcttgggccggagtcacttaagtaaacactcaacacagtcattgctattatatcccatgggtctacggggtagatttaaggaatgcttaacagggagtagctgtgtatgcaatttgatttgttgttacagagctacaggcttggagttagatgctctgcaacatcagtgtcaacagtgtcattaccacacaccatttcttaaccatattgagtagagcatttggctgtaaaggcactagtacttaggaatgcttaagtaggaaacagttgtgtttgcattctacattttctactttgttaacacttaacagagctttaggctcaagattagatgcaaaaagtatacaatgacgaagcatttcttgttcttttaaactgtcccagtgtcatcttttgcgaagctgttgctatatatggagttattgttgcaatcatactgcaaacaaagttggagagtgtcccatcttcaaagatgtatgatgctgagtctcttagagctggatatgcaatctttgcatctggaattatagttggattcgccaaccttgtatgcgggtctgtatctacccttttctccttcctcacacttttggtttttggattccattgtcagatatacaaccgaggtccacatttctcttgcaggttatgtgtagcaatccttgaagcagtatgtgcattgtccgatg

SEQ ID NO: 146558 - DNA, 2616 bp, Arabidopsis thaliana landsberg; identical to SEQ ID NO: 16165

SEQ ID NO: 146559 - DNA, 1721 bp, Arabidopsis thaliana landsberg
cttatatgtatttgtgcttttagaatcctgtgtatacgttttctttttttctttaggctgagaaagcagctcataactccatagggttatttaaaatcaccaacgtatctggtaagagacgtgatgttgtgcctaagacatttggcaatggtgaggatgaggatgaggatgacgaagatgacagtgacagcgatgatgatgacggagatgaagcttctaaaactccaaatattcaggtaattcttgattcgttttaactcttgtgttattcattcatatctcttgtctcctaaggcgggagagtccttgtggttgatattttctctcaaaattttggtatacaggttcgaagggttgctcaccatggatgtgttaaccgtatacgtgcaatgccacaaaactctcatatctgtgtctcttgggcagattctggtcatgtacaggtaagattatatttttgtctactttcacagcttgggtgtctttttttgtatgtgtctttgttaatgtggattagcttttgtgtttcttgacaggtctgggacatgagctctcatcttaatgctttagccgaatcagaaacagagggtaaagatggaacttcaccggttcttaaccaagcacccttggttaacttttctggtcacaaagatgaaggctatgctatagactggagtcctgcaaccgctggaagacttctttccggtatagttatctcagaaatttctgcgatactaaataattacatgcttttcggcatggtcaatgtaatttttttttctccactggctaggggactgcaagagtatgattcacctgtgggagccagcttctggttcatgggctgttgatcctattccgttcgctggacacactgcaagtgttgaagatttacaagtaaaactgccactttacagctaaataatatgtttgcttgtaccatttccttttggctgaacaatctgtttctttattccagtggagtccagccgaagaaaacgtgtttgcctcatgttctgtggatgggagtgttgcagtctgggatattcgacttgggaagtcccctgcactatctttcaaggcacataacgcagatgtgaatgtcatctcatggaacaggttcttgtcccactatgctgtataacttaattctgtttggttttgtgcttcccacgaatgttgtagtcttaatttttcttctttcatgaaggctggctagttgcatgttggcctcaggaagtgatgacgggacattctccatccgtgatcttagactgatcaaagtaagttaaaaaccgtagctatatattttccttagcaatctcttaacaagattctgatatggtggcatataaatcttgaactagggtggagatgctgtggtagcacattttgagtaccataagcatcctattacgtcaattgaatggagcgctcatgaagcttcgacacttgcagtcacttccggtgataaccagctcacgtaagcaagaatacaatacacaccgattctctccagaaaaaccaaaactctgtcttaattgtttttggctatctgttgtatttacaggatatgggatctatccttagagaaggatgaagaagaagaggcagagttcaaggcacagaccaaggaactagtcaacacacctcaagacttgcctcctcagcttctctttgttcaccaagtaacattcttacttcaactatcattagcttgg

SEQ ID NO: 146560 - DNA, 2330 bp, Arabidopsis thaliana landsberg
caaaccaatttcttcttgtctcttgtttgagtctgaggcatatcaacagataaagtcttgaactttgatcaagaattttaaacggagttcttactcttctcgtcggtgaaagaaaaatcgagatgggttcaactccgttttgctattcgatcaatccatctccatcaaagcttgatttcacaaggacccatgtgtttagtcccgttgctaaacagttttacttagatttatcatcgttttccggaagatccggaggaggattatccgtgtttaggagccggaaaactttgctcggagtaaaggcggcgacggcgttagttgagaaggaggagaagagagaggcggtgacggagaagaagaaatcgagggttttagttgccggaggtggaatcggaggattggtgtttgctttagcggctaagaagaaaggattcgatgtgttagtgtttgagaaagatttgagtgctataagaggagaaggaaaatacagaggcccgattcaaatacagagcaacgctttagctgctttggaagctattgatattgaagttgctgaacaagttatggaagctgggtgtatcactggtgatcggattaacggtctcgttgatggtatctctggtacttggtgagtttccctgagatctcttgattgagtaaccaatcagattattggaaacttgtggtgatatttttgtttgtgaatcaattaggtatgtaaagtttgatactttcactcctgcggcgtcacggggacttcctgtgactagagtaattagtagaatgactctgcagcagattctagcacgtgcggttggagaagatgtgattagaaacgagagtaatgttgttgattttgaagattctggagataaggtgatggatgattgatttttacttaaaagagactattgatataaggaaagattccaatgtagctgtatgggtttgttggtttaggttactgtggtactcgagaatggtcaacgctatgaaggtgatctgcttgtgggtgcagatggcatttggtctaaggtaggttttaactgaatagagtataacaaacaactttcgttgttgagtatagaactgaaagattgtgccttttgatttttgtttgtaggtgagaaataatttgtttggccgtagtgaagctacttattcaggctacacttgttacacggggattgcagattttataccagcggatatcgagtctgttgggtatgttgcagtcagtctaaatctcatgcatatcttctctgattatgaatcttttttctgatattgggtctgtttcattctctcttaaagctaccgggttttcttgggacacaaacagtactttgtttcttcggatgttggtggtggaaaaatgcaatggtatgcatttcacgaggaaccagctggtggggctgatgctccaaatggtaaatttctgcattgttttacttctttctatggatcgtatttagtattagttcacagaagcttcttttctaattgatttttcaggtatgaagaaaaggttgtttgaaatatttgacggttggtgcgacaatgtactcgacttgttgcatgcgactgaggaggaagccattctgagaagagatatttatgatagaagtcctggttttacttggggtaaagggcgtgttacgctgctcggggattctatccatgcgatgcagccaaatatgggtcaaggtggatgcatggccattgaggtatctatctaatatataaatccactcaaccttttgactgattttaaagtgttattgagggaaatttcttgatgtattttgcaggatagttttcaactagcattggagcttgatgaagcatggaaacagagtgttgaaacgactacacctgttgatgttgtttcctctttgaaaaggtaaaactaaaacacaatttgtttagtttgggcttctggtggatactaaacatgctcttgaattggttttagatatgaggaatctagaagactgagagtcgctattatccatgcaatggcgaggatggctgcaattatggcttccacttacaaagcatacttaggtgttgggcttggtcctctgtctgtgagtatctttatggttttcactatacatggaaatcattcttgtttgttcatttctaactcaattccaaatcttgtttctgcagttcttgacaaagtttagagtaccacatccaggaagagttggtggtagattcttcgttgacattgctatgccatcgatgcttgactgggtccttggaggtaacaggttagttctatctgtgagttttatctaaagagaacttgatttgacagacct

SEQ ID NO: 146561 - DNA, 785 bp, Arabidopsis thaliana landsberg; identical to SEQ ID NO: 55166

SEQ ID NO: 146562 - DNA, 1636 bp, Arabidopsis thaliana landsberg
actgcagcatgagcaggaagagcggaaaaaggaagtagaaaaggcaaaagaggaacacttgtcattgatcaaccagttgaattctgcaaaggatttggtgacagaattaggccgggagctaagtagcgagaagaaattttgtgagaatcttagagttcaaatcgaaagtctgcaaaacagtctgtcaaaagctggtgaagacaaagaggcactagaaaccaagctcagagaaaagcttgatttggttgaggggctacaagatcggatcaacttgcttagtttggagctgaaagatagtgaagaaaaagctcaacgttttaatgcatcgttggcaaaaaaggaagcagaattgaaggaactcaactctatttacactcaaactagccgagatcttgctgaagcgaagttagagatcaaacagcagaaggaagaacttacaagaactcagagtgaattagactcgaagaattctgcgattgaggagttaaacacaagaataacaacttcagtggctgagaaagagagttatatccagaagcttgatagtgtttcaaaagattatagtgctttgaaattgacttctgaaacgcaagcagctgcagatgcagagctcatcagcaggaaagagcaggagattcagcagctaaatgaaaatctggatcgtgcgttagatgatgtaaataaaagtaaagacaaagttgctgacttaactgagaagtacgaagactcgaagagaatgctggatatagaactgactacagtaaacaatttgagacatgaacttgaaggaacaaagaaaacactgcaggcatctagagatcgggtctctgacctggaaacgatgcttgaagagtcaagagctttgtgttcaaagttagaatcagagcttgctatagttcacgcagaatggaaggaagctaaggaaagatatgaaaagaacctcgatgctgaaaaacaaaagaatgagattttggctagcgaacttgcagtggagaaagatattctgaggagagttaaagacgagcttgagggagtaactcatgaactcaaagagtcttctgtcaagaaccagagcctccagaaggaacttgtggagatttacaagaaagtggaaaccactaacaagaaattggaagaggagaaaaagacagttttgtcgttgaacaaagaggtgaaaggaatggaaaagcagatcttgatggaaagggaggcgagaaaatcccttgaaactgatctcgaagaagcagtaaagtctttagatgagatgaacaagaacacatcaatactgtcacgagagcttgagaaggtgaatactcatgcttccagcttggaggacgagaaagaagtacttcaaagatcactaggagaggcaaagaatgcatcaaaagaagctaaggaaaatgtggaagatgcacatatcctcgtgatgagcctaggaaaagaaagggaagtgctagagaagaaagtgaagaagctcgaggaggacttgggctctgcaaagggtgagatactgcgcatgaggagccaaccggattctgttaaagctgtgaatagtacagacaacaaagagaagagcgacaacacggttactgtgaagaaagttgtcaggaggagaaagagcagtaccagttcttga

SEQ ID NO: 146563 - DNA, 1912 bp, Arabidopsis thaliana landsberg
atacaaaaccccactcttcatttttatattcttattactttctacacactcatcgtatatcactcactatataaacacacactcacacattcactctacaaacactagaaaccacaaagacaaaatcaaggtcttaaacaatgagatcccatctcttgattttgttaatctctctcttaatcttgaaatctgaatccataaactgcaatgaaaagagccattcctcagatctaagagtgttccacattaacagtctatgttctccattcaaaacttctgtttcatgggcagatacacttcttcaagataaggctcgtttcctatacttgtcaagcctcgctggcgttaggaaatcatcagttccaatcgcctctggtcgggccatcgttcagagcccgacttacatcgtgagggctaacatcgggacaccggctcagcccatgctcgtggctcttgacactagcaatgacgctgcttggattccttgttctggctgcgttggctgttcttcctctgttctctttgacccttccaagtcaagctcctctcgtactcttcaatgcgaagctcctcagtgtaaacaggtaactaaatattgctttatagttataccctccgtataaattagatatgtgcatgcattctctggatggacttgaaaaatgaaaactatactcaacgtaatttttttgaatcatatcatacattcatacttaacgatacttttgtactgaataaaccgggaaaatcgatatacaaaaaatacatttaaattatactaacaaataattcgcatttttactttgttcaaaacaagatctaatcagaacatacataaatgtttcaaatcgaaagaaaaaaaatggttagtatttggacttgattatttttaacaaaacaagaaatttaaaaccaaaaccgaaatacgaaccgaatgtcaggcgtaatgtgaatgcctctacgtcaatttttggatccatctacacaaaagatgtgaatgtgaacttcgtttttggcgtgacattacaccatgatcgagaagtctagtcacgggttttggaccttttggtaccatgagtctaagtcacgggtatattattatttatacaagaaatttataaacaatccaactagtagagcatattttactgtttgaactttgatctatatatatactttgtcgtcatgctagttaggttttgcctataatacaaaaacgccacttacaactgcaattaaataacgtaacacatcgttagtagcgcaatttaataaccagatccaagatggataaaacaattctttatggaaatacgttgttaaactcaaagaacaaaaaaaattctaaatattaatcaataaagagttttttttattgcaggctccaaatccaagttgcacagtaagcaaatcatgtggtttcaacatgacctacggtggttcaaccatcgaagcatatctgacacaagacacactaacattggccagtgacgtcatcccaaactacacctttgggtgcatcaacaaagctagtggaacatcgttgccagcgcaaggactcatgggcttaggtcgtggtccattgtctttaatctcacagtcacaaaatctttatcagtctacattctcgtattgcttgcctaatagtaagtccagcaatttctccggatcactaagattgggacctaagaaccaaccgatccggatcaagaccactccattgttaaagaaccctagaagatcatcgctttactatgttaacttggttgggattcgtgtcggaaacaaaattgtggatattcctacaagtgcactcgcctttgatccgaccaccgcacccggccccatctttgactcgggtatggacttaacatcaactccttaatattttttatttttcgcttgagacctg

SEQ ID NO: 146564 - DNA, 6275 bp, Arabidopsis thaliana landsberg
  unsure (1)..(6275): unsure at all n locations
tcagcttgttgaatcttgggatgcacaccagtcgcctatccaggcagtgataaggctgccatctggtgagctcgtttcaggtacatcatccagctaaagctgtcatttgatgcatttgtttctgtttctttgttgttttcttgctgccatggacttccttattcgattgtattttctagtatgatcgttttgcaagcttaggttaaatgattttttggttgttcttaagatgcacatacttctttttgattaggcttgacggcataattttcactgatgttacttgtacttaccaggttcaagtgacgccagtctcaaactctggaagggtaaaacgagtctgcaaactctttcagggcatacaggtgaatttcattactctctcccaaatttcgtatctctcaaaatttccttgtcaatatgagaaactgcataccggaaataagatagaatctgatactagctgctctaagatatcttatcttgtgaagtgccaagacactggcctgttgtcagggattccttgttattggagaaactattgtcttatacaagtatttttattttgcaatgcagatactgttagagggttagctgtgatgcctgatttaggatttctttccgcatcacatgatgggtaagttatttgcttccaacaaactcatgccttactgaatttcattgtccaagtgaatccttatgtgcttaactcgaattgtgttgtattttgcatgacctggataagttttgtgatccggggataatatgatacttgagttttcttttatttatcctttcatgtgtttgtacacagcaaaggttgtaaatcactattttattttttctaacagttcaatcaggttatgggcactaagtggcgaagttcttcttgagatggttggccacacctcccttgtttattcagttgacgcacattcgtctggccttattgttagtgccagtgaagatcgtcatgccaagatatggaaaggtgattacgggttccttagtttctattgatgccttggctgttcttcacttatgtttcacagttttctaggttatatgaggtctgagatgtttaaatttggaaaatatgtctccacttttcagtatgttgctcgctcttaaagttttctttcaataataaagatgtctatatatcatatttttgtggaagacgtgttataaatttgatcacttagttgcaacctatggaaagttagttgttagtatgtcagacagtaatcaactgatcagaannnnnnnnnnnnnnnnnnnnnnnnnnnnnnnnnaatagctgttataatagatatcacttgcgaaaagagactgacattttggtttaaagcatgtttagatcttataggttgatccattgttctcactttgttgtttttgttttggtacagatggagtctgcgttcagagtttggaacacccaggctgtgtctgggatgccaagtttttggaaagcggagatattgtgacagcatgttcagatggagtggttcgtgtttggacagtacgtcatgatgcgattgcagatcagatggagattgatgcctatgattccccaatttctcaatacaaactaagcaggtaatctgatcatttatggtgatctctattcttatcgactaaattctatgtccattgagttttttttcttcacgtggcaatgcatattgtatgacctgctgagggggtatgctttcttgtcttttatgctcaaaatataactgcaaagtatatgcgtgctgttctttatctcaggaaaaaggttggcggattgaaacttgacgagctgccagggcttgattctttgacgtcaccaggtaccacttattatccaattaattgtaatattaatgtttcgtacgggagaaaggctaaattttaaagaatctctcgagaacacaaagataattgatagtgtctggcgatcaaatttgaatagattaagctggcattcttgtaacatcatcctctcttatttgatatatgttctcaggtaccagtgatggccagacaaaagtagtaagggaaggagacaatggtgttgcttatgcatggaatatgaaagaacagagatgggacaaagtaagtaaacagaatgaacttttatctttttttttgtttgtcgactgcatttcgtttttgctcttgacctgaatgcggctttgctatatattagatcgcatgcatgaatatacagataacttccctttgaaacaattaccttgaggaatatttgttactttgttcatcgaaaagttgccatcggattagggcttgtaatttccaggaatgagcatgctgtctggtcataaattgatagcatgtactgccagcaatttgcctttagcgaggattttatttaatgtggcaacccatacctgttaggaaaatttcatctgattttgacttctgatccttcttcgaagtagcaatctcttaagtagatagcaagtaaatgagatagatttctctctaacatttgtttgcatatgaaggattaaacattggctttttagtgtggtagaatgttttgagttctcactgcatgccttttttcagattggtgaggttgttgatggcccagatggtgtggctgatcgtccaattcacgagggcgttcaatatgattttggttagattttgacctattatggaaacttgagaatctctcaaaatcgaagaacaaaattcttagcccttttttttctctagttttcgatgttgacattggtgatggggaacctatccggaagctaccttacaatcgatcaggtacctgaatgctcttactggccttgttttattacaagtgcaaccacaagaaactgcttcagtttttgatacttcaaatcttttcttgtttggcagacaatccttatgatgcagctgacaagtggcttctaaaagagaatctcccctttgcatatcggcagcaaattgttgaatttatattacaaaattctgggcagaaagacttcaactttaatccatcttttcgtgatcccttcaccggcggtataaaatttttgaaaataattggtctgaaattttgtttttaggattttattttaattntgtgttttgccttttattgtgtaccagcaaatgcttatgtgcctgggcaaacatctcgtacagctggtatgaatacactgtctgtgtcattttcacataatactttcaatttcttcatttcntgtattgttcttttgctgcctcatgctctgactcttttctgttgcagcaactccggcaaaacctttatacaagcacattccaaaagtacgctggttctctttctttattagttattactgtttaatgtttctagctttttgatccttttttcttccataactctctccagagaggtgtgctagttttcgatgctgctcaatatgacgggattctgaaaaagatgacagagttcaatactactttacgatctgacgcagtaagctttcagtatcaacttttgtcacacaaaatgattaaatggttattttacttatactattgttggtatttatgtttctacaaattttccatcttatgaaggaaaacaatgacaagtccctgaccgaacttgaagtatccagagtacgcgcaatcgttaatatactgaaggacacatcacactaccactctaccaattttgctgacatggatattgctttgcttttgaaagtgctacatgcatggccaccggcaatgatgtttcctggttggtcttctcttgtcaatcaattagtcaaacagaactgtttattacatattgaacttttgatggtagccatatgtttctcaatattatgaagccacagcaaagtcagttttttccgagatgcttgttaaacaaatctaaaatgagatatgttttggtttatttggatgttattcttggtctccttgtgtttcttttgatgtttcttgcaggccataaagcattttgcctttcgatggccactttatttttgtcttttgttggatatagccttatgtttatcttgtgtcaagctcttatacctatggttttgaatatgcagctactgatatagtcaggatgctcgttttgcatcctcatggagcaagtctacttatcaagcatgtggaaaacaacaatggtaatcatctaattcgtgaagttatgctttctcaacattaatgaaagtactagctagtaggtaatgtcctttattaactggtatctctctgttactatatatcaatcagacctgcttttggatttgataaagaaagttacagaagattctgctcttcctgcaaatcttttaacgactgttcgtgtccttgttaatctattcaagaattcttcatttcattactggctacagacgcatcatagtcaagtaaggactctttcgtttctatgattttataccataacttggatgtgtgatgatctcgatgaacctactaattggtttagctgtgacttacaacctgaggagaaatttgtgggttttatgtctaatatacattgcttttttgcgtctgggcgtataaattaagtttctaattacatttaaacataagatagtgcctatacatgtgtgtgtttattataataatttgaagaagtggttttaattgctgtggatcaatgcagattcttgatgccttctcaaaccgttattcatcccccaataagaatctgcagttggcttattcgacgttgcttctcaagtaagatctctcttacattactttcttctagttggatttttgccaaattgtagctttattctattattaaactctctgtggagaaagatcaaaccgtaatctatgcttttgttcttcctcagttatgcagtgctattaatagaaaagaaggatcaagaaggtcaagctcaagtcctttcagcagctttgcaggtacgcctaaatttggttatttttaaccactgttgcatacatccaaatcctattcatcgtcaccgagttgaatctcatctgtttttatttttgtctctgtcacttacacaaatctctgagatcaaagtaatatgggagaagaccaatgtaccaaatagtttattatcattttttgctgctaaaaatatttaacttattactacaggtagcagaagaagaagctgcagatgttgattccaagttccggagtttggtagcaattggctcactggttagtttctgcaaacaactagagtaacataatccacttgttgttaattacataatttaatcagtgtgtgtctgtaacaacagatgcttgaaggtctcgtgaagaagatagcgatagattttgatgtagagagcatcgcaaaatcagcgaaggcgtcaaaggaagccaagattgcagaagttggggccgatatcgatcttgtaattcgtcagtaaccttaaaagagagtctgtgatcgaacccgggatttgaatttcgatgattccctcaagaattttcatatgattcaaaatcacttttccttgaaatgcaattcaacttttttgttttcagatttctgaatactaacatatgttaaaacttaaaagattatggcttatggcttccatttggagtagaatttttgatcaccccacattaacattctactaagcgaaaccctaactttcttcttctttaaatgccaatgtcttggccttatcctcttccccaagctaaacgcaaaatactgcgggaacttgttgagctcttcaagttctctttccatgtcgtaaaccagaaactcaaacttgggcctcaagttatcttcaacactgtatccgaatatcgccgggattctcccacagactctagctgcttcctcgtgttccaaacctatactcttcaagaatctcatctttgctcttagcttctcaactctcgtgttcagcacgtgcgcgttcgtcttgctcgctcggttcagattccgtacccctagctccttaaggtaaacaagcgtcggtctcaagcaatactcaacgtcggagaagaggatgttcgggcaatttacgattaagcccctggattcttctgcggaagctccaagctcgccggtgagaaaatcgaagacgggatcgagtttagagatgtcgaaagtgggcgagaagagctgtggacagaggaaaacgaggcgtgggaaatcttcgtcggagattcctttcgatttgaggagattcacggcggagaggataacggaaagatcattcgccggaggagcaagtcggggattctgaggaacaattccgagagaagaaaggtgtcttag

SEQ ID NO: 146565 - DNA, 3444 bp, Arabidopsis thaliana landsberg
tgtgatgacatagaaatggacaatgggaatgccaaagctggaaccaacattcgagacgcttgttgacacatttgtgttcctcgacgagaacaatgacggatatgttagccgcgaggagaaggtctgagccattgatgaatcaggaaaacgatcctccgtgcggattgcaatgaagagatttggtttattcttatactccctccctcttcttctcaagctttcttcttcactgaaccaagaatattgattttgattcctatgtctgcagaggaaatggactgggacaagaacggaatggtgaacttcaaagagtatctttattgctgttatattgaattgatttagcatctcttttgttgttcaaatgatgtatgtgttacagatttgttgttttgaacaagttatcgtaaagattcgattgattttggtgaaccctaggtgcgtacatgaatcaaagctatggaagaacgcagtctgatgtcatgattttctggagaaggtgaggtgctgactcgttaatgtataagtcactttctctattttcttttgtattttgaccataagaacacttttaaggtctattagattttgtattttgaccattttagtgacgatcagattattcgtatatggaactggctatcacggacttgtgtttttgtattgactggtcacaatcattatattatgtgtgcttctttccatccgaaagaagacctcgttgtattagcttccttagatgagactgttcgtgtttgggatattggtgctcttaggaagaagactgtatctcctgctgatgatatcatgaagttgactcagatgaatagtgatctttttggtggagttgatgctatagttaagtacgtccttgaaggtcatgatagaggagtcaactgggcttcttttcatcccacacttcctctcattgtctctggtgccgatgaccgccaagtaaagctgtggcgtatgaatggtatttcttatggatatctgtcttcttcttcacagaaagttaattttatgaatcattgaggtactgatgcgtttcaattttgttgcagaaactaaagcttgggaggtggatacattgcgaggtcatatgaataacgtttcatccgttatgttccatgcaaaacaggacattatcgtgtcaaactctgaggataaaagcatccgtgtctgggatgctaccaagcgaactggaatccaaacttttcgtcgtgagcatgaccgattctggattcttgcagttcaccctgagattaatctacttgcagcaggacatgacaatggtatgattgttttcaaacttgagagagaacgtcctgcatttgctttgagtggtgattcgttattctatgccaaagatagatttctgcggaactatgaatattcaactcaaaaagattcccaagttattcctatacggcgtcctggtaccccaagcttgaatcaaagtccgaagtctttatcctacagtccgacagaaaaatgcagtcttaatctgctcagatctggatggtggttcttacgagttgtacatcataccgaaagatagcgttggcaggagtgatgttgtacaagatgcaaagagggggacagggggttctacggtgttcattgctcgaaatcggtttgctgttctggagaaaagcaccagccaggtgctagtgaagaatctaaagaatgaggtggttaaaaagagttctttacctattcccacagatgctatcttttatgctgggactggaaatttgctttgtagatctgaggataaagtggttatatttgaccttcaacaaaggcttgttcttggtgagcttcagacaccgtttgttaggtacgttgtttggtctaacgatatggagagtgttgctttgctcagcaaacatactatcattattgcgagcaaaaaacttgtcctacagtgcacgcttcatgagacaatacgtgtgaaaagtggagcatgggacgacaatggtgtcttcatttacactactctgaaccacatcaagtactgtctgcctaatggagatagtggaatcatcagaaccctggatgtcccaatctacatcaccaaggtttctggaaatacaatcttttgcttggaccgggatgggaaaaacagggctttcaccattaatgcaaccgaatacattttcaagcttgcactactgagaaagaaatatgatcatgtcatgagcatgataaagaactcccagctatgtggacaggctatgatcgcttatcttcagcagaaaggatttcctgaagttgccctacactttgttgaagacgagaggatccgattcaacttggctcttgaaagtggcaacatcagtgtagctgttgcatccgctacagagattaatgagaaagaccactggtatagactcggagtggaagctcttcgtcaaggaaattctagaattgttgagtttgcgtaccagcagacaaagaactttgagaggttatcttttctatatctcattactggcaatttagacaagctgtcaaagttgatgaagattgcagaggtgaagaacaatgtaatgggtcagtttcacaatgcactctacctaggagatgttaaagagcgtgttaagatactagagaatgctggtcatttgcctctagcttatatcacagcttcggttcatggtttaactgacattgctgagcgactagcaattgagctaggagacaatgtgccttcattgcctgaagggaagactccatcgcttttaatgccaccgtctcccatcatgtgtggtggtgaattgccttttctgagaatgatgaaaaggattatttgaaggagactttgagagtgcaaacagaggggctgttgatgaagaagaagaagatgttgaaggcgactggggtgagggacttgacaaattcgatgttgatggaatggagaacacagacatcgaagccatattggatggtgcagaagcaggtgaagaagaagacgacgaggaaggtggatggggacttgaagacttggtgctcccaccagagcttgacactcctaaagcctctgctaatgcacgttcatctgtttttgtgacacctccccaaggtatgcccgtaagtcagagctggagccagaaatcttctcttgctgctgagcaagccgcagcgggaagcttcgacactgcaatgcgtctgctccacagacagcttggtatcaagaactttacacctttgaaatcgatgtttctagatctgttcaatggcagccatagctatctgcgtgctttttcttcatgtcctgtggttccacttgccattgagcgtggatggagcgagtcttccagtcccaacgtccgtagcccaccagctcttgtttatgctctctctccgctagacgagaagctcaaatccgaatacaaagctacaacaactgggaaattcactgaggctctccgtgtcttc

SEQ ID NO: 146566 - DNA, 841 bp, Arabidopsis thaliana landsberg
cacttaagcttcccagaaaaataaaaacacacagaagataatgaagtttggtaagagtctcagcaatcagattgagcagacacttcctgaatggcaagacaagttcttgtcttacaaagaactcaaaaaacgactcaaactcatcggttccaaaaccgccgatcgtcccgttaaacgactccgtttagatgagttttccgtcggaatatcgaaagaagagatcgatttcatccaattgttagaagacgagttggagaaattcaacaatttcttcgttgagaaggaagaagaatatatcatcagactaaaggtaatataaacaacatttcgaatccgattcctaaaaatgatcatctctttttctaatgtgtctctgtctgtacaaaaacaggaatttagagatagaattgcgaaagctaaggattcaatggagaagatgataaaaatcaggaaggagattgttgatttccatggagaaatggttcttcttgagaattacagtgctcttaattacactggtaatgtaatttaattgcctcattaagacttaatcttattattagtagtagaacaaaacgttgatgaatggtttgttgaaacaacaggattggttaagatactgaagaagtatgacaaaagaactggtgatctcatgcgtttacctttcatccagaaagttcttcagcaacctttttacactacagacttattgttcaagcttgtcaaggaatatgaggcaatgcttgatcagatcttccctgctaacgaaactgagtctaagattatccaagcagagttatcagagcataagttcatggagagtcttcatataagagcacaa

SEQ ID NO: 146567 - DNA, 656 bp, Arabidopsis thaliana landsberg; identical to SEQ ID NO: 17389

SEQ ID NO: 146568 - DNA, 1454 bp, Arabidopsis thaliana landsberg
ttttgttttgtttttgcgtttgtacgaaacagtaaacagcttttggatccagaagaagtcgacgtagttcatgatctcgataaagaacgtggaatctcaattgatgattttaagctcatcaagttccatatgtctaatcgtacgaaatcctttttcttcttaattcttcaaattctctgcttacttaagcaaatttgttgtctctgttgcactggtttgattagagattgatcagagaagttttttgagtttatgtctctttgtttcttcatttattgttgctttcagatattatgaaattggctcagcacattaaagtgaggcaaaggttggttctttacaatttggggatccaatttttgctatatcaaagagattctactgttgcagtacttccattactttgttttgcttctgtagatttaactagctctatatctgttgtaacctggacttgtatatgaatcgtcgccttggtttttctacttatgtagggttgtggctactgcaattacgtatatgagacgggtttatatcaggtatgcaatgtatttttgatatgatcgtatacatcaatgtgcatctttgtgtatgtgaggaatgaaatgagttaaattcttgtcatgccagtgtctctctatgttgcatctctgctatcaaaaacgttaactgtgttacgaaagttttcagttttggtgtctaatatcttccttttgttactatactatctcagaaagagtatggtagagtttgagcctcgacttgttgctcttacgtgcttgtacctggcatctaaagctgaagaaagcatagtgcaggccaggaatcttgttttttacatcaaaagattgtgtaatatcttcttcttctgtttttttatttttcaaatcatgagagtacatccccttcaatatgcttttttttgacatatcgacgacaacggttcttatatctttgcagatcctgatgagtacaacaaatatgaactaaaggatatattaggaatggagatgaaggtgttagaagcactagattattatctggttgtgtttcacccttaccggtcattatcggagtatgtccactcatctctcttatccgcttttcggaagctttgaacatgtttgccttattgtctgtggttacaaacggagaagtgtaaatgatgatacatgtaaaaacttgcagtcttcccatacaatgttcttgatgtttctcattatatcaaaattttggaccgccttaatatttccttggtgagagttttgtgtgccttgatggtcagaaaatcaacactcattctaatacttcattcttttgatttctaggtttttgcaagatgctgcattaaacgatgtaaatatgaaccagattacatggtaagtccttctatatgagatatattgcatagaactcaattcctagctccaacccttaaatctaagagatctctg

SEQ ID NO: 146569 - DNA, 1823 bp, Arabidopsis thaliana landsberg
  unsure (1)..(1823): unsure at all n locations
gtcttctttaagattaattaacgaatggttggtcaagtttcacatgtataaacagactaaaatttattgtagggatcgagccgtacgtgacactgtaccactgggatcttccacaagcacttcatgatcgatacctcggttggctaaacccacaaatcatgtaataatccataccaaaaccatatcattaatcattcagtaaaactattacatgtacacagaaactaattttaaaaaggcaatgcatgtatgtacccttttttgtagaaatgattttgcagcgtatgcggaggtttgtttccagagatttggagatagagtnnnnnnnnnnnnnnnnnnnnnnnnnccacacacgttcgcgatacaaggctatgatgttggcctacaagctccaggccgttgcactattctttttaagctcacttgtcgcgaaggaaactcatcgaccgagccttacattgttggtcacaatgttattttaactcacgccacagtatccgatatctataggaaaaagtataaggttagtcaatactaaagtgaaaacatgatgttacatgaaaaaaaggatatatacagttttgatgtataattatgataggcaaagcaaggaggttcgttagggattgcgtttgatgtaatgtggtttgaaccagagtcgaacaagacagaggacactgaagctgcacaaagagctcaagactttcaacttggctggtacgtatatgttcttacacaacttagctctgttccataacttataacaagtgatcatatatctttaaacaatcttaattaggtttttggatccgttgatgtttggggattacccaagctcgatgagaagcagagtcggaagcagattaccggtgtttacaggatctcaatcttctctggtgaagggttctttagattttgtagggattaatcactacacaacgtactacgcaaggaacaatgccaccaatctcattggcactcttctacacgacgccgtttctgattctggaaccgtcactctacgtaaatacttatacttctacctcacgtaaaccctagtcatgatgagtgtctgatcttaattaaaattctttgttttgaattttcagcgtttaagggtttaagcacgattggagatagggtaagaaacattatatagtaactctaattagttatacttctcccaaaagtgattagtactgtcgaatttctataagcttgtgttacatttgttgttgttgcggacaggcaagttcgatatggttgtacatagtgcctagagggatgagaagcttgatgaattacatcaaacatagatatggaaaccctccagtcttcatcactgaaaatggtaaaacacacacacatctctgaaactatctagacaagaaagagtgtttataaatgtaatgatgtttgtttgtgtaggaatggacgacccaaacagcattctgatctcaagaaaagacgctctcaaagatgcaaagaggatcaaataccatcatgattacctttctagcttacaagcttcgataaaagaggatggatgtaatgtcaaagggtacttcgtatggtcgctattggacaattgggaatgggcagcaggttatagttcaagatttggtctctacttcgttgattacagagacaacctcaagagatatcctaaagactctgttcattggttcacttctttcttaaactccacttcttgatttttccttcccattttattggtttagcgtaatgtatacaaaagtttatgattagttatggatttcggtttagataaatatatttaaatcaagatatgttgatatact

SEQ ID NO: 146570 - DNA, 3545 bp, Arabidopsis thaliana landsberg
atgaataggatcggttcagtacttaattgaactaaaagtcatacatatagcttaggaccagattaacataccaagtagtcgagtttaggaccgaaccaatcagtttggtttgaagatggaccataaaagtgtttggaaaaaggaacaataaaaaaaatcgcacaatgtttgtggctccgataaataacacgatgaggtgtcttaacacaaccaatcaaaacacaagaacatctccttcactaatctcatcttatgccacgtgtccttttcatatccaccccttttattttatcataatttttttttttaacattctctgtggttcgtcatgaacctcaaaaaacctctcactgcaaagtgccaacaaacaacaagtcttcaccttcttcttcttcttcttcaaaatctcttgtacgcaaataatccatgagaaactagggtttaacttgagatctctcttccgaagtattaccatcaatggcgacttcttcttcttcatcgtcgtctctgcttttaccaaacatcaatttcaactcaagacaatctccaacaatcactcgttccgtttcaatcgccgggatcttcttacccagaaaccgattaagctacaatcacaatctccggattcgtacgagattaatcagagcttctaaagacgataatgtcgctgttgaagatcgtgataatgcagtgaagatcaacggtgattacaacggaagtgcacgtttaaacggtaacggctctgcgagaaaatccgtcaacggagattttaacggaagtgctcgtttgaacggtaacggtagtttggtgaagtatgtgaacggaagtgtaacggtggaaacggaggaagtgacaaagaagagaaaagaagaagtgaggaagaagagagtagaagatattggtcaagaggatgcttggtttaagaacaacactcaacaaaaacaagttgaggtataaagtaatgtacttttaatcaatatcgttttgtttaatgattcaattccttgaaagtttgctactttaatattgttttacaggtttctgttacacctggtggtcgatggaatagattcaagacttactcaactattcaaagaacattggagatttggggttttgttgtacagtttattttcaggacttggttaagcaataagaagttctcttataaaggttgatacttgtttttgtttgcttacgtctaggattaggacgattctcattttgtctaaattcttgaaaaatcatgtgtataagggggaatgactgaagagaagaaggttttaagaaggaaggttttggctaagtggttgaaagaaaacattttgagattaggtcctacatttatcaaaattgggcaacagttctctactagagtggatattcttcctcaagagtatgttgatcaattgtcagaacttcaggtttgatttctttttattctatttgaatttgtacttgtggcctgtgaggctcttcttttttaagttttatgatcttatgctttgcaggatcaagttcctcctttcccttctgctacagctttatccattgttgaagaggagcttggaggttctgttgaggacattttcgaccgttttgattatgaacctatagctgcagctagtcttggtaaacgtctttgtgataatcttctcataaatttgcaagagatgataataaaattaatggtttttgtttttaattcatatagggcaagttcaccgtgcaagacttaagggtcaagaggttgtccttaaagtacagagacctggtctgaaggatctctttgatattgaccttaagaatttgagggttagtgtctctataccacagtcattatagagcttttccatgttgcaagcgtccttatctcgtgattttcttatccgctcttctgaagctatttgcatgatgttctgctgagtcaatgactttgttatgcttctatttaggtgatcgctgagtatctccaaaaggtggacccaaaatcagatggtgcaaagagagattgggttgcaatctatgatgaatgtgccagtgtattgtaccaggtatgatgatgtggtttaatgttttatcacttcttgtgaataagttttggaccattttaccggagagaaaaaggaaaatgattttgattttgagtgtgcttttgttgctaattgtcctttgcatagaagctcagtcaaatcttcctttctgtatcccaacttgagtgacctctaactactgcagtaataacaatgtgctatattttttcaggaaattgattacacaaaagaagcagctaattcggagttgtttgctaataacttcaaagacttagagtatgtaaaagttccatccatctactgggaatacactacacctcaggtattattattacctatgaccattagttcaccatttatgaagccttaagctcgaatgcaatagttatgcattgagttctttgcaggtcctgacaatggagtatgtccctgggattaagattaacaagatacaagccttagatcagttaggtgttgatcgaaaaaggtttgtattttcttacatcttcctcccagacttatatttgttatttctctttgaatccaaaatagtttcgttgttgttgattgataacttggtacaatgcaggctaggaagatatgctgttgaatcttacctggagcaaatcttatctcatggattcttccacgccgaccctgtaagtctctatccttttttttttacactaaagtgtcaacaatctttaatttggtgtaccaatacgaaaagactacaatctaatttgcttatgtatctttctgcagcaccctgggaatatagcagttgatgatgtcaatggcgggcggctgatattttacgactttggaatgatgggaaggtactacattttattatgctacaacatgactctgttagtatgtgaaaaactgcttcggttcaatatggtgaagaaatgtgatctccttttatcaacttgttaaacttatggttctgtacaacgtgttttacacttgcagtattagcccaaatattagagaaggtttgttggaggcattttatggcgtctatgaaaaggatccagataaggtatagtctctaaggtgttctcactttcagtcttctaccgacatgccgcatacgacctgagctcatacttaaatatatatgaattaaccttcttgtggcaggtccttcaagctatggttcaaatgggagtgcttgtaccaactggagatttgacggcagttagaagaacagcattgttttttctcaacaggtaatttacttgatccttgtacccttgcttcttatccatcgagctacctattaaatcattgttacttgtttggtttctctaaagtatgtgtgagagtgtgtgcataatagattccagtagtatccctctgataatatcacttagctgattgtgttacagttttgaagagcggcttgctgcacaaagaaaggagaaagaagaaatagcagcagcagaagagcttgggttcaagaagccactaagcaaggtaatt

SEQ ID NO: 146571 - DNA, 2446 bp, Arabidopsis thaliana landsberg
  unsure (1)..(2446): unsure at all n locations
aatgcttgagagaaacgtttactcatggaacgcagtgatcgcagcctacgtaaagttcaacaacgtgaagaaagcgcgtgaattgttcgaaagtgataattgtgaacgagatttaattacgtacaacactctgctttcagggtttgccaaaactgatgggtgtgagagtgaagctattgagatgtttggtgagatgcataggaaggagaaggatgatatttggatagatgatttcactgtcactactatggttaaactttctgcaaagttaaccaatgtgttttacggcgaacagttgcatggagttttggtgaaaacagggaatgatggaactaagtttgccgttagttctctcattcacatgtattcgaaatgtgggaagtttaaggaagtctgtaatatatttaacggatcgtgtgttgagtttgttgatagtgtggctaccaacccaatgattgcagcttattgtagagaaggtaacattgataaagctttgagtgtattctggagaaatccagaactgaatgatacaatttcttggaatacattgattgcagggtatgcacagaatggttatgaagaagaagctttgaagatggctgttagtatggaggaaaatgggttgaaatgggacgaacacagtttcggtgctgtactaaatgttctgagtagtttaaagagcctgaagattgggaaggaagtacatgctagggtattgaagaatggatcatattctaataaatttgttagcagtggaattgttgatgtttattgcaagtgtggaaatatgaagtatgcagagtctgctcatttgttatatggttttggaaacttgtattcagcttcttcaatgatcgtgggctactcgtctcaggggaagatggtggaagcgaaaaggttatttgattctttatctgaaaagaatctagtggtctggactgcaatgtttttgggatatcttaatttacgtcaacctgattctgtgcttgagcttgctcgtgcgtttatagccaatgagactaatactcctgattctttggtcatggtcagcgtccttggtgcatgctctttacaagcttatatggaaccggggaaggagattcacggtcacagcttgagaacaggcattttaatggataaaaaacttgttactgcatttgttgacatgtattcaaaatgtgaaaatgttgagtatgctgaaaggatctttgacagtagcttcgagagagacacagttatgtacaacgcaatgatagctggttgtgctcatcatggtcatgaagccaaatctttccagcactttgaagacatgactgagggtggattcaagccagatgaaatcacgtttatggccctcctatcagcttgtcgtcaccgcggcttagttctagaaggtgagaaatacttcaagtcgatgatagaggcttacaacatatctcccgagactggtcactatacctgcatgatagatttgtatggaaaggcctataggttagacaaagccatagagcttatggaaggtattgatcaagttgaaaaagatgccgttattcttggagcatttttaaatgcttgtagctggaataagaatacagagcttgtgaaggaagtcgaagagaaattgttagtcattgaaggatctaacgggtctcgctatattcaaatagctaacgcttatgcctcctctggtagatgggatgagatgcaacggatacggcatcaaatgagagggaaggagctggaaattttttctgggtgcagctgggctaatatagataaacaatttcatatgtttacttcatctgacatttcccattatgaaacagaagctatatatgcgatgctacattttgtgaccaaggatttgtcnnnnnnnnnnnnnnnnnngatttaatagacagagaggtatcaattttctgtacataaattatatatcactcacatgaccgaagtgtgatgatctctgtcttttgtgcttgaacggtcaacatttttgttttgtttattatgttgaagtaggcgggaagaaacaagcagcaccagcacaaagtgaagaaaacaacaacagaaacagcatcaggcagagaccaacaacaacaacatcaatataaatcagtatacgaaaaccatgaaacccaaaccacaaagcgaaaccttcgcggaaagaaaacctactagcaagttgcagcagctaatccacacttctccgggagtttctcagcgaggtcaaagctcgatatcacggacattgatactgtctttatgcttacagaggcactggaaatcggccttggacagggcattgcagcaagggcccaagggatcaattccggtggtcattgggttcctagcctacacatagggcttgcaagagttcagacaagtagaagtcataccgcagaagatctgtccggttgctgccgtgagtgtaaaggcaagaaccaag

SEQ ID NO: 146572 - DNA, 1965 bp, Arabidopsis thaliana landsberg
cagtgtgttatttaatgtattccatgcaaacatcaggtggctgtatcagcttttgacaaggatttaattcttgatgttcttgatcatccggttctgaacttaatctactatatggtaagtaacactacatcttcattctttctctttcttattctcattcattaactcgaaaaaaaaaaaactacaggtggtagaagtacttccatcggcactagtcctcttcattctccgaaagctacctccaaagagagtatcagctcaataccatccgatccagtagaaacctttgtcactgaaccatctcacacggtgagtatgatgctgtttaagagaagagtaaagattaaaaaaaagtttggggcaaaaaatgaaaggtgaagaagaaatcggtgtggaatctgcgtgagtttttggaatgcacgttcatataaatgattttacagcttttagttgttgtagcccgccgtgacttttggtttggtagtttatgtctgttaaaattataaattgctcttctgctactttgaaaaatctggtcagtagtacaagaggtttaacatttgttgcgtcgatggttgattgttatgttatgtttggtaaaaaataaacgaatgctcttctccattttcctttatgcttttgtcaactgttacatcttcttctcctaatgatttgtatatacttaagcttttccataaaactaagtcccagtgaagaaagaaactacgtaaaccgagaaaaccaagcaaaaagagggtttacacaacataaaatgattaaattgagaatcatttgcattacctcggtattacatgggctggaaataacttattgggccttggacctgattttccaaaaatggtcgctcacattaatatttatatgtgattttacagtgacaactccacaaatcagccctaactctgtttttgttttcttcgacgactggggtcttttctctctcgctctcgtcttcctcttgattctcttcttcttttctggagtttcgctgcttttttagcctgtaaaaatgacgaaaattttgtatgaatttgtgtgctgatatgctcgaatccacatgttacgcttgtgttgaataatcatatcatttggttatcgaatcaattctagttccaatttacaaaaatctatcaaactctttacgttttctggagtatgttgagcttgaaactagtcacatagatgaaactttaaaaaaacatggaattgttaagtttgtgaaaattggattcgtctttgtgattctttattctttgtctttgctgtgatatataaagattttgtatagaacaacgatttgggagatggagacactgaatttgctgtatttgggattattggcagataaaagattcatacaagaaaaaagcaaatttcgccactgatggatcctatggagtcgtctagtgaacaggtgatgagttcatctctgtcactttaatggcttttactattggtttatctgcttatacaatcaaaatgatatcatggtactgttttagatggtgtttattagcttaagttactgtaaaataacaaatgaaaaaacctctgaaatgaaattgtatttgttgtttttacttttaaaaggacattgttgaagagagtcaaaagctggttgactcattggacaagcttcgtgttagtgctgcgagttcatcttctaatttcaagaagaagcctatcattattatcgttgttggaatggcaggtaataatatcatttctcactaatgttttaagttttggtttcctgtgaagggatttcattagtttgatcatgtgagatgtttgtttgttatatgtgtaggtagtggaaaatctggcttttttcggcagattggtctgtaatacttcccattccaagagccgtggttatgtggtaaaaattgaaactgctgtaatgtctttaccatttggtgcacaacctcgatatagactctc

SEQ ID NO: 146573 - DNA, 2128 bp, Arabidopsis thaliana landsberg
atggctgggtaagtactttatttcttctatcatgttctggattttgactctgtcatggagtttttagttgaggctctaaaccctaagtacgattcctgccgatttcaattccgaagtacaaactaaagtttcaatctttttttgtttgcgtttatatatcaaaattgagctttgtgatttcaatttctccgatgtgaaagttaagcgcgaaaggggttaatttgaaaatctgcatttgggtctttcactgctaggttggggtttttgaagtttccagtcctatgatactttttctcccagaaatgtgcttgaatttcgctttcttatgacatttacaagtattatgctgactctatgttcagcagacaaacatgtttggtctttcaagaaactggagatttagttttgttttctttctttaacctgtatttgggaatgtcactgtaaattgattctgaactgtagatatatgtgtttgatatcatctttctgataattctgctttgtgtagagtatatatgaaacttgtgtcttgactaatggatgattttcttgctgtatgcaggcgatcatggctgatcgatagcaaccggattgcaacgaagattatgagtgcatcggctagttccgatcctcgccaagtggtgtggaagagcaacccgtcaagacattgtcccaagtgtcaacatgtcattgacaacagtgatgtatgtctgctctttcgtttcatttgatgtctagtctctcatattatatttctatgttgttgttgtaaacacaagttttttacatttccaggttgttgatgattggccaggattgcctcgaggtgtgaaatttgatccatctgatcctgagatcatatggcatttgctagccaaatctggtttgtcagggttaagctcacaccctttcattgatgagttcatcccaaccgtcaatcaagatgatggaatctgttacactcatcctaagaatttaccaggtcaggcaatacatgtttcttctttctgttttcagtcatcaaagaagttccaaaaattatttgatctcacttaaattgactatttttaggtgttaagagtgatgggacggtgtctcacttcttccataaagcaatcaaagcttatagcacaggaactcgaaagcgtagaaagattcacgacgatgattttggcgatgtgcgctggcataagacaggaagaacgaaaccggttgtgttggatggtgttcaaagaggttgcaagaagataatggttctctatggcggaaaagctgtgaaaaccaactgggtgatgcaccaataccatttgggaatagaagaagacgagaaggaaggtgattatgttgtttctaagattttctaccagcagccacaacagctagtagtcaagcgaggtgataaagctgaacaggaagtctctgaggatatctttgctgcagtgactccaacagcggatcctgtcactccaaaattagctacacctgagcctcgaaatgctgtgcgaatttgctctgattctcacattgccagtgactatgttactcccagtgactatgtatctgcccatgaggtttctcttgccgaggtaagaatctttgtggttgctttctattgataagtccttgtggtagtctagtgcaagagcattgtgattaccgtaggtggtttgtactggattatagctgtggtgacagttcagtagctattgtagagatggttagctacagagttaactgatgaaatggaagtttaggcggagagagttgcgtattcaggatctttctaaggtttaggactgagattggggtcgagggtggagatttactcattaatctagtataagctcttactgaattgaataaaggagtttgccctcgacttggattatctaacagcttattgaaattgcactaattggcactttttgctttgtttccggtacctaagacatccgaggtaatgtgtatggaagatgaggttcaaagtattcaacctaatcatgaaagaccaagttctgggcctgagctggagcactgacttgaaaacggagcaaaagaaatgttagatgattaagaggagcaagagaaggatagagacaatgaaacccaggtgaggaagatccga

SEQ ID NO: 146574 - DNA, 1352 bp, Arabidopsis thaliana landsberg
  unsure (1)..(1352): unsure at all n locations
cggtgtcttttgaaatcgattataatgctgtgtgatgcagcttcgagagaagaatttattaggtcttacggtgaaataagttacttcacccaaaatcttcactttacacgcttctcagcttttttggtcaattttggcatatttgtattcaaagattgggcatttgcaattgcttgtatctgatgatcaatctcgtaaatgtgttacagacaagaaacaatgtctgggctgctggatggaatccccgaagcagtggctctgagatgcctggctcatgtgcctttacaccttcatcccaatttagaactcgtctctcgctcctggcgagctgctatccgcagtcatgagctcttcagagtccgtaaagagcttcgatcttctgagcatctcctctgcgtctgtgctttcgatcctgagaacatctggcaagtctacagtcccaactgtgatcgctggctcaccctccctctccttccttctcgtatccgccaccttgcccatttcggtgctgtcactactgccggcatgctctttgtcttaggcggtggcagcgacgctgtcagccctgttaccggggatcacgacggtacctttgctactgaccaggtctgngcttacgactttgtacagagacagtggactcctcgcgcttcaatgctcgtgcctcgtgctatgttcgcctgctgcgttcttcaagggaagattgttgttgctgnnnnnnnnnnnnnnnnnnnnnnnnnnatatctggagcggagatgtatgatcctgagaatgacgtctggacatccatcccagatctccaccagactcataactctgcctgctcgggtctagtggtaaacgggaaagtccacgtcttgcacaaaggcttgtccacggtgcaggttcttgagagcgttaaactcgggtgggatgtcaaagactatggctggccgcaaggtccaatggtggtcgttgaggacgtgctttacgtgatgagccatgggctggtgttcaagcaagaaggtgacacgtggaagatggttgcatcggcctcagagtttaagcggaggatcggaatggcgatgacgagtttgagtgatgaggttttgatcgtaggaggagtgatcggacctgataggctcaattgggacatcaagcccttgtcagtcgtcgacgctttgacagttgggaatgatcgtccggcctggaggagtgtggcgcccatgacaaggtgtcgtggcacgatccttggctgcacgcagttgacaatctgatggatgggaatgtggcttcattatgaagtctaacagttcttttttgttatgtattttcgtcctgtttgttaactgttgtgagcactatgttctta

SEQ ID NO: 146575 - DNA, 1548 bp, Arabidopsis thaliana landsberg
gcacggccatctgtttctaccgtgccaagagacagaattactgttgctcacgtctctggtgaagggcagaggcaggaatgccctgtggaaacacattccttgcaattgatcaatcaacctcaagaacagaaaattatgacttggtcttcagaccagattcggggcttcttcgattttcctgttccagatccacaagcagcgagcagcagaactatggtttcatccaaggaagtgctttcaaaatgcgaatggccagactgggcggatcagttgatctctgatgatagtcttgaaccaaattggtcggagcttctaggtgatcctaatgtactcaatctatattcaaaggttcgtttctttcagctaaatatgaatctctacgcttatttcagctaaatatgattcttctattaagactgactctgataatgtcttacagatagaaacacagtcttctgatatagcaaggcaagagatcgtctttagaaatcagcatcaggtggatccatcaatggagccgtttaatgccaaaagcccaccagctagttcaatgacatctaagcaaagaatgcgttggacaccagaacttcatgaagcatttgtcgaagctatcaatcagctcggtggtagtgaacgtgcgtatgccctttttttttccttctcatgcctgcaaagtttagctgaacaacttattattattctcttggcttataatttcaaaccacaggagccacccctaaggctgttttgaagctcatcaatagccctgggttgaccgtttatcatgtcaaaagccatttgcaggttactattctccatctatgttttcggtttgtatgcttacagctcatcttaaacgtctttatattattggcttgtccagaaatacagaactgcaaggtataaaccagagctttccaaagatacaggtacttgaggcatctaaggattcaaactgtcttctcaatatttcacataagcttattatactttggaaacataatggcatttaaaagactcttgtgtgatgaaacacgtctttatacataatcagcttttcttcttggacagaagaacctctagtaaagaatttgaaaaccattgaagatatcaaatctcttgacttgaagacgtaaggaacattttacttctctgtcagaacagactcagtatcacctaggataatatttcttcatatctaagattttttttttttattcttcttcaggagcattgaaatcactgaagctctccggttacagatgaaagttcaaaaacaactccacgagcaacttgaggtataataattcaaactgcctaaaagaagcttttataaaacaaaacagtgtcctttcctcttcatttgtctgatttcttagtttttggttttagctggtgattttgatcttatattggtcttaatacaatgcagatccaaagatcactgcagttacaaatcgaagaacaaggtcggtatcttcagatgatgattgagaaacaacagaagatgccagagaacaaaaaagactctacttcctcatcatcaat

SEQ ID NO: 146576 - DNA, 1250 bp, Arabidopsis thaliana landsberg
  unsure (1)..(1250): unsure at all n locations
acaaaactcaaaccaaggagtgaccgtaacgcatctcagacaaanacaccggagatgagaaccgatcaccgtcgtaactgcctacgattacccatccgccgttcatttagacacagctggtatcgatgtttgtcttgtcggtgactcagcttccatggttgttcatggtcacgacacaacacttcctatctccttagacgagatgcttgttcattgtcgtgccgttgctcgaggcgctaaacgacctctcctagttggtgacttgccatttgggacctacgagtcaagctctagtcaggtaatgttataaaattgaatctttttttcttctagatacctaaattaaacatatttgttgataaggcatgttcttctgcttaatttttgtgtaggtaattagattcttgattgcaatttcaatacctgaattaatcacaacactcagtgggacttacaatgttcaattcatttcctgatcaaatgtttaggtgattggattcttgataaaaaaagtcttaaatgatacattatgtgtcaatgtgtcattgcctgtgtaatcacagatttagctttagtacttgcttatgcaaagtagattctttacaagattttgtgtcaatgaaacaaattagggacctgattttgggtttaaatgttggcttcaggcggttgatactgcggttacggttttgaaggaaggaggaatggatgcgattaagctcgaaggaggatcagcttctaggatcactgctgcaaaagctatagttgaagcaggaattgcggttattggtcatgtgggtctaacccctcaggcgattagcgttcttggtggtttcagaccccaaggcagaaacatagctagtgctgttaaagttgttgagactgcaatggctttacaagaagctggatgtttttcggttgttttggaatgcgttccacctcctgtagctgctgctgcaacttctgccctcaagataccaaccattggcattggggctggacctttctgcagtggacaggttttatttgaaaagtttcgttctttccggttttgtgtgtagccaagagacaaatttgcatttctcatacctgataattgttttcttggaaatgcaggtgctagtttaccatgatcttcttggtatgatgcaacatccacatcatgccaaggtaaaaacctgacacaattattgttttcgaaacgcattctcttgttcgttcgttcgttatcaacatgcatcatgtttcat

SEQ ID NO: 146577 - DNA, 1403 bp, Arabidopsis thaliana landsberg
cttttagccaaactctctctagtctctctagtctctctctctctctctctacttgagagtgccgtctccattttctcaacgtagtcgtttattttgaacaaagactctctccgtttaccaaaggtcatctcttttcttcctccttctctcacttttgattatattttctgacttcctcctcctttctcagaaattctctttcgatcttctctacagtgttgttaacgatgaggaggtgcttctccaaaattactgattgccacttgggtttcaagaattccaacttcttattggtaaatttcccaactttactaattctcacttctctgctacaatgggtttcgatttctcccactcaagttggttgctttttcgaattgatttattcctgtagctactagtatttgcttatatagtgtaaaggttagggatttaagagctgaatgaattcattttgtgttcttttatttagagaatcaatgcttatttggaattcttaaacaggttggttctgaagttggttcaggttcagtaacgagaaccattactactactactagtgagcgtttatttagcagtagttatgcagctcatcaagttgatcagataaaagacaatcctgtctctgacatgttgattgataaatttggtcgcttacatacctacttgaggatatctttgactgagcggtgtaatctccggtgtcagtattgtatgccgtctgaaggtgtggaacttactcctaagcctcagttgttgtcacagtctgagattgttaggttggctggtctttttgtttctgctggtgttaacaagattcggttgactggtggcgagcctacggttaggaaagatatcgaagagatttgtctgcagttgtctagtttaaaagggttgaagaatttggctattactaccaacggtatcactcttgcgaaaaaactaccaaggcttaaggaatgcggacttgattcgctgaatatcagcttggatactctggttccagcaaagtttgagtttctgactagacgtaaagggcatgatagggttatgaaatcgattgatactgctattgagcttggatacaatcctgtgaaagtatgtttattaatccttcttcatgttttctgtttgaatgtagcagaacgatatttgatgttcaagagtttttgcaaatcgttcttggttttgacaggtaattgtgttatcatgaggggattgaatgatgatgagatttggattttttgagttgacacgcgacaagccaataagtccggttatcgagtttatgccatttgatgaaatgttgaatgtgaaaaacttgacctatgagaaggatggataagtggtaggtagaattcttcaatgttagcctttttgagatactcaacttttctgagcat

SEQ ID NO: 146578 - DNA, 971 bp, Arabidopsis thaliana landsberg
ttccactactccaggagaaacaatcgctgtaagctctgtaaaactcaaaggtgccacagcctttgaagtttcaggtatgcggattttgattgaaatggttattagtactggtttttgaagtttcacaacatctataagcttgacaataagtgtatggaatgtgaaagttggagtctttgctgaaacaagaagattcattgatcttgttttaggacatgtggtgtgagtaccgtttttgttcattggctttgaaattattcttttgtctcagggactcctgtggactgcatctcattaggattatctggagcgctttttgcttggtcaaaacctatactggttagcattttgacaatcttatcatttgactgtatgacaatttggtattttttaatttttgtatctgtgcctttgcttattatcttcaggtaattagtggaattaatcagggatcaagctgtggccatcaaatgtaagtgcatttatcttgtaaataagtggttattccttgtctggtcgtttcctctgtgtttcctgatttgagaatcctccaggttctattcaggtgcagttgctggaggcagggaggctttgatttctggggtaccctctttgtcaatatcgttgaattggtgagtatatcgtggaaatgcctgctgctacatgtttggatttgttggcaataatttttcgtatcgattataggaagaaaaatgaaagccaagaaagtcactttaaggatgctgttggtgtctgcttacctttgataaacgcaactatcagagacattgcgaaaggagttttccctaaaggctgctctctcaacatagaaattccaacatgcagcctcatcaaacaaggtttgtattcttaacataactcgtctcagaaacagatatttggttcgatttttgtatgctaagaacatgatctatgcttgcaatggttactatattctttgatgttgtgaa

SEQ ID NO: 146579 - DNA, 375 bp, Arabidopsis thaliana landsberg
catgtgtaatctgctctggacaggcttgttatctaatcaaaacgaaagtgcagacacattattgtgtcttcttgtttatatatcttcccaagtatgaacaaattccattctttcaatggttttagggttctgctagctgtaacgattgcaaaggcacggggtttcgtgccaagtggctggaaaaacctccagtgccaacatatctgatgaacaaaagcaagttaagctttttggtctttgatgatttcttatggaggaaaaatgtttatatattgatacaagtggaacatgaatcacatatgcctatatctttatacatgtgttaagtatatatatgtaagttcatttattcatttccccttgttctgtctggac

SEQ ID NO: 146580 - DNA, 925 bp, Arabidopsis thaliana landsberg; identical to SEQ ID NO: 41334

SEQ ID NO: 146581 - DNA, 4584 bp, Arabidopsis thaliana landsberg
aaacattggaaacaagaattctcttacacatgtatcggtagttggaaatgccgacccaaaaggaccaaaactcaccattatctcaagtgatagagcttctcaagaaactactccaccatttccacaatctccttttgtatttcttcatcctctggatcggcgtgatagttggaatcattgtttatccctctctacaaggattatcttcgccttcttcgttaaccatccaaagtgtctcccaactcttctttgtaacgcctctgctcctattctttctccttcatttcaggacaatgggcttgacatgtttctgataccactgaagaacatcatgcacgatatggaagataatgaacttctgtggagagcttcaatggatcctaagatcagggattacccttatcctagaatcccgaaggttgctttcatgttcttgacttggggacctttacctttggctcctctatgggaaaggttctttcgaggtcatgaaggtcttttcactatctacgttcacaccaattcgtcttacgacgagttcatgccgcaaggctctgtgttttatggccgccgtattccaagcaaggtcagcttcccaaattattaagaaatttatttcgatacattaataggtttggaattaacgtgataaataaaatttatagatatattataaataatatatatatatatatatatatatataacggatcgaagtacatgaatacgatatttttcctatcttttttagtaaattacataaaaatataagaatatttggtatcttaaaagaaaacatattaattattacactataatacataaaataaaatcaatccaacgtcattaattataaacgtatgcagagagtggattggggaaacgcaaacatggtagaagcagaacgaaggttattagcaaacgctttattagacatcaacaacgaacgtttcattcttctctccgaatcatgcatccctctcttcaacttctccacagtttactctttcctcatcgactccactctaacccacgtcgactcctacgacctcacaatcggtcgcgtccgctatgaccgccgcatgtatcctcacatccgcatgcaccaatggcgaaaaggctctcagtggttcgagctagaccgagccatggccctcgaggtagtctctgatacgttctactggccaatctttaaagcttactctcgctgccccgacgagcactatatcccgacgctactcaacatgaggccaagcttgggttacgtaacgcgaataggacgcttacttggactgactggagcaagcgtagggctcacccgagattgtttggtgagtgggaggttaatgtggagttcttggagtggctaaggatgaagagtgttgatgattgtaagaaaaatggagaaaataagatgaaactttgctttctctttgctcgcaagttttcgtcgactgctttggatgagttactccggttagcatctatcgtcatgtatttctgatcactctcttcccccttcgtccaaaaacaaagatgcaatcggtttaactacaaatcttctttaagtaagtgaaatatacagtgtgtgcttaacaagttactttcagtactaggcatgtgagattaatcaaagtccttgataaagttaggaactagcctgtcatcaagttataaacagaagataacttgagaaacattgagaaaacacaaaagcctgaccccccaatctcatttggtttagtcctccattagcatttatgagaaggtatccattcatattagcacctaactctgcagacaatgtatactcatatggtaagaacttatagaagagaaaaataggaaaagaaaaaaaagaacaaattgctactaataggactaaaagttttgcctagacacctgaatactcaaagaagaataaagtcatgtcagatatttaatctccttctcccatcttcttaagcgagatagaagctaagccacaaatgtttaaccaaagaaacacttgaaaacactactaccaccaagaaatgtgaagaagatcttaattaagcagctaaatacacatccatttttgggcaacactcaaaacgcaatttatcaagttgtagaaacagaaacaaaggccaaacacatataaacaagaccttctcaagctagaagccacaaatgttcgaaaagagaaaaacaattaccaatagaaacgtgaagattttatcttaatcaagcatgttctagtacgagaaacacctaaaaatagatgataagtaggtttttacgcctacttatgtgctgaagtgtggttcagttcaattctccttaaacactaacatgtcgatgcagctatagggggtgtcaatccagtccactgttattgctagcagtcaagatgtatacagaagcaactaagccaagccagattataatgatggtgggtttctagtaacaatcctaaatcaagattcaaacaacaaaaatgagaacttttaagtgccctactcgatcacagggtcgagcagaaccatacatgcaacaaatttaagtactgaaatgcaataaaaggtaactcaacaagatgacacaaataacaggtgaatagaagtgcaatcagggggtgaatacaaataaatctaagaagaatagaagtcctaaggatggattcattgataagggcaactttagtgttcatcgggtggctaactgataacactgtattttactcattttaggtgtatgtttatcatcatttagctatgcatttgctcattgtataatatcattttgcatcattttatcttattttgcatacttaggcatttaggatcaccttgcattcgcattgcatgttttggtgtgttttcaggtgcagaaggagctaaaaaagactctactcgatccattcactcgatccaggcagcaacagaagaggcatcattctactcgacctccttactcgatccatgatgctacagaggaggctgcagtttactcgaccctcttactcgatcaacctcagatgaagcagcagattgatctactcgcccatcctacttgatccactactcgatccatttactcgaccaagggtgaccatctctacaagacttgttgagctatcaaagcgtcttcggatccttgataataggattttaagtcaattaatcctaaagcactatcatgtcgttgtagtacttagggtgtcaatccaaatgggtgtgatgcaaacagatgagatgtgatcagaagtcactaagtcaatccaagcaataacagttttggggtttctaacagtcctaagcgaacatgcagaaaagagaaacaataacagaattactaaaatcactcgaccacaacaggctgatgccagaagtagaatgtggtcgagtaacagacaggatatgatccagctttactcgattgcacagtctgttgccagacactgggtgtggtcgagtatactagtcgagtaggggacaggaaatgagacaactgtactcgactgcacagtctgttgccagacactgggtgtggtcgagtaagttggtcgagtattgcaaaaactaagaaacaagcaatgagaacgattaagcgataacgataaaacagagaaatcaaatagacgagaaattcctaaggatggggtaatcgaatagagtggtatcctagcctatccgaatggttaacaagcgcaatcaagctatccctagacaacaggttcgacaacagatcaattcactcccatgatagaaatcctcaagcaaagctagcccagactaattcccattaacggaatctaactatacaggcaataaaaattgactgataaagtcaataaacgctctaaacggccaatcccttgggatagagacaaatatctcaggaactagtggatcaagcattccatcgaacaccttctgggtgcgagaatgcttgggatcgaattccagtaaacacaactagtcctgaagggattcaatcaattctaaaacttaaccattctactgactaaggattccacaaccattctatcccatccttaagaactctatgtcactacttagacaacatgctcaaagacataaacgcaggtaaacaagtatattgcataagtaaatagataaagagtatagaaacaacatgacagatgaaatcaaatgcggaatctgaataacttggaaaaatctcgaattacaggttgcagaagcaaaagccacgtagccagagtaaaacagaaaataaaactgaagcaaaaactcaatgtcgattagatgtctccggataaaaccctcagacacctatttatacaaaacaaaataaaatgatagtagacgggccggtaacctaatcgcccggcccatagagtgataatggaccgagatgggcttcgtgatccgatggagctctaggtcgcttccaaacacttcttcttctccttttctcttccttgtgctcagcttgtctggttgagtgcggatttgagtagactatgaagatgtgatcgagtgcttggtcgagtgatggtgtttgtggtgagtgatgatactcgaccaggggtcgagtgatgtggttgagtgaacggaa

SEQ ID NO: 146582 - DNA, 1376 bp, Arabidopsis thaliana landsberg
agattgttggaagcaggcattgtttgttattttgctcctccccttgacctttatgagtgttatcatatttttcagagaatgaaagagttacaatctagtgagccggaaaagaaaatgcttcgcttgggcgtagagacaggaggatgttctggtttccagtataagtttgagcttgataatagaaccaaccctgatgacaggtactctggtccactttctattagaatcaagatttgattttggcttagttatagctgttcttgaatattacagggttttcgagaagaatggtgtcaaattggttgtcgataatgtttcatacgacttggtgaaaggtgctacaattgattatgaggaggaattgatccgtgctgctttcgtggtaaagccctcttttttcctttttgcatcttttcaaggcttataatctcaatagtcaccatcttctacactttcttctcatcattttgcttagatagtctatataagcatttgtgtatgctttgcctgagctgattggagtccataagcctatgattcttaactatcatttgcaacgtgtcttccttatgccctgtgtttttgaaaaggagacaagacataatcttgaaactgcatgttggtttaagtaaccattttaagattttcatttgatttttaatgctttggtgttcaggtagctgtaaacccgtccgcagtgggtgggtgcagttgtaaaagctccttcatggtgaaactctgaatcattgactcaactttcttctttacatggactagaaaccaaatttgatcatttgtttattacatgtataatgtcagaagttttgctatgtatcaaaaaggcataactagggaaagatacaaaaactctgtaggcttctagctcaacaaatgatttgtccatcctatttttaaacaataatggaaagatttatacaaagaggaatcttgtatcttctcttaatttacacaacagttggtctgtacatgctcttgatcatacttacataatctcaaatcacgagtccagctgatgtcagtgagtctttgtgagtacttaacagagaagagcgattcaattcctttagttttcccctctctaccaagaacactctctgcgccatcatcactgtctccagtctatgtgcaatcactatcacctgtgaatgcaaacataagagccatggaaccaggaagtttttgaataatatcagtgatgattcaattaaaaggttgttttagaatggaagaatcggatgtgtgcttttaccgtatggtcttgcattacacgttcaagagcttctctgactagcaactccgacaaactatccaatgctgatgttgcttcatccaaaatcagtatggatgatttctga

SEQ ID NO: 146583 - DNA, 1082 bp, Arabidopsis thaliana landsberg
  unsure (1)..(1082): unsure at all n locations
atggcggatttgttaagaaaagtgaaatcgataaagaagaagcaggatcagagcaatcatcaagctctgatccttggcaaatacgaaatggnnnnnnnnnnnnnnnnnngaaccttcgctaaagtctatctcgcacgaaacgctcaatctggagaaagcgtagcgatcaaggtaattgacaaagagaaagttctcaaatccggtttaatcgcacacatcaaacgcgagatctcgattctgcgtcgtgttcgtcacccaaacatcgttcagctattcgaagtcatggcgacgaaagctaagatctatttcgtgatggagtatgttcgtggaggtgagttattcaataaagtagctaaaggtcgtcttaaagaagaagtagctcgcaaatatttccagcaattgatctctgctgttactttctgtcacgcgagaggtgttttatcatagagatctgaaacctgagaatctttagttagatgagaatggtaatcttaaagtctctgactttggacttagtgctgtctctgatcagattcgtcaagatgggctttttcatactttttgtggtactcctgcttatgttgctcctgaggttttagctaggaaaggttatgatgctgctaaagttgatatttggtcttgtggtgttatcttgtttgtgttgatggctggttatctaccgtttcatgatcggaatgttatggctatgtataagaagatttacagaggagagtttaggtgtcctaggtggttttctactgagcttacaaggttgttgtcgaagcttttggagacgaatccggagaaacggttcactttccctgagattatggagaattcttggtttaagaaagggtttaagcatattaagttttatgtggaggatgataagttgtgtaatgttgttgatgaggatgaactggagtctgactcggtggagtcggatagagattccgtggcttctgagtcggagattgagtatttggagcctaggaggagagttggagggttgcctagacctgcgagtttgaatgctttcgatattatatcgttttcgcaaggttttgatttatcggggttgt

SEQ ID NO: 146584 - DNA, 977 bp, Arabidopsis thaliana landsberg
aaatctctttacatgctcaacacacacgtctttgtgacttaatataaatacacaacacacacgaacacgaatctttaagcttcacagattctaaaaacatctctaaaaatctaaactttaaccttttttctcggaacaccacaaatctcatttttagctttttccgattccaaatctttttgcttatttagtcttcttcaagaactcgatttctttcgcgtttatgtcgacgacgatgaagagacagggctgcagctcagattccggtgatctacggcggcacgcagtcgtctacaaaaacgacccccggcgttaaaaatcgttccggcgactccggcggcgaataactggaatacggctatacctctcctctcgccgttagctctttctcccgaatcatcaccggtagaccaaccaccggttgagaaaaatcagtcgacggcggtggcggttgagaaaacgccggttttcaagaaatggcaacatcccgcggcgccgttttattacgagtcatcgacgtttgttccaccgtttgttccggtttagtattggtttagagatccaacggttcaaaagtacagtttgtttgttttttgattctatgtagatctaacggcccagaaaacgcgttttgtgcgtttctactattttgtggttggaacaaactcgattttcgtaaagaatttaataaatcaaaagattattaaattaataagcatgtttctgttactgtttttttatggtccgaaatgtaaaagctaaagtccaatttagttattgtggatgtttatgtatataagtgtaacgttgtgaaatgtgtgaacacaagattaatgtagccaaaaatgaaatacattattcattaaaacctctacaaattaataatgttgagaccaatttcttttgttaatttatagtgaaatgttactaatttatagagtctgttttttctttttttagccatcaacactctcttt

SEQ ID NO: 146585 - DNA, 1154 bp, Arabidopsis thaliana landsberg; identical to SEQ ID NO: 35818

SEQ ID NO: 146586 - DNA, 1851 bp, Arabidopsis thaliana landsberg
cttattgtttttttttctctcatagtcgctctccctttgagaaatccctaactctttcctcttctcttcccggcgatctatctctccgatttgggtattgaaatggcaactcctatggttgaagatacgtcaagcttcgaagaggatcagcttgcttccatgtccaccgaagatatcactagagctactcgtctcctcgacaacgagattcgaattctcaaggttcgcccgctatatctctctcgatctcccttgcctttttatcgttctccatgattgtatcttagtacttcttaaattgggttcatcaatcgctttcattccagtaaggtcaggctcgaatctggtttcgatttttcgcgattacgggtttagggtttgagtttcgtgtaatccgtggaagcaggagatgaactagacctttaattttatgacccttcttgtgatttcttcgtgtgttttcaaagtttggatttttcaactcaattgagattgattgaattgaaaagctacgtctttcttgttgcaaattggatatgttgaaattgctcatcttgtgtttttctttgatggggatttaggaagacgcgcaaagaacaaatctagaatgtgattcttacaaggagaagattaaggagaatcaggagaagattaaactcaacaagcagctgccttacttggttggcaacattgtcgaggtattcaactagttttcttatcttatttttggtattttcctacagagtcttacctatttgatttgaattctaactgttgtgttaccatatcatgctattagattttggagatgaatccagaagatgatgctgaggaagatggtgcaaatattgatcttgactcgcaacggaaaggaaaatgtgttgtgttgaaaacgtctacacggcaggtgagacttccaaacccattctttagatatgttttctacatcttctcttccgtttcccgtttcatgtctgagcaaatacttttgttttcgttatgtggactgcagaccatctttctaccagttgttggactcgtggatcctgatagtttgaaacctggtgacttggttggagttaacaaagatagctacttgattttggataccttgccatccgagtatgactctagggttaaagccatggaggtcgatgaaaaaccaactgaagattacaatgacattggaggactagagaagcaggtatgtttataccattgtgttaatctgctgtattgactttgcttcgtagtgaaactaattgagtttatttctggaacagatccaagagcttgtagaggcaattgtgcttcccatgacgcacaaggaacgttttgagaagctgggtgttcgtccaccaaagggagtgctcttgtatggtcccccagggactggtaaaactttaatggctcgtgcctgcgcagcacagaccaatgccaccttccttaaattggcaggccctcaattggtccaggtatatatatatatatctatatatatatatatatgagtatcagattcaattctcatctcttagaactctttaccctgtctggatataagattttagtgttctggcaacaataattacatgtgacgagctacaatgatacttgattgtaatgacatgatgacatatccaatttatatacagatgttcattggagacggagcaaagcttgtccgtgatgcctttcaacttgccaaagagaaagctccgtgcattatcttcatagatgaaatcgatgccattggtacaaagcgtttcgacaggtacaaatctttttctgattccaattcatgtatttctgcactttctcagctatttgctcaaatcacattctttggtt

SEQ ID NO: 146587 - DNA, 1375 bp, Arabidopsis thaliana landsberg
ggccgaataaaaaacatcattcggcaagttcatcgatccacgaataaaaagaaacgatgaggcttaatggggattcgggtccgggtcaggatgaacccggttcgagcgggtttcacggcggaatcagacgattcccgttagcagctcagccggagattatgagagctgctgagaaagacgatcaatacgcttctttcatccacgaagcttgccgcgatgccttccgacaccttttcggtacaatttttccgacaccaaaccaaacaacaacaactgtctactttaattgcttcatcgttattgtccaattaataactaatttttatcactcttaggtacaagaatcgctcttgcttaccagaaggaggtaatatacactaaattatatttgtctgagtttccatgagatttttgattatttgtttttattgtttttggatagatgaagctacttggacagatgctttactatgttcttacgacaggttcagggcaacaaactttaggagaggaatattgtgacattatacaggtttttgttactttatacaatcttccttaagtgtgcttctacaaaaccattttaccttctgatgtagaatgatataatataggttgcagggccttatggactctctcctacaccagctagacgtgctttgttcatattgtaccagaccgcagttccatatatcgcagagagaattaggtttcgtcgcatttcttattgttgttttacaaagaaaaatttgaatcttgtccgctgatattgatataattgtctacagcactcgagctgctacgcaagcagtcacctttgatgagtctgatgagttttttggtgatagtcatatccactcaccaagaatgatagatcttccatcttcatctcaagttgaaacttcaacttctgtagtatctaggttaaacgatagacttatgagatcgtggcaccgagctattcagcgatggcctgtggtaatgtatacccctcacgtttaattttccatggttcgttcacttgttttctgcgtagcaaatgttgttttatacaaggttttgtgccttttaggttcttcctgttgcccgcgaagtcttacaactggttttgcgtgccaatctgatgctcttcaactttaaaggtgaattttgtgagaaatatttaactcatgtagagcatgttctgaactagtaacctttgtttcttttcaggtttttattgtcatatatcggaacgtgcatccggggttcgttatgttttcataggacagcaactgactcaaagaccccggtaatggttcttttgtctaaatttcaaaaaacaactcttgacttttactatcacagagaaactgaactcccttgaatcttgttc

SEQ ID NO: 146588 - DNA, 1700 bp, Arabidopsis thaliana landsberg
ctttttttaaggctcttcaaaaatctccgtcaacgtcgagaacaaaatttggagaaatcgaacagacgatcgagatcgaggaaaatggcgtcgtggaattcgattccgctggagatctcgtacgaaatcgttggatggatcgcgtttgcttcatggtcaattagcttttacccacagctgattttgaatttccgtaggagaaggtaatctaatctaccttttgttcttgagattttgtttctatatctgtagttgaaattgaaattgatgaaatcttggttgtgtttgggaaagtgttgttggattgaacttcgacttcgtgatgttgaatttgacaaagcactcgtcgtatatgatctacaatgtctgcctctactttagtcctgttattcaaaagcaatactttgacacttatggcgataaagaggtttgtttcctctttctctctgttattcattgaagcatttaatgaatttgattgcggaatctagaaatgagttttgtttggattctaatatggttcttgttggctcttatcttcatggttacaagtttacctttagttcttagctaatgaagtcaacattgaagataaaattttgttcctttctaagtttcagcaacaaaaaaaagctttagattgttcgagctggtttagtttttagacgttttgttataattgttgcttatttcagatgatacctgtggctgcaaatgatgttgcattctcgatccatgcagttgtaatgacagctgttacactgttccagatatttatctatgaagtgagtaatcatgtttcttaggcttgcctttgtctctttatcccatacaagtgttctttttttcctgatggtttccagtgatttactctcgcagcgtgggcctcaaaaagtatccagacttgcgataggtattgtggttgttgtgtggggatttgcagctatctgtttcttcatagcattacctacacactcttggctatggctcatttcaatcttcaagtaagttgttgctcaaagccttctgaaccaattcttttagtggtaatctaacagttttgatgataatggtttatttgttcattgttatagttcgattcaggtcttcatgacatgcgtcaagtacatcccacaggtcagaaaagattccaaaccttaatttttttcattattgattgaatctgcattactcagattttatgtgtttgcttcacaggcaaagatgaacttcactaggaagagcacagtcgggtggagcatcgggaatattcttctcgattttactggaggacttgctaactatctgcaaatggttatacaatcgattgaccaaagtaacaatctcttctctatcacatcaatagcttttgttttctctgataataacattttgaaagaaaactaaaactatctatttgctttggttcttccagattcttggaagaatttctatgggaacatgggaaagactcttctctcacttgtaagaaaatttatggagtttttttttttggttcaattctctctctgtctctaataaacgtctcgatttttttataacagatttcaatatttttcgacatcctcttcatgtgtcaacactatgtgttatacccagagaagaaagtctcaaaatctccggaaactagtgaggaatcgaacgaaccactcattgattcttctcatgaacatgtttaa

SEQ ID NO: 146589 - DNA, 1575 bp, Arabidopsis thaliana landsberg
agcaattttccggttaacaaaaaatctcaaactcagtgagtgagtcaccgaaaacctcttgtagtagattcgtgacgggtttgatcatctcttcgaggtcggttctagggtttcactacgagaatggacggagatgagctcaccgagcaggaaactgctctttatgaccgtcaaattagggtatggggagctggtgctcaaagaaggtacttcacattgaatctaacttctatggcttcaagcaacaacaagttattgattttccgtttgagtactaataaactcttcttgttgggctatactcggtgaaagtttatctctttctgggttttaagcttttttagctgtttaaattttgattagggcttctatgaattttggtttgtgtttttgcttgcagattgagtaaatctcatgttttggtatctggaattaagggcactgttgctgaggtacctcttactttatgattttttcgttatttagtgattctctattagctatgttgcagtagagtgttggcatcttacttggtttcctccatttggtgttgcagttttgtaagaacattgtgttggcaggagtaggtagtgtgactctgttggatgatcgattggttacaacggaagtcttcaacgcaaacttcttgattcttcctgatgaaaatgcttatgtaggcaaaaccgtagctgagatttgttgtgattcacttaaggattttaaccctatggttcatgtttcaatagagaaaggttactcctcctttcttcatttctctctaattttagtagaaacaaatgattttagtaacatcgagtctatgtcttcaatttcaggtgatttgtcaacacttggtgttgattttttcgagaagtttgatgttgtggttatcggctacagttctcgtgctactaaggtactgttgatacctccttcttttagttgttccagttgtttttgtcttttgttgccatgtagattgatcacttgaaataatgtgctttgttatgcagaaagcagttaatgaaaagtgtaggaacctagcaaaacgtgtagcgttctatacagttgattgtagaggctcatgtggcgaaatatttgtcgaccttcagaattataagtacacaaaggtactcatctcgtttttttcttttgacggttgtatatcacatgcctttcttttggcatataatgtgttaactttctttctctattgtcaattttggcttcatagaaaaagcttgatgaaacagtggaatgtaaactaacatttccaagttttgaggtacaacaaacttaacttcttactttcctggaacatactttcgcatgaaaagtaatagaaattcaatctattaactggtcttatttctccaggagaacagtttcagtaccgtggaaaccgatgccaaggagaacagcaaagctctactttgcaatgagaggtctggctaacactaacagctaaccttttgaaagcttggtttcttcctacgtaactaatccggttttgtgatattcttgcagtgatagaactatttgaggaaactgaaggacgtaaacatggggaatgtt

SEQ ID NO: 146590 - DNA, 1006 bp, Arabidopsis thaliana landsberg
atggagaaagagatggaagataaagaagaattcgatgagggtgagattgagtacacgagttatgctggtgagcatcatctgccattgattatgtctcttgttgaccaagaacttagtgaaccttactccatctttacttaccggtacttcgtctacctctggccgcagctatgcttcctggtattttgacactcagctttcgattatcgttgctttaccctcatgatacttatgttttgatggatttatgagtagcatttgttttgtttcttttaataggcctttcacaaaggtaaatgcgtaggatcagtagtttgtaagatgggggatcatatacagactttcatagggtacatagctatgttggttgtgattaaaccatatcgtggccgaggcataggtaatacttgagctagtgcttcctaacttcttctagaatcagatttctgactgtgggagtaggtgtttgatctgcgtgcaaataacatgcctctcttaaggttcgataattttgtgtgctgacttgtcattgtttttttacagcctcagagcttgtcacaagagcgataaaagcgatgatggaatcaggctgtgaagaggtatgctgttcttgcattctcacttctctctttattcccactttggagaacttagatatttggtagcactagagtgatatcctttcctggtagtataaatgtagataagaccttatgaaccaccttttccggaaggttataagtccattacatgtcctgaaatagtgcctcctttttatctactagaatagaatttcatagctgaggtgatgtagctgcctttaatcattgcaagtatacctattgcttttgattgtttagctaactgtgtgtgtaagtttagttccacgtataaaagtagttaatcatactcctaagagttggaacttttcgatattcgtttagttactaattttgtagtggaaatcaaaatcccagtctctcacttcctatacatatgttgtata

SEQ ID NO: 146591 - DNA, 4078 bp, Arabidopsis thaliana landsberg
  unsure (1)..(4078): unsure at all n locations
atggtggtgagtggtgacggactgtggtgtgatggtggcggcagtgacggtggctgtaatgacggcggcagtggtggtgatgactgtgacggctatggtggtggtgacggcgacagccgtggtggtggtgacggcggcgacggtagcccgtggtggtggccgtgttatgatttggtggtggttgatggtgataatgatgaggacaaaattgtaaataatatacattacacacaaaatataatgaaagttttttttttaggttagtttcttaatttataaatttttgttggttatacacccatatttccctaactaaatactcttttaaaccggcgatataccattctattgatgaatcgattcacgtcaaattttgaataaattctacccaaatcttcttcaatattcaacctggttttgaaaatttaacatttctcctttacaagataatgaaagaaagccaagatatatcatttctctttttaaccgaccaacattcacatcgggcttttggaaagccttaagaaagaaaaacattccaacaagaaacttgtttacaagcccccttcaagtcacacagagttggtccattaacaattttaagtattgtagatttgattaatctatgttaatcatgtccaatgtccatattgttagataaaagaaagaaaaaaaatcattaaaaacccatagattgtgtgaagaaaccaaaaaaaaaacatcccataaataagaagatcccttaacagcaaggttagaaaaaaaagatcagagtcctttggattcttcaattgcttagtctcataaatccccaaaatctctccacccagttggatttgcagctctctcagattcatcagtttcttgatctctttgttatattcaatttcacgaagattgtatccagagcagatgggtctggaagcttctttctttctcagtgatttcgatcgttccatggaccagacgtacgatgcctgagctgcgtagcaacgcacgcagagatcgggataagaagaacccgaagcannnnnnnnnnnnnnnnnnnnnnncacctgttaggagaaatccgaggcggcagctgaagaagaaagtggtggtgaaggaagcgatcgttgcagctgaaaagacgacgcctttggtgaaagaggaagaagaacagattagggtttcgagtgaagataagaagatggatgagaacgacagtggtggtcaagcagctccagtgcctgatgatgaaggaaacgctcctccacttcctgaaaaggtgtcaactttattgttggttctgttgtttttatgaggttttagttcatcggaattgtctcttgcattgtgtgttgtgttttttgattaggagaaagctctcaaacttaggcatgccacttaaagttaaaactttctcttgtaagatgatttgattattgactccttggtttttacaggttcaggttggtaattcacccatgtacaagttagatagaaagctaggcaaaggtggttttggacaagtttatgttggtcgaaagatgggcacgagtacttctaatgctagatttggcccgggagctttggaggtatgctgtttgtgtttgcaagtttacttgctttcttttggttttctgtgatctgtaatgtgattttgatgtgtccacttttgtaggtggctttgaagtttgagcatagaaccagcaaaggatgtaactatgggccaccgtatgagtggcaagtttacaagtgagcgttatggtctcttgtctttggctctaggattcatcttctgcttgttcaaatagtttgtttataaaaggatgagataactaatgtatgctttatcatctgttcgtccagtgcacttggtggcagtcatggtgtgccacgagttcattttaagggtcggcagggcgatttttacgtgatggtatgtggaatttagtcaggtctgaacaagagcacttgcagtatgagtaattactgtttttaatctttcatacaggttatggatatccttgggcctagcttatgggatgtttggaatagtaccacccaggcgtaaacattcactctgagaaacatttactttattttgtagcatctgaagattttgttatataaaccattgataaacataatttttcctgagatgagcccttcaatattggtggcactcaccatatgatttgtgtgttttatacattccaggatgtcaacagagatggttgcatgcattgcaattgaggcaatatccatattagaaaagatgcattctagagggtaattttctaatatttctgctactgtaactctctttcttcaagtggtttttatttgctaagaagcagtgctcctgtttctacagatatgtgcatggcgatgtaaaaccagagaattttctgcttgggcctcctggaactcctgaagagaaaaaacttttccttgtagacctcggcttaggtacactttatttttgttataagagtgagcgtactttattgtctttctgctgcttatccaatctgttgatcttgcagcatccaaatggcgagatactgcaactggactacatgttgaatatgaccagcgtcctgatgtttttaggtaagttgattcagctaggcataaagcctgtgagattgattcttatcagcgacttcaactttagggtacttattaacgtgttggctttttcattttcagaggaacagtacgttatgctagtgtacatgctcatctcggcagaacttgcagtcggagggatgacctggaatctcttgcttacactcttgttttccttcttcgaggccggcttccatggcaagggtaccaggttggggacactaaagttatttgttttatttcctggcaactttccttgtcaatcattaacttggtctatttgttagggagagaacaaaggtttccttgtttgcaagaagaagatggccacttccccagaaactctttgctgcttctgtccccaaccttttcgtcagtttgtcgagtatgtggccaatttgaagtttgatgaggagcctgattatgctaaatatgtctccctttttgatggaatagtcggcccaaacccagacattaggccaataaatactgagggtgcacagaaggtgatttggtgatcttctttatgaaacatatattgaggtttactatttagctccggtctgaatgtctaaagttttttcgtgtttgtctggtgtgaagctcatacatcaagtgggtcaaaagagggggaggctgacaatggacgaggaggatgaacaaccaacaaagaagatcagattgggcatgccagcaacacaatggatcagcatttacagtgctcacagaccaatgaaacaacggtgacatcttggatcatacttgagaattcttcggctgtacgttgatgaccatgcagctgacatgtcttttatctttgtgcagatatcattataatgttactgatacaaggcttgcacaacacattgaaaaaggaaatgaggatgggttatttatcagcagtgtggcttcttgcacggatctctgggnnnnnnnnnnnnnnnnnnnnnnnnnnnnnnnnnnnnnnnnnnnnnnnntatcaccaagctttctccacaaggtagcttcatttaatattctggggtagtcatttgtcatgtctgcactgctgctatcacttccattttatgatattctccaacttgtgtattttaccattatttttcatctcataggaatggattatggaacaatgggaaaagaattactatattacagcagtggcaggagcaaatagtgggaactcattcgtggttatgtcaaaaggtattcttgttttactccttttgaatgcaggtgtaacagttatttccgttttatctctgtatcacagttttcatcatttgtattcagggacccagtatttacaacaatcctacaaagtcagtgattcttttcccttcaagtggataaataaaaagtggagggaagggttttatgtcccatccatggcaactgctggaagcaaatgggaaattgaaatgtctcgtggggcttctttttctgatcaggtctgtgagtt

SEQ ID NO: 146592 - DNA, 1744 bp, Arabidopsis thaliana landsberg; identical to SEQ ID NO: 37258

SEQ ID NO: 146593 - DNA, 1337 bp, Arabidopsis thaliana landsberg
tgttcttggatcattaagacacaagttcaagcatcaactacattgtcgtttctagaaatactgtcaaagattccagagattggtgctcgaggtttatacaaaggctcgattcctgctgttgttggtcaatttgcaaggtttcatctcttatgctttgccttgtggttattggttataagcattatcatgatttcatctcttgtttaaacatttttcagccatggtttacgaacaagtatatatgaagcaagtaaacttgcgttaccgctcgttgctcctactcttcttgatattcaagttagttattgtaaaaagctcattgccaactttattgctacataatgtttcgttctttgaatttttttgcttcttgattattttaggttcagtcaatcgcgtcttttattggtacggtattggggacaacgttgcgaataccgtgtgaagtgttgaaacaacggttacaagccaaccagtttgataacatagtggaagctacagtttcgacttggcatcaagaagggctcaaaggactctttcgtgggaccggtgttacccttctacgtgaggttcccttctacgttgctggcatgggactttacaaccaatcaaagaaggtaatcatggtagaacagaacaatgacatgtctttgtgtaattaatatgacgtggttgcgattgagtttcacaggtggtggagagacaattaggaagagagttggagccgtgggaagccattgcggttggagccttgtccggtggtttcactgcagttttaacaacgccattcgatgtgattaaaacaagaatgatgacggctccacaaggcgtggaattgtcgatgttgatggctgcttattcaattctcacacatgagggtcctcttgctttctacaaaggagctgttccaaggtttttctggactgctcctctcggagccttgaacttagctggctatgaacttcttcaaaaggctatgatcacacctctgaatcaatcagtgcatagtgagtaagattggaaaactagaccaacattttgtgtcataataatttatttcatgtttatgtattctaaatcttgaaaaaaaaaatgtattctacaaaaataacataatttacttttttttttttttttttttctcaagtgtagtattgtattaaacgtaacccgatcatacacaggctatactaaaagccccacgaaaagtttacagcatactgcataagaaaatttgtttgtactccacctaagcccacgtgtcagcaactggatacaaccacgacacatgctggatgagtaatcgaaagatttccgacatcaaccttcgccgttga

SEQ ID NO: 146594 - DNA, 1095 bp, Arabidopsis thaliana landsberg
aaagcaaaaaaaaagcagcagcgaatttttatttctctcctcccagaaccctaaacccattccccaattcgatcgagaaactcgacaatcgaagaatttatcaggaaattttgttttttttattccgattgagttttctccgaacaactacttagctgaataatggtaagtttttttggtctgatcttgtttccgtttaagctggattaatctatttctctctctcgctctgaattattgtaggagtatcttgaaattctagtcagtcttgttcgtttgtaatcgaattaaacttaaaatttacagcaaaaacgacgttgacaacaccaaaaaatttcagaattcagatgggtttgattggtgtcacattcagatgaattcagatcaggatccttttgttgtcttatgttaaagtcacaacaaaatggatacattagatgatcttatctgtggttttccgatatcaattaagaatgttttttatctttgatttccaaagccaaagtgtgttcctttttttgtatctgacgttggtttttattggttctggctatacacaggctacgccaatgattgcaggtgctgctgtagctgctgctgctgttgctggtagatatggtatattggcttggcaagctttcaaggcaagacctcgtgttcctagaatgcgcaggttttatgaaggtggtttccaaagttctatgacccgccgagaagctgctctcattcttggtgttaggttcgtccggctttcttatacctgcttcatctttttgtttttgctcctcagattgaactggtcctgaggctgagattcatagaagctatatacccttcagaatcctgtttgaaaatgtggttatagtgttgttctgctaattatttgaggtcaaaagttattgatttaacaccctttagatgaaagcaaactacatagattatgttcttgaatcctatttttcattgttggttgtgtaggagattattgattttaaaatgaatgggttgactaagtttgtgtggtggtttttttataacagggagagtgttgtggcagataaggtgaaggaagctcaccggagagtgatggttgca

SEQ ID NO: 146595 - DNA, 2186 bp, Arabidopsis thaliana landsberg
ttgacgggtttgttcttgcactacaatgctcttgttggagatattcctagagaacttggtaacttgtcggaacttactgatctttatctcaatgttaataatctctccggtgagattccttcaaacattgggaagatgcaaggcttgcaaggttagttcttttttactttaattttaatcttaatcattgattaaacttaaaacctaaatttagcattgttagatctttggtttctgcaaaatacttgtcccaagattaatcaatgttctgtggagatttgaaacctagaaatctgagctccttgtcttaggggttttagttacttcattactatctctggtagttgaaattatttgaattagatgattttggaatttaatgctttaatgatctgtctttaaaacgtccttttcatgtctttttgttaggatttttctttttgtaattttcctgtaaggaagaatagtcaagaactttaaaagattcaaacttttaattggaaccataaatggcttactggtcccaaaatatggacttgaattgaagataacttgtacttctcttgattaattttgttcatttagataattgattcacttactttcaaaaggctttatatttgagctttaattagcaggaccaggtttctaaatctagaattagttctaagttaatgtaagtcaaagctaagcttcattccttttttggtctatgttgttgtgtagttttgcagctctgttacaacaatttgactggaagcattcctagggagcttagttcactgaggaagctgagtgttcttgctcttcaatctaacaaactcactggagctatacctgcgagtttaggagatttaagtgctctagagcggctagatttgagctacaatcatttgtttggttctgtaccaggcaagttagctagccctcctctgcttcgagttctcgacatccgcaacaactccctcactggcaatgtacctcctggttagaaaactgattcactatatgatctttgaaactaactttgcgtattttgtgaagtgtttctcattttggtttatatttctttctctgttgtaccgatttgacagtactgaagagattaaatgaaggtttttcgtttgaaaacaacttgggactatgtggagctgagttctcgccgttgaaatcttgcaatggcacagctcctgaggaacctaagccatacggtgcaaccgtgtttggttttccatcccgggatataccagaatcagctaatctacggtcaccttgtaatggaacaaactgtaatactcctccaaaatctcaccaaggtgcaatccttattggtttggttgtctcgactattgcattgtctgctattagcatccttttgttcacgcattatcgcagacgcaaacagaagctttcaaccacttatgaaatgtcggacaaccgtctcaacaccgtaggaggaggttttaggaagaacaatggttctccattggccagtcttgaatatactaatggttgggatccactttcagacaataggaatctcagtgtctttgctcaagaagttatccagagctttcgattcaatcttgaagaggttgaaactgctacacagtatttctcagaagtgaatttgcttggaagaagcaacttctctgcgacttacaaaggaatcttgagagatggttctgctgtagcgatcaaacggtttagtaaaacaagttgcaaatctgaagaacctgagttcttgaaaggactcaacatgttggcgtctctgaaacatgaaaacttgtcaaaacttagaggcttctgctgttcaagaggccgtggagaatgttttctcatctatgattttgctcctaatggaaatttactgagctatcttgatctcaaagatggtgatgcgcatgttcttgattggtccacgagagtatccattgctaaaggcatcgcaaaaggtatgagttttatttatgccgaaccaattttgttagcgttcttgattcatttttgtttatgtgtttgatgttttgtgtttagggattgcttatctacattcatacaaaggaagcaagccagcattggttcaccaaaacatctcagcggagaaagttctaatcgaccagcgatacagtcctctactctcaaactcaggcctccacacacttctcacaaacgacattgtctct

SEQ ID NO: 146596 - DNA, 1436 bp, Arabidopsis thaliana landsberg
atatttccatttacgatctgctgctcactcttttctctcatgctaatcaaaagctgaaaatttctataggtgccgtacgggaagtgctgaaattcttgtgaattttgatgatatatgcccgtcaggcgaatgctcgtatgaccaggaatctggagcgaaagattcccttcgaaacttccatatatgtggaaaggatgttccgcgtggatactacgtgagtgccacccaaccaaccactttcttttttcgtgtgcttaaacacagaaatctgattctcctgctttctgtacgtaatcatactttggcagaggttttgccgtggcagcaaaaacgaaacgaggggattcaggtagtcttctgcaaaattaatctgttgtcatatatcatataattcaagcagaagctcctgaactcttatcaaaatattttggctgcagctgcggattatgggttttgatgcattcactttccgtgaggattgaggatggagaaagtcagtttgcattcacggccatttgtgatttcatcaacaacttcttcatgtgtgatgattgccgtcggcattttcacgacatgtgcttaaggtaaagacatatctgggggttggctaacaagctcgattatcacatctaacagcttatgtgtttcactaacagcgtcaaaactccatttaaaaaggcacgtgatattgcgctgtggctgtggagcacacacaataaggtcaatgagagactcaagaaggacgaagattctctgggaacaggagaccccaagttcccaaagatgatatggccaccaaagcagctttgcccgtcgtgttatctttcgagcaccgagaaaaacattgactgggatcatgatcaagtctacaagttcttgaagaagtactatggacagaaactggtgtctgtttacaagaaaaatggtgagagtgtgagcaaggaggaggttattgcagctgcagaagagatggcagtaccgaccaatgctctggttgtgccagtgggagctgcattggccatagcacttgcaagctgcgcatttggggcactagcctgctactggaggacgcagcagaagaaccggaagtataattacaatccgcactatttaaagagatataatagtaattatatggttatgaacacattcagtaacactgaaagtgaaagggaaaaggagagatgagttaacttaaaaagaaaaagctcacatggtttaatattctgaaactgagctttgtttttgttgtaacttacagacaacagatacaaagacgttgaggttgagatgccaaagtcgcctgcttcaggtccctttcctcttctcctcttacggattgtatagattcttctcttcaaatttttggaaaattcaatctatatgttataccaaaatagctcctttgtgaagtcctattgaatctctcgcctttc

SEQ ID NO: 146597 - DNA, 1874 bp, Arabidopsis thaliana landsberg
atgcttggaaaagaagaaaattccgatttccgaacaatggaacttactccattttgcattctctgtcgaaggtaacatacgttcaatgcaaatgacccaaagtcgtcggtgccacgtggatagttctcactggttgatgcattcggtaactcgcagaatggaagaatattaacacaaaaggcatctcgcgtatccacgtgtcccgttcaagattccaaattctaaaccaaaagccggtccgaccagattaacaagttctctttattacatcacaacccaaaacttgttcaaaacctaacttttcattgctaaacatattttattctgacattcacatgttaactttaatccaatatctaattcttttttcttaaaaccaccgttgtcgaaaaatccaaatcagcaaaatcagtgattaaccggaccggaccaaaccgaacatcgttttctgtaaatagcagtaactggtttcacacatcccatcatctctaaccaccgacctcataagtcattaagacaaaaacagagacactcctctcactctcattatttcattttctttccataaaaagcacgaatcttcaagaacaaagagagagagagagagaaaatttaatggcgttagcgaataacttaacggcgatactcaacttactagcgttactctgttccataccaataacggcgtcaggtatatggctagcttcaaagccagacaacgagtgtgtcaatctcctccgttggcccgttgtcgtcctcggcgttctcatcctcgtcgtctccgccacaggcttcatcggcgcctacaagtaagaatcaaaaaacttcaagactttgaaaacatagacacaaattgaatcataaagatgtaaaatttgagctctcatatttcaggtacaaggaaactctactggcggtttacttgtgctgtatggcgatattgatcggacttttgctggtggttttgatatttgctttcgttgtgacccgacccgacggatcgtatcgggttccgggtagaggttataaagaatataagcttgaagggttttcgaattggcttaaggagaacgttgttgattcgaagaactggggaaggctaagggcttgtttggctgatactaatgtttgtcctaaactcaaccaagaattcatcaccgccgatcagttcttctcctcctctaagatcactcctctccaggcatgttctttcttcttttattctcttttataaaaagaaccccgaaatttctagtttccggtttaggtttggtttagaggtaaatctagactaaatatcggttatgcaactatgccaacgaatcattgtgggtttaattagatattattagatgattaatggagataagatacgaagtaaagagaatgttttgtaaaatctctagattatgtgagacctacggtttgttcttgccatagaaagataggttattttttctttcaaaaagtaaagtaagtggttttaaatcaaaaagttaaaaaatttctctttagcttttgtgaagatgtccaaaagagaattgatcttattctctatattcttttttttgttttgcagctttaagttatttcgttttggatttcctcatctttgaaaaaactaaaaaaatattttctgacctaattaatcttatgttttctagtgttggagagaaacctacattagctttcttaacgtatcgcagttagtgccattttgtggtaaaactcatagattaggcatatgtaatcaccattattgaacacatatttattcctagtagactggtgtagaagttgctggagaccaagtccacaagattatatagtaagatagtcagatttcaaaattatacactatcataaggacccac

SEQ ID NO: 146598 - DNA, 1991 bp, Arabidopsis thaliana landsberg
aggccataagtaaacaagcgctttgtaaagtcatccaaacaattgtgaagcaaatgcaatgtgtacaattttgataaataaaccaacgtatcctagtacgtattcacttattatagctaaatgacacatgttcacatggaagttaattattgatatcttatagtagagaacgtacgtagttaattaagcagaaacataacactataagcacatttatagtctaaaacatgtagaataacaaactctttgtaacaactaacaaagtctcaaaatgtttatggcacaattattttgtgggaacaatgatccctgagtctgcgagaaggcgggatgaggggagcgaagataaacatctgagggatgcattcagtatcgagacctataaaagcatggcagcaagaaggacctacattcccgaactgtccatttgttatcgatcggaaaatttccgggacacagtcgggaataacttctagtgatgaccaacaatctagttgggaaggttgtggtgatggcaatggttgagaagtagcgaacactacgatgcatacaactggaagaaggaagaagaacttgttgctccacattttgattagagaattggaatgatttattgagttttatcttgatatgaatataatagtagtcagtgattggatttatataagatgaaaaaatgttaatattttaagttgcgtattgtgaaatttttcattgtgaggaattatggaggcacttttgggatgaccccaaataaaggtgacagtttgttaagttttttttttttttgatgaattacaagataagctagattaatattgttttctacacgttgttttattctattgtattataagtgaaataagtaaatgatatattttatgagaaatttcactttccagaatttcttgtaggattaggtaacttggaaaagtactaaaaacttagcacaaggcagaagggggatatagtggaatgggttctctttgggtcatatattagtatagagaaggcccatcaagatattaatcattaaggaggcccatccgactgttgcgtgttataaaaggagaagaacctagttctcaagggatagagattttgtttgacctagttctctccgttcttcgtaccgtgttctcaaagtatagagattttgatttacatagttcgctcggttcctcggacctagatctttcgggttcggattgttacttcttcgagtttgaattgttctgaacgtcgaaacccttatttcgatggggactccggaatttccagatctagggaaacactgctccgtcgatgtttgcacgcagatcgatttcttgcccttcacatgtgatcgctgccttcaggtctccctttctccttctccgttttctttcgataccattccaatgccatgatttttctgtatagacaatcatcgtggcttcttctaaatctctggtcaattatatgatttatacatgatttcgtctctttttatgttcaaattcagtagttgatttgaatctagactaatcgtcatttcgaagaatttgatgctaaacgatttgaaaagattcattttgttttatctgaatccggagaggaagcgtatatcaaatcttttgaattttttttataaatttattgaaggtgttttgtctggatcaccgtagctatatgaaacacgattgtccaaaaggaaacagaggagatgtcactgtggttatttgtccattatgtgctaaaggagttagattaaaccctgatgaagatccaaacattacctgggagaaacatgttaatacagattgtgatccatcgaactacgaaaaagctgtcaagaagaagaaatgtcctgttcctagatgcagagaactcttgacattctccaatactattaaatgtcgagattgtagcatcgatcattgtttgaaacatcggtttggacctgatcatagttgttctggacccaagaatcctgaatcgagtgtctcctc

SEQ ID NO: 146599 - DNA, 1457 bp, Arabidopsis thaliana landsberg
tctggcatcacttttgcatattcaagttgggactttgtaaattaagattttttagtcttttgttgttgaaaatcatcttcccaaatgaaatgatgttttcactttgatgctcttactacaggttctcaggcaatgtttgccttgagtcaagcaaatcttttggctaataaaaagaagaagtttatgttatcgggtcatatctcgaacgaaagtaaccaatctgtaaactttcactgggcgccatttcccatcgagatgactggtgcatcggcttttgtcccatctccatcgggattgaagctccttgtaattcgaaatcctgaaaatgaatctcctacaaagtttgagatatggaattcttctcaggtagagaaggagttccatattccacagaaagttcatggctctgtatacgttgatggatggtttggcacttttcttttggctgattttaaagacaagttcttatagaagtagaaaaatgagtaaggcttatgtatgatgtaggtttgaagggatctcttggaattcaggtgagactcatgttgcgtatgtcgccgaggagccatctcgtcccaagcctacatttgatcaccttggttattacaagaaaggaaattctttggacaaggatattggaagctggaaaggtgaaggggattgggaagaggaatggggagaagcatacgccggaaaaaggcagcctgcgctgtttgttatcaatgttgacaggtttctatcaatatctccataagaaaagaacaactacccagtactttttatgatggttgtttctctttttctgttaacagtggagaggtcgagccaatcaaaggaattcctagatcaataagtgttggacaggttgtttggagtccaaacagtaacggatcagctcaatatttggtttttgccggttggttaggagataaaagaaagtttggtattaagtactgctacaacagaccatgtgccatatacgcaattaagttcacatcggatgaaccaaagtaagtttgcaacttctataactactaaaagacagcttaataattcctaatttccgaaaaaatatcttataaagtttgtgtttacttgtgtttcagagatgatgacgcaaatgaattccctattcataatttgactaagagcataagcagcgggttttgtcctcggttcaggtttacttcttatgaattttttccttaactttctaagttatgtatttactaagagtatttattgtccttgttactctgtttctaactgagcgttcttacacaacttttgttaaacgtttcccttatatatagtggtgttgatttgcaatgttcattttaattatgacctgtttaaacttactgtagtcaccatacattgtttccttccctcacagcaaagatggcaaatttcttgtgtttgtatccgcaaagaccgctgttgattctggggcgcat

SEQ ID NO: 146600 - DNA, 3286 bp, Arabidopsis thaliana landsberg
atacaagatatcgattgtgcagtggatttacccaacagaattgagcagcctgttgaaggcaagaaccgtggcgagtctcaggttagatttctactatgattggttttggtttagattggccaatacaaccaaatttaccaaatcgaaccgaaccaaaattcgaatcaaccaaattttaattctagagtaacaagactgactctgattagtatagacaattttagtatatttaaatggttttcttgttttctatgaaaatgtgtgtttagggaccattgacgttatcggggctgctgaatttcatagacgggttatggtcaagctgtggagacgagcggattataatattcacaacaaaccataaagataggcttgacccggcattgcttagaccaggacgtatggatatgcacatttacatgggacattgctcttttcaagggttcaagactttagcttctaactacttgggtttgagcgatgccgcgatgccacaccgtctatttccggagattgagcgtttgattgacggggaagtaatgacgccggcacaagtagcagaggagctgatgaagagtgaggatgctgacgtggcgctagagggtttggtcaatgttttagagaaaatgcggttaaagtctgaggaatcgaatccggtgatgatgaagcagaaagagagtagactggagatggaggagatgagattaaggagtgatactgagggttctccgaggaagaacagcaaaagatttaagaagcttgtattgttttggacataatccgttaattagttcaaataagattatgaggaagcaaacaaaaatagacgtataagaggctaattacaactctttaagtgttttttaaaagaaatttcttgtatgtttattttctagggttgtgaaccattgtaagacccattaagagatatggaactttatatttccttaaagtaagaaactatatattgagatagtctttggaggtacattaccaactaccaagtatgtaatactctacctatataaaggaagaaccaaagaaaaaataaagcatatagagtggaaagtctcttgccttgttacagagacttttgagaagagtaaaatcttgaagtgttgatatcttcttttatttatgtggtaatgaatatcccaaactgcgtaatagcttgatgcgtactttgcgttattagcctaatgggctggcctttgtggcccaaacgatgaataaagagagagaattatctcccaatacaaatctctatataataaacccaatttaccaaaagagaaaccaaaccctaaaagtcgaaaacaatggtgttctctaaagatctcccttctcctgcaacaatgttctctacctatgcgtcactagcgggatacataatgatgatcaaaccaatgattcacacgataattccacgaccgatacagaacttcgttttctcttacatcaagtctttcgtcggctcttgttcatcgactctcacgcttgtgatcaatgacatgatcaacgggactgataggaacgggatgccaagaaaaaacgagctctttttttcagctcaagcttatctctcaagcaagataagccccgatgcatcgaagctaaggatgactagagaccctaacaataagaacgtcaacttacacctcagccaaggagtcaaggagaggttgtctccgatgtctacaaaggcattgagctcaagtggtggtttttagaaggcagaaacaagacaaccacggttgtaggtgaagagacagaggaagcgatcgtcaattggcaatgcttcgagctaagcttcgacaagaaacacaaagacttagtcgtgaaatcctatatagcttacgtggagaggaaagcaaaggtgatcaaggaagagaggagaatcatcaagatgcactcctactctagctatacacttaggtggcaatctgtcaaattcgagcacccttcgacattccacacaatggctatgacgcctaaactcaagagttctgttatggaagatcttgatcggttcatcaaaagaaaagattactacaagagagttggaaaagctaggaagaggggttactttttgtacgggccaccagggaccgggaagtctagtctagtggcagctatgggcctatggctaactacctcaagtttgatatctatgatctccagctcgcaaacgttcagggagacgcccaactacgaagcttgcttctcgccactaataacacctcgattcttcttgtagaagatatagattgttccgtggatttgcctacaaggttgcaacctgcaaccacgacccttggtgctcccaaggtttggtcttcacaatggtttaatgttatctaatttgttttgtgtacatggatcctaaacaagttttgtatgaatagggatcaacaccattgacattatcaggactttaaactgcattgatgggttatggtctagttgcggagatgaacgcatagtaatattcacgactaataacaaggaggtgctcgatcccgccttcctcagaccaggccgtatggatatgcacatttacttaggacattgcagttttgagggatttaaaacattggcatctaactacttaggcatgcctcacgacaatgatgaccctcaccgtctctacccggacatcaaacgtttgattgatggacaagtgttgactcctgctcaagtcgccgaggaactaatgaaaaatgaagatgctgatatggcgcttgagggtttggttaaggttctcaaaagaaagaggtcagaatcggagaatagtgatgatgaatctaagaagatgaagatgctccaagagggagataagagaatatctaacagtactgaggagacatgaacaatctatgttttcacttgggagaatcttacaaatgggggtttcgataagatttggtacttcacatcgtttttctagttttagtttttgagttctagctttggttttacttcacatgttttttctacttcatatttaaggttatgtttcaatttgtattttttcaattatacactactacaataaataatatttgttttagtaattaaataatatattttaaatagtcagagatttacaactgcctaatagtatgaaaatagatatataccagaatataatttagttatagagattttaccgtatataaaaaggaaatattatttcttctatcgcaaaggaaaataaacttcttaaccagaaaaagaaaagaatttgaaataaaaggacaactatataaataaaataaaatttaac

SEQ ID NO: 146601 - DNA, 371 bp, Arabidopsis thaliana landsberg
ggaatctcgttgttaggtgggttctatgtagcgcagactatctctctgtcgtttggagctttgggagtgaacgatgttatcgctgcggttttatgcgttcttttgacagagtatgtgacaagattctattatagccgcgccacagtcacatttcctattgctctgctcaataatttcaagatgggtttcacttatggtctcttcattgacgccttcaagctggctagctaactgtttgcaaaactgagtcaccagagatcccaagctcgtgtatttacttgttttttctcctcaaatgtaatattttgttgtcataattttgtagtgaagcaaccaaaaactttgaagttaaagagaatctgtagtatgct

SEQ ID NO: 146602 - DNA, 1805 bp, Arabidopsis thaliana landsberg
attaaatctggtcacacgagcccacaaacaatgcttctgaactttgtcgcttcaccatattcctcatctagaccaccggagcacactgcttggtctagaaactgagctaaagaaggattcaagatcattgttattttcttgctgctgcgtagctttagcttgggcagctgcacttccacgtgcctcagcagtggctcgttctgccctaacccttgcttcagcatttaccctttctctagcttctacagcagctttctcagtcttttctctagcttcggcttatgctccggctttgctctgtttctgtgagacttttggaagcctaaaaggttatgaagtggaaaatcacatgaatgcttcagttactatgttggaggaggcaagttagtgataatgagattggttctgatattagagcagctattttgaagaatgggggtggttcaaaagaataatgggggtggttagaaagaagtgttgaaaggactcacaaacgttagttcgctcttctctctatctctcacactctgtttttgttccagtttgtagtgtacacgtttaagaaattataagactacattgataaaaaaacttggaaacaatcttacacaacactgtcaacacacacgcacttacacacagtcatgctcttaaacacataattactacattggaattctaacagcaacacttgcacactactttgctttaactaaacttcaacctcaagctaaccaaaaaaaaacactttctcttgtttaggcctcaaccaaagctgcagtcctctgttgacgagtcatctccgacccatcttcttcttcgcttgttattctgttgctttgcttctcatcttcatcacactgattctttcttttcttgttgcaggtttgatctccaacaagaagatctcttattgctagtggcccacttgaaggttaaaattagcccatttttgttttacttaaccgactacaatcggaaaatatataatggtagctaggtctcgtatttctaggtttctctacgtcttttgttacttgttttttctagggcttattacataatatataagttttaacagatctttcttcgttcgatccgcagtcatgtattcatctttcagttcaaaaaaaagaatcaggcattcatcttccttaacgaatgatctcatcgaggagatattgtcgagattgccttcaaagtcagtggcaaggtttcgttgcgtgtcgacagtcatacttcaccgagttgttcctcaccaggtcttcatctcgtccacatctcttaatcgctgtcgaacaagaaggggagtggaaattcttctcgttgcctcaacctaaaaattatcttgggaagtcgtctcttgtagtagccgctaatctccatctgaaattctttgaagacaaacgcccacacggttgtagttatgcttctagtttgatctatttacctaatatgacgatccgaaagaagggtgacgatgacttgcgtgtgatatgtaaccctagcacagggcagtatgggtatgtgatcttaccacctttactggatttcaagagcaagccttacggtaaatttttagggtttgatccgattgacaagcaattcaaggtattaatcccgatattcgattttgataaacatcaaacggatcatcatattcttacattaggagctgaaacagttgggtggaggaagatccaatctcccttacgctatcttcctcatagtaatggaacaattatagaatcaatgggattttgtattacctagctaaaattaattatgcaatggatgaaaatgtg

SEQ ID NO: 146603 - DNA, 3283 bp, Arabidopsis thaliana landsberg
gtcacttgtggatgtgcagctggagttgctgccgcttttagagccccagttggtggagtgttatttgcattagaggaggtcacatcatggtaggttcaccgttcctttcctcatgtccagtggctgaaattactctgctctgagaaataaccattttgaggaactttttttactctcgtctattatttccttagcaactggtgtcacttgacagcaatgtagttatctttaggatgtcctagctagcgtgagtttgggatgctatgctgtctgtccatttaattgaatttgcatgtgctgttgaaggtggagaagtcaacttatgtggcgtgtctttttcacttccgctattgtggctgttgttgtgcgtactgccatgggatggtgcaagagtggtatttgtggacattttggtggaggtggtttcattatatgggatgtatcagagtaaggttctagtttcagtacttacttatatcaagcaaggttaatagtgctagaattgacctggaacttttctttctctcatttagtggtcaagatgactactacttcaaagagctactgccaatggctgtaataggagttatcggagggctacttggtatgattttttcttttcctacacttttggttccatttatcttcatctgactgtttcatttctcatggcattttcctccaggggcattatttaaccaacttacactctatatgacatcttggcgtcggaactctttgcacaagaaaggaaatcgagtgaaggtaatctttgatggacgattacaagaaattcttcatttatattatgtttatcttcttgaagaactattgtctcgttggtggagttaaataactgctataaaatctgaattttcagataattgaagcatgcatcatctcttgtataacttcagctatctcatttgggctgccactcctaagaaaatgcagtccatgccctgaatcagttcctgactctggtattgagtgtccacgacctccaggaatgtatggaaattatgtaaatgtaagacactgttatagagaatctgaatctttgagatctgttgcatattctttaccaagccgatctattatgatgaaattgtagccaatttaacgtacatagactttgaaggtttatacctagaaaactttcagactttcctaaaactgtcttttaacattgccgcattcttgttgctttgtgtgccaatcatcgcagttcttctgcaagacggatagcgaatacaatgatctcgctacaattttcttcaatactcaggtattcttcttctagaataatttcaaaataattattttcattttctacttcgctttgttttcaagcctgactgtttcaattgaattgttctgtttttttattttgacgacaggatgatgctataaggaatttgttcagcgcaaaaacaatgcgagagttcagtgctcagagtctactaacttttctggtatgaaattcttctattttgtttgttcatagtattggtatttagttcttcgtaggtttgagtttgattgaatgatgtccatgctagcaatagaataaggaccatactgatatgacttttacattgttctatctataggaatatcttttgacttgcttattcctttaataattaatataatcgccatttttctttgctttaaatgatgtataggctatgttttacgcattatctgtagtgacctttggcactgctgttcccgccggcccccttgttcctggaataatgataggatcaacttatgggcgccttgtaggcatgtttgtggtcaggttttataaaaagctcaacattgaggagggaacgtgagtctctttgtgtattgctttgttgatcataccattcttcttttttttcaaagtttttggttgaacttttggcctttgatacaaaaagtctttgaactttagttatgctttgctgggagctgcttcatttctcggaggctcgatgcggatgactgtatctttatgtgttatcatggttgaaatcacaaataacctgaaacttctgcctcttataatgttggtacttctcatctcaaaggtacgagttacctaccaatatcatattatcttgattcttggagaaatacgcttgttttaatttgttctgttcttaggccgtcggtgatgctttcaatgagggattatatgaagtacaagcacgcctgaagggcattccgttacttgaatcgagacctaagtatcacatgcgtcaaatgatagcaaaggaagcgtgtcaaagtcagaaggttgatatcatttctccctcattaaaccactagatggagcttgtgacacgtgcttcttatattatgctatattataacttgttttctttgactttgaaggtaatctctttacctcgagttatcagggtcgcagatgttgcttcaattttgggcagcaataaacataatggatttcctgtaagcattgctttctttgacacaggtttgactcgtgattacttagtcctctgtgctgatgttttcatattttgacattctaccaggtaatcgaccacacgagaagtggtgaaacacttgtcatcgggttagtccttcggaggtacgtgattgtacattgcaaaaagaattattttaaacgaaatatagcattctgaattttgttcaccgtgcagtcacttgcttgttctccttcaatcaaaagtcgatttccaacatagtcctttgccttgtgatccaagtgccaggaatatcaggtaaactaatgttccacattcttctttttttcactctcttttgaaagagtcatattttctgatagataaattgattctgcattctccaggcacagttttagcgagtttgctaaacctgtttcatcgaaagggttatgcatagaagatatacatttaacttcagatgatttagagatgtacatagatcttgctccatttttgaatccgtctccatacgttgttcccgaagacatgtccttgacaaaggtgagtaaaagctccaattatgttttatctgagacaccaaatatccatcatcatttgttgagaatttgatttgtttcgattaggtatacaatcttttccggcaacttgggttgcgacatctattcgtcgttccccgtccttcccgtgtgataggcttgatcaccagaaaggatttactgattgaggtaagtagagatacacacatcgatctgttgacaaaatccgacatattagtaacagtgatgttgcttttccatttatacaggaaaacggcg

SEQ ID NO: 146604 - DNA, 2001 bp, Arabidopsis thaliana landsberg
tcagaacttgtaactctcttatcttcactttcatgaagactctctacacctcttgtggaaacagcgttctttggtgtccctctggaaattctgacaagttaatcagcatggatgaacaaaatcttgtcttctggagtttagactcttcaaagaaaaatgcggaggtgattgttgctacaacaagagaaaggataaacccattaaatcatttttgcctcctgtgtttttagaccacctttgaggtactttccgcttaatcatcttttttgctaataataggttttatctaaggagtcagctggtatgcgtcattctttatctggtggagcatggaatccacatgatgtgaattctgttgcagcaacttctgaatcatctatccagttttgggacttacgtactatgaagtatgtcatatttgttcctctcttatgttcgcatgaaagttaatatactgtattcctgcatgcacagctagcgtgtttcctctagtcaatagtttgtcattattaatttttgggttccaaaatcagatacctttatgttgagcttgatatgtttgcatatttacaggaagaataattcaattgaacgtgcccatgtacgtaatgttgactacaatctcaagagagaacatatactcgtaagatttctctctctgtatgcaaatattttaaatgcttgtcaagcaattccaacaaagaattacacagtgctccaaagttagaaaacaatctgttatatagattgcaaatgggtaggaacaaggaagtaattgtgtcatttctgatttaattttttcttcatagcaagaactttttatctgaaaggtagtaggtcccctatttacagaaatggtatcagatggttctatttatgcattggactgtcgattgtgtaggtttctgcggatgatgaatctggtatacatctctgggatcttcggaagacaaagtttcctgtgcaagagctccctggtcatacacactggtaatttacctctaaactcatttttgtggattattattttttctcttccatgattctgcttcatatgcacacaaatctaatgctttcgacctgaaattttgtttctagcgtgactgttctttctgaattttctttacaggacatgggctgtcaggtgtaaccctgagtatgaagagctaattctggtacccattttctcttaccttttttctcttagcacagtcgaacgaatctaaattgttattgtgcttgtcactactgacagctttaagctgctagtcgatgattctagaacaatttctgtcactcacaatgtatatttaaagtgtcagtttctgataaattaaccaaacacagagcgttggaacagactcagctgtcaacttgtggtttgcttcagcatctagtgagcataaaacatcagaaaggttaattctctttattatcgcacacaacaatttttccaactttgttttgaacttttattctaatgccgatgctgtgcagcccggtggaagcatcacgtcagcgtgtgaacccgttactaaactcttatactgactacgaagacagtgtctacggtaactcttggaacaaactgagtttagttaccacaatttcccactaaaactgcatgaagtcactatataattgctgtcacaggccttgcttggagctcgcgtgagccttggatttttgcatcattgtcatatgacggtagggtaagtgactttgcttttgacaacaacctaaagaactatggagaactaagaaatagacgatttattaccccaaacaattctaaattctgaaagcagtttggagagttcatctcataattttggtgtttgcttatgttaggttgtgatcgaatccgtcaagcctttcctgccaagaagataggtcccgatggaagaaggcttcaaagaaaaagctgcattcatatgctatcatttaagacaaattttgaatgtttttataataatcacaacatcaaaactattcttctac

SEQ ID NO: 146605 - DNA, 1362 bp, Arabidopsis thaliana landsberg
cacatcttggactcttatactgattcaaagatgatccttggagacacaaatatccattaacgaatcagacgtgcccaaactcaccactcttatctccaatggcccaatcgacttgtccctgttcctgcatctcctgtagacgtaatccaaacaatcctcaacctcagagcaacaatcctccattgtcttgtcgtcaagctttggtgggtcattgctgtgacgtggctttagctcccagaagagcacgtaatgccctgggattgatgacgtgtctgcgtagcttgtgtactccgtgagcaagaggcttgaaggatgttgaagatggtttagtttagcttgtgtcactgcgtttagtagatcttcttcgctcgttttgtcagtgtcgatgcttagtacaacgtttcttcgctgcacgaaacggaattgaggcgctttgttgtggaaacccgtcacttttagaatatcgcctactctgtatctgtacaaacctattgacaaaaacatatgtaacaggttacttgtgctacaagttactatccgttttagaatccacatcagacctagattgtgttcgtatagagagtcactgacctgtgaatgtagtgatgacgatttcgtagtattgaccgacttcgacattaacaagattgacgatgagatcttccttgagagcatcatcatcatcatcggtgttggagtgagttgcaaagtgaatctcttcgtgggatttgtcgtcgacgggcaagaactcgaagtaagccatgttaggaagaagcgtgtaggaaacatcggcaggatcacacaacggattaaggttgataccaaagtaacactcagaggaagcatacatcgttgaaaccaacggtaaacctccgctataaaactctagtgtcggaatgtattgagccatcgaaccagtcacaatcacctccacatatttagccttaggccaatatcctcctcaaaattccttcccacgacttttcagcgcacccactctcattttatcaaccaattcttgatttggaccattaaggatcaacaagaccgagtctctgcagaatgagtcagtgatccagctagtgacagtaccggttctaatgtcagcgcaaagctctttgtaatgatcctccaagaacttgactgctcgaagaaaggcagaggcaaagacagctccgactcttagatcatgagatcgctgtattagaccacagaaaagctgacagtacatgctctgcttgctgtcttgacaaagaatggtctggtcagggctagtgtagacgttgtacttgttgaatggtctgtttctgaaaaaacacccttcgtagtagctggtcataacaggacggacaataagacctg

SEQ ID NO: 146606 - DNA, 2463 bp, Arabidopsis thaliana landsberg
  unsure (1)..(2463): unsure at all n locations
aaaaaaacaacaacatcatgacatacctaactcactctttgctcttcttcttctcttgcttatctatgcttctttgcgtctccattgcaggaagcagacctgttcacggtccagcttatacaaacccatctgctttctctccacaagcttacgatttctttcacccaaaatcatcactctctgatcacaataatccaccaaaatcctcgccttctccgctttcactttcaccttcaccttcaaaaacatctattgtagaaccagattcacaaggaagtaaagtttcatcagacgaacacacaacaagtgagagtcgacgagaagaagaaggacgtggagaaaccatcggagtagtgttaggcctttctttcatcgcatttctctcattaggaatctactttgtgatcaagaaacaacgtgctaatatcatccgcactattgtcactcactctgatgcttaaatataccaaaaacatacttctttcattactcttttcaagattttgtcaaatttctattgttttgattatgtagaacgttacaatgtgtcaaagaaaacatttcggttcggtttagtttaatttgttcggtttatatatttttctggttaagacttaattatagatttatagtccctaataatttaatttgatcctaaaacgaggacgtttgatttggtaacaacgaacaatgtactagaaaagaaacaagcttgtattgtactcgtagttgttagatctcaacaacagagtcgcacacactaaaatggcgttccgcgttttgctcctcttctcactcaccgcacttctcatcttctccgccgtttctccttctttcgccgcttcttcctccgacgacgttgacgatgaggatctcagcttcctcgaagatctcaaagaagacgnnnnnnnnnnnnnnnnnnnnctctcttcctcaactggatttgacgaattcgaaggaggagaagaagaagatcccgatatgtacaacgacgatgacgatgaagaaggagatttttccgatctaggtaatccggattccgatccgttaccgacgccggagattgatgagaaagacgttgtggttatcaaggagcgtaacttcactgatgtgattgagaataatcaatacgttttggttgagttttatgctccgtggtgtggtcattgtcagtctcttgctcctgagtatgctgctgctgccacggagcttaaggaagatggtgttgttttggctaagattgatgcgacggaggagaatgagttagctcaggagtatcgtgttcagggctttccgacgcttcttttctnnnnnnnnnnnnnnnnnnnnnnnnacactggaggaaggactaagtaagtgaaattgaattttggtactaagtgaggcatcgttgaatctgatttggagtttgaatagttttattggttttgtggtttagagaaacaattgtgacatgggtgaagaagaagattggtcctggtgtgtataatctaactacattagatgatgctgagaaagtgttgacttctgggaacaaagttgttttgggatacttgaactccttggtggtatgtttcctctattcactttagtatatagtctatgagtcgtttttaaagtaacacaatttattacatttttggtgaaattctacagggtgttgagcacgatcagcttaatgctgcttccaaagctgaagacgatgtgaacttttatcaaacagtgaatcctgatgttgcaaagatgtttcaccttgatccggagtctaaaaggcctgctcttgtcctagttaagaaggaagaggagaaaattagccattttggttggttctctgtaaatctttgttatgcattgatttagtgatcttgttctttgggcttttgcttactatgtttgtgtttaatatgcagatggagaatttgttaagtctgctctagttagttttgtgtctgccaacaagcttgctttggtctctgttttcaccagagagactgctccggaaatttttgagagtgcaatcaagaaacaggtctgtcaatggttttagtaggattttttgttttaaattcgaagatggtgtaggtccgtttactaacatgaaagtatatgttctcattttgcagttgttgttgtttgtaaccaaaaatgaatctgaaaaggttcttacggaatttcaagaagcagcgaaatcattcaaaggaaaggtatgaacatagttctagtctaatttagaccgatttaattgatattttgttttgtatcaaagacaaatcattcaaaggaaagaggatatttgggggcaacaatgaaagagttacttctaagaagcctttgtttcttgctacagctcatctttgtatctgtggatctggataatgaggattatgggaagccagtccctgaatactttggtgtgtctggaaatggtcctaaagtaagtctattgtttttattttgttatgc

SEQ ID NO: 146607 - DNA, 528 bp, Arabidopsis thaliana landsberg
aaaagagaagagaattacattagaacatgcataaaatacgaaaataagcaatgtggtattacaaatgttgtaggtacaacatttctgtgaacgttatagcttgcggttacacggcgatctcgatagcgattctgatgatcagcaggggaagaagaagcaagaagttgttaatggtggttttgctaggagatctagtgatggtggctttgctgttttccggcactggagccgccagcgcaattgggctaatgggtttacatgggaacaagcatgtcatgtggaagaaagtttgtggcgtttttggaaaattctgtcaccgagctgctccttcgcttcctctcactcttcttgctgcagatgtgtttatgtttcatgttgttcttgacgctattaagcttccttaattattaattgtttctgttcatgtcgttttgtgtgatgtaaaataactatcaacaatcatgtaattgtctattgcttctaatgttttatcacatcgttttctatggtgagacgatatattcaaaa

SEQ ID NO: 146608 - DNA, 1280 bp, Arabidopsis thaliana landsberg
gccgcgattgtgttcagatcggagctgatttcgaatttggatgtgaaaattgagattctagggatttcaaattttgacgatcatggcgacgaggaatcgtacgttgctgtttaggaagtacagaaactctctgagaagcgtcagagctccattgtcgtcatcttcattgacgggaacacgatccggcggcgttggtccggtgatcgagatggcgagtacttcgttattgaatccgaatcgctcttacgctcctattagtaccgaagatcctggaacttctaggtactcttctctctctttatcagtgaaaatggtgaacaatttgatcaattagggttaactggaaatgattagcttagcaatgagaatgataatacatcattgatcttgtagttgaagtaaatgtctgtgagctatgttaagctgagagttagtagttactgagatatttttttggtcatgttttagtaaaggtgcgattacagtgggattaccaccagcttgggttgatgtctctgaggagatatctgtgaatatacagcgtgcaaggactaaaatggcggagttgggaaaggctcatgctaaggcgttaatgccatcgtttggggatggtaaagaagatcaacataatattgagtctttgacacaggagatacttttctattgaagaagtctgagaagcaacttcagaggctttctgcttcagggccttctgaagattcaaatgttaggaaaaatgtgcaggtagttttgacttgatggaagctgctcattagttacatctcttgaacacatttcctttctttttgctacatttgccattgctaatctaagatttatcctgtgtgtttaataacagcggtctcttgccatggacctccaacttctttctatggagcttcgcaaaaaacagtctacttatttgaaacgcttgagacagcaaaaagaggtgtgaaactattatctatgtaagtgtaattggtcattttttataccggaaactaggtgatgttgcagtttctcgttctttaaagtttttgtttgctttctgctcctccgcctcagatgaaacttgtttacatcgatttcatagatgatagttctttttagttcttgttttttaagattagattattctgtgctctcaagaagctttgacttgaaatgtattatcatttatcaggctgggatggatttagagatggatctgagcagaaacagatataaacctgaagaggatgactttggcgatatggtttgactcctatagctgtgtccct

SEQ ID NO: 146609 - DNA, 2308 bp, Arabidopsis thaliana landsberg
atgaatcccgaagaatcaagaaggagagcctctgttcaagccgtagcaagagggtttgagatgattaatgagaagaatcagtcaaggaatcagaaagctgcgagtcctggttttactcggatgacaggccgagtacaatggccgagtatggccccggagtcctctgtgggtcgttctgccgctactcaagaggaaatagcaagaggcaagagggtctgggagtccgagccagttgcagaagaaggagtgcctgagatagagaaagaagcatctgaggaagatgtgcaagttgatgaagaggtcccgatagttcctacaagtagaagaaggaacaccatgaggagaaagaaagaacctaccatagaagagcactaccaatatctcatggagctgagttttgaggggacaagatatccccatagacctaccatgcaagctttggggatatgtagagatgttgactacctcatggagatggccaagctggagaccttcttctcctacaagtatgaaggatacaaaactgagagctgccaattcctatccactttgaagctccatttctatgctgaagaaagggagagagagctgcataagggagttggttacatcacattcatggtgtttggaattcaatactcggttcccattaggcagttggatgctattttcaagttccccaccaagtatggaatccgccaaaacttcagcaaggacgagctccttgatctatggttgacaatcgccggtccactcccctacaagtcatctagggccaagagttcgttgatacggagcccggtgcttaggtatctccacctttgcattgcaagtgccttcttcccgaagaagacaaccggccatgttaatgagggagagctgaagttgcttgatctcaccttatgcttcattttgggacgcacaaggaatgggatagagatggaaggggatagggctgatacgtccctttcggtggtgttgattgatcacttgattggttttagggagtatgcagccggaatccaccaatccggctatggaggaagcttatgtgctggaggagtgatcacgcccatcctaatagccgctggagttcctcttcataccccaactcacacagcaacctacatcgatatggagtatttgaagaggaagtgctacttggataggtctgctccagcggatcaactctatttcaagttcaagcactccacgctagatctctctacgctagcactcccttgcaagaagttcaccaccattaggatcactacaagaaaacaggtgataaacgacttacacgacagtcgcatagtagccgtaaaaaatgataatacgactaatcagcgactaacgacgttagtcattattacatagtcgctgaatgagatagtcgtgaattagtcgttgatcgacgactatattacgacaataacacaatcagtaaacaatggtcgctgtatagtcgtatcatattggcgactatttaacgaccatagcacgattaattgtcctgtacgaagcgtgtgaaacacgtggtcgtattatagtcgtataattgtttccgacgatttgacgactatttgacgactaattctatcaatgtaaggaaataattcttgtagtcatataatagtcgtataatgttttacgactattatacgtctcgtggacgattatattgcgactaggtatcttagtcggataataatcggtaattagtgtgactattagacgactattttacgtctaatttgctacctaaatacgactactgagcgactacttgttttgtccgaataagaatttggtcatcgattgttgggtttcttgtttgttggttatcgattgttgttttcttgtttcttgttttctccttttttatttgaaatgctaaaaagatgaaaagacttgtatatatagaaaatcaagtacaaatacacatacaattatcttgtttattacacaaacaacttattcaaataaacatatgttcaagtagagtttgggcaaagataatctaaggatcattaggtggaggacttggtagacgttctgtggttgtggtagagtgacttgccatgaagtccaagaactgcggatcggtttggcggagatacttctcgactaaagacaattgctcgagcttgtccttttgctcagctgtgactcgggatgactcagcttctcgggcagcaatcgcagcatctctcatctcattatatgcagcctgctcttctattttcctttgagcttcctcaaacagttcttctagagcttgaaaggaagatgaagaaccggagtatgg

SEQ ID NO: 146610 - DNA, 717 bp, Arabidopsis thaliana landsberg
attaatgttcctctgcccattttcaagaaattagaaatcatttttctctaagttcttgatcgtcgccatgaacgatcttatctcaagctcattcaagagatacacagacttaaaccaccaggtccaactcgatgacatcgagtctcaaaatgtttctcttgattcaggtaacctcgatgagttctttggatatgttgagagtgttaaagaagacatgaaagctgtcgacgaaattcataagcgtctccaagatgctaatgaagagtccaagaccgtacatgattccaaggccgtgaagaagcttcgtgctcgtatggattcgagtgttacagaggtcttgaaacgcgtcaagatgatacagactaagcttgtagctttggagaaatcaaatgctgcgcagaggaaagtcgctggttgtggtcctggctcgtctgctgatcggaccagaacatctgtcgttagtggattggggaagaagcttaaagacatgatggatgattttcagagactacgaaccaaaatggctactgaatacaaagaaacggtcgagagaaggtaaattttatttcttgatctttcatttaggtgttactctgatccaacaaagaacaaatccttttactatgattgaacaaagatcaaatcttatttcgagaaatgttctatctttcgcagtaagagatggtaaggttttgagtatgtggttgaatcattgaa

SEQ ID NO: 146611 - DNA, 1355 bp, Arabidopsis thaliana landsberg
aaacggtctcaatcttattttcagcgatggcgatgtcaattctaaagctaagaaatttatcggcactaagatcggcggcaaatagtgcccggatcggagtttcatcgaggggtttctcaaagctcgcggaaggcactgacataacctcggcggcgcctggcgtttctctccagaaagctcgcagctgggacgaaggtgtttcctccaaattctccaccacgccattgtcagatatcttcaaggttcgaatctctcttttctgacaatttcaattcagagggggatttcaatttctgacaaaacgtttgtggatattgattggttgcaggggaagaaagtcgtcatctttggtcttcctgtaagaaatctctatcttttcatgttcctttatgtcttgatcaggtttctgagttctgatgttgtgccggaatattcgttttctgtgttcagggggcttacacgggagtttgttcacagcagcatgtgcctagctacaagagccacattgataagtttaaagccaaaggcattgattctgtcatctgtgtctctgttaatgatccctttgctatcaatggttgggcagagaagcttggtgccaaagatgcagtaagttcatcgattttttttttgttcctatctttgttctttgacaccaacctaatccgatgtttagtgtatgctgatttggttctttgcttcagaaaacttgatttgcaacataacatatattattcggttcctggtttcgttgtctaagagttttcagtggtgaagatggttcatttaggaatcttttaactcctcaagtatgtaactcttgttgacgtcctgatagtaatcaacctcttatagttagaacaatattactctattattcacgttgtctgtggtctcaagattttatattacaccaatagacgataaacagatctgattctatgattaaatggacttcccttattagaaagttcataattcttgatatggactagcattacaatagatttctatgtttatgttcggataagtttacgtgctagaagaaatgacttaaatgtgatgctcttgaacgttgtctatgattaccttcacattaatagacgataaaagaatttgattctatgattaaatggacttccctcattagaaagttcataattctttatatcgactagtactacatgctagaacaaatgacttaatgtgatgctcttgaacgttgtcataccagattgagttttatggagattttgatgggaaatttcacaaaagcttggggatagacaaggatctctctgctgcattgctcgggccacggtctgagaggtaatacactggaaagtccatagtag

SEQ ID NO: 146612 - DNA, 3329 bp, Arabidopsis thaliana landsberg; identical to SEQ ID NO: 37261

SEQ ID NO: 146613 - DNA, 874 bp, Arabidopsis thaliana landsberg; identical to SEQ ID NO: 30822
  unsure (1)..(874): unsure at all n locations

SEQ ID NO: 146614 - DNA, 3596 bp, Arabidopsis thaliana landsberg
gttgatgatatgacggcggatttggttataagtcagctattgttactagatgctgaggactcagaaagagacattacgctttttatcaattcacccggtggatctattactgctggtatgttcgttcccatttggacattttcggtgtggatatcgagttttcagattttgaaatgttttttttgcagggatgggaatatatgatgcaatgaaacaatgtaaggcggatgtatctactgtttgcttagggttagctgcatctatgggtgcgtttcttcttgcttctggttcaaaagggaaacggtattgtatgcctaactctaaagttatgatccatcagccacttggtactgctggaggcaaagtacgattctttgatctgtttcatatgcttctcttatggtttttcttttctgctgttaaaaagtgtaagataacagtaaccgtcgtacttttcaggcaacggaaatgagcatacgtataagagaaatgatgtacactttgtttttcattacgatatcctctccaaaatcactggtaagcctgattcaacggtatgtatttgcagtcggttccattggttttcttcgacatgagtcttttcatcacaaccttatgatatccttctttgcagatggaaagtgacacagaccgtgataacttcttgaatccatgggaggcgaaagaatatggtttgatcgacgctgtaatcgatgatgggaaaccgggactaatcgctccaattggagatggtactcctcctcctaaaaccaaagtctgggatctttggaaagtcgaaggaaccaagaaagacaacactaacttgccatctgagcgctccatgacacagaatggttatgccgccattgaatagaactgttgttgcagcgtttacgccttttatatgttattctggtggtacctgtaaccatataacgttgcatttcctgtgtttgtaccatttctctgatagatttttggaataatttgaaggcaaaagatagattatttgttgtagaagaagctacaaaatttaatgattaaattgaatcatcaagccatgagaagctttgtgttttcgcccaatgttcttgccctgtactaaactgcaaatacgttggctcttacacggatcccaaaagccatgctcattatgaacactcttggaacgaggatcatctcatcatgtttgtgtttgatcgtcctttaatctttaatcctttaatgttggtaagaagaagatggttgtttttctggaagacaatgaggatgatttgattgtagttcaggctttcaaaggactcgagggcgtgtctgagctgtattgcacctatggcttcggaagtacgcaacctctcatgcagtctagcagaactcaaccagcttgggttttgagtagccgaaccaaaccgaaccaaaaatcttagttccgtttggttaagtttgttcgcactactcaaaacccccatattaaaacgaaaggcccataagatcagcatagagccggcgaaaaccccatcggaggagatttaggaatggcaagatctggaggaaacgacggacatagagccggcgacaatcgtctctcgaagaggcaacgacttcctccttctcccgatgaatctgaagaggaattagacccagagttgttcgaagagccaagtaatttagaaggatacgaagatggagaattcgaagaagatgaagaagaattcgaagaagaagaagaagaattagaagaggaagaagacgaagaagaagaaaacgttactactgatgaacaatctggaagtcctaaatcatcccaaccggtgaagcttcagagctcagatgttctcgattgtcctacttgttgtgaaccactcaagagaccaatctatcaggtttcttctttgattcataatcttcatatttgtataatcaatttgtagattcatagcttattaggttaatggaattgcagaataagaacatttaggtcacagcttataatatatttagctaattggtgttaaaggttttggctaactctctggtggttgttgtgtagtaagactgttttggtggttgatgatttgtggctaagtctatggtgtttttattgtgtgcacagtgtagtaatgggcatctagcttgttcgtcatgctgccaaaaattgaacaagaaatgctcgttctgtagatgtaacatcggggatatacgatgcagagcgatggagaaggttatcgaagcatctatagtcccgtgtccaaatgcgaaacacgggtgtaaagaaaccaccacgtattgtaatcagtcaagccatgagaaggtttgcaagtttgtccgatgttcttgccctgtatcgaactgcaactacgtgagttcatactcgaatctcaaaagccacgcttgtagtactgcacacgtttggggtgaagacgacatccacttccagttagtgattgaccgtcctagaatttttaacatgaaccttggtaggaagaagacggttgtttttaaggaagagaaagagggtgatttgattgttgttcaggctttcaagggattggaaggtgtttatgtgactgtcaaccgtattgcacatatggctccgggaatacgtgacttgtcatgtagtttggctaagctcaacgagtatagcacactaaggagtggatcgttggtgaagaaaattcagaaagtgagagagaaaatgcatcttgaagatgacttgatgtggataccgcctaaaatgttgagcggtgaccactggaagatgcagatttgcattgcctatggatataaatttattcacatctgaagaatcctctcaaagtctcaattcttttgctctgctcttataacttagaagtagacggtcgttggatcataaaccctgcttcatgtgttatgtgaaaattcttttttagagataaaatgttaattgtattggtccgggttcgactgatttagttggtaccgacttgaactcaaacttaatacacttcaatatgtctcattaagtagtggccgagagagagagggagagggagagatgacgaaattgggaagacgcaacgacggaggaggaaaaagccaccgtagctcaacgaagaggcaacggcgtacttctgtttccgtcgacgaccctagtcccggggaagaagaagagaaaacccttgtggtgcttaccgatgatagcgattctgaggaggatgataaaccgctcggagatgttcttcgaacatgcagaaaagggagggtttcatcacccaaatccgtaactctcccgaattcgaatgttcttgaatgtcccaattgcttcgacccattgaaaaaaccaatctttcaggttctgttcttcttcttcttctttccattagggtttagtgaaattgcaaatgagaagtttttcgctcacgtataataaaggtcacaactttatctccaattggttaagccaagttaaaaaggtcataactttatctctaattggttgagcttaagttaaaaggttacagtttctgtatccttatatgaatgaagctacagatattccatggtggtttgttctctagtgttgtttgttcatttgttacaaatgtttttaggtc

SEQ ID NO: 146615 - DNA, 1144 bp, Arabidopsis thaliana landsberg
gaaaccagctcgaaggaaggagtgatgactcaatgcatcgtgtcattaccgtacttgacgtctttgaggtcgagcctagtcatcttccaagtacgttaacggttagcctcacatgaattgtcgatatatatatctgctatggcatcaaaatcgtcatatcttaatataacttgagagtcattaggacatcatacatagttaggttttatagcacgtaaactttctccattttggtgtttgggtttcttgttttacgaaaatagtaacccgattccagatcggtttagtcggttttgaattggttcgggtttggtataatcagattgaacacccctaaaatacatgaatgccataaagactatatatgcgtaatgtttttatatatgaaactcacacaattttgcagatgttgctggagtgagatgtcgagaaaacgctgagcaatggttcttcttcgtgccacgacaagaacgcgaagcaagaggaggcagaccgagtagaactactggttcaggatactggaaagcaactggatcacttggtccagtcttttccaaagacaacaaaatgattggagcaaagaaaactatggttttctacactggaaaagcacccacaggaagaaaaactaaatggaaaatgaatgagtaccacgccgttgacgaaacagtcaacgcttccacaatccgtaaggtacttgcatataattaaaaacttttaaattagaacattcttgttacttttaataacgagattttttgtttttgctttcttgaaaaatgaaaatgagacgtgagttcagtttatgtcgagtctacataacaacaggaagctccagagcttttgataaacgtcctgagggagttttgcagacagagaaatagctaacaagtaatgttgcagtagctgagacatcgttccgtgtggaaaactcactggaaacttcgttttcagaaggagaacatattgatgtctctatgaacacagagtttgttgatggactatcagaaccgatgtgggactgggaacagctgacttggccttgaggctatatagattttataatcaagcaaaatttgcacatgattcaattgcttattgttagtttgaattttatgacccgaaagattctttttctttcttt

SEQ ID NO: 146616 - DNA, 505 bp, Arabidopsis thaliana landsberg
cttcgacgccgaaggctcaggtaaatgcggtaccggggactgcggcagcaagttaaaatgcgccggcgcaggaggagctccaccagccacactcgccgaattcacaatcggctcctccggaaagaaaaacgccgtgcaagatttttacgacgtcagcctcgtagatggttataacgttcagatgaaaatcacaccgcaaggtggctcaggggattgtaaaaccgcgggatgcgtttcggacgtgaacgcgatttgtccaaaagagctacaagttacgggcccatcgggtgttgcagcgtgtaagagtgcttgtgaggcttttaacaagccggagtattgttgcaccggcgcgtatagtacaccggcgacttgtccgcccacgaattactcgaagatatttaaacaagcttgtccgagtgcgtatagctatgcatacgatgatgcttccagtacttttacttgtactaatgctaattatgagatcagtttctgttcttaggcaaaa

SEQ ID NO: 146617 - DNA, 1410 bp, Arabidopsis thaliana landsberg
atcagttacttatgtatgttggctctgctcttgatgatgcaggaaaactacttgtgcttcttagagatggtagaaagctaatgggaacactccgttcctttgatcaattcggtattcacttttctttccatgtttctagatttacgatattgttgatgagcgggagagatttgacttttttttgttcgttgtaaatacacagccaatgcggttctagaaggtgcgtgtgagagggtaattgttggtgaacaatactgtgacattcctttaggcctctatgtaatccgtggagagaatgttgttttgattggtgagctggtaagacttctccttgtattgtcttttcatgctgtgtcacctcgtgttttacaattccatgagtttgaccttaaaatatgtattaggactcggacagagaagagcttcctccacatatgattcgcgtctcagaggcagagattaaaagggtaagacatcgcataacatgttcattttgattagccaaatttgattcatttgtgatgctgtgtgcgtgctgatgatttggttttcgggaatctgtctgttgatgcaggcacaaaaggtggagagggaagcgagtgatctgagaggaacaatgaggaagagaatggagtttcttgactttgattaaaccagattgtatccccattcattattggcttgatgctctgctttggctcgcaagttttatgatgagcctttttggtgtgttgacttaggggatcgacgcaattcttgtgtttcattttggatgaatatgacaataaatctgtgtacttttgtctttggatctatttacctttttaagaaaaaaatgttaagcaatttctttctctattttggaacttttaaacaaggagcttgcctatggctactaccaaacggaacaaaaatggagcaaatgagtagaggacgtcgcacattgcaaaatttacatggtacttattggttctgtgatcaatcaggacttttataaatagaagacatatggcacaaacaacaacacacaaatatgttcacctggagattattccaccgggcaggaaacccgtgaataaaaattcaaagaatggttctatttctatgacatcctaatgtgactgaaaaacgaaagaaagaagatagaactctcgggttttcgatcttcttttatcgcctcctcaagtgtggtggtgtggtatatccttcgaagaaatctagaacgatggtctcgatatcttcaaccgaatatttcaaatagttctcagggtgtcttccactctctatatgacccctgaaccttccaagaaacgatctataagcagggattagatgctcggatagcgatattaggagttcttctctaagctgagcatctggaaccgaccatgtggactgagtcctgtgaac

SEQ ID NO: 146618 - DNA, 1037 bp, Arabidopsis thaliana landsberg
gaccaataaagttatagtctgccattgcagaaatcagaatctatgtagtcattttagtttctgaaatcttgtttttggtacctgcaggtggatctccgagacaggcctgcgcttgagaagatattctcagaaacaaagtaaaaaagcttttcttttttatgattaggctgttgatataattgaggggtcgaagtttaatggaaacgtggaattatgataggtttgatgcagtgatacactttgctggacttaaagcagtaggtgagagtgtggagaagcctttgctctattataataataacattgttggcactattactcttttggaggttatggctcaatacggctgcaaaaatgtaatttttttccttcctctctctttttctaattgccaccacatgcattccctttttgagtttgtcttgtttgatctcattattggcttttactactctgttttccagcttgtattttcatcatcagctactgtctatggctggcctaaggaggttccctgcactgaggagtcaccaatttctgccactaacccatatggccgtacaaaggtagcacctttagcctgagtattgacccaagcccaccttgtgatagtggtgatgaatgataataatcaggaaatgaatctgactgagattatttgcttgtgctgtgtaagctttttatcgaagagatttgccgggatgtacatcgttctgactcggaatggaagatcatattgcttagatacttcaaccctgttggtgcacatcctagtggttacattggtgaagatcctcttggagttcccaacaatctcatgccttatgtccaacaagttgcagttggccggagacctcaccttactgtctttggaaccgactacaagacaaaggatggtacaggggtatgtgacttatgatgtcttatagacaacaaaccatttgacagcctcacattacaatcttaaattgtgatatataatagagtatgggagataatacaacgaattgtgaattatattaacgggtattacttca

SEQ ID NO: 146619 - DNA, 6534 bp, Arabidopsis thaliana landsberg
  unsure (1)..(6534): unsure at all n locations
ttaaacttaagtagaattgttttttatatagaaatggagcaagtcgatcttaaatgttagatcataaataaacttctcatgaaacctaaaagaaaaaatatataaacacccaaacccattccattcacttcaacaactcaattacaattatgcttatatatcttacatgcaaaacttcatcattatcatcatcatctctagctcctcctttgaatcttttccaaattcaacttccgaaagagataaccctaatttctagtcttcttcttctaaattttcttccatggatatcgaaaaggcagggagcagaagagaagaagaagaacccattgttcaaaggccaaagctagacaaaggcaaaggaaaggctcatgtatttgctcctcctatgaactacaaccggatcatggacaaacacaagcaagaaaagatgagccctgccgggtggaaaagaggtgtagcaatcttcgattttgttcttagactcatcgcagcaatcacagctatggctgctgcagcaaagatggcgacaacggaagagactcttcctttcttcactcagttcttgcagttccaagctgactacactgatctaccaactatgtcgtaagtttctctccaaatgttactcttactataggttataccaagaatgtagtaaccaactatggaaatgaaacccaaatgtgtatagtcgtactatagataataccaagactgctacgtagcttaacccgttgaatccaaccaaagccaggctagttgcaaagttcaagcagtagttagagagaaaaaatgagctacgttttaaataagggggaaaaaaaaactatcaacatgaatttcgagcaatgtgcttggtgcttattagggatttaattatggtacatgattttcgattatataaagattcaaacttatatcattttttattgttttgttttgcagatcttttgtgatagtaaactcaatcgtgggtggctacctaaccctctcattgcctttttctatagtctgtatcctccgccccctcgcggtgccgcctaggctattcctgatcttatgtgatacggtaacatttataaaaaaaatttgaaaataaatagttataataatgcaatgccaaacatacaaatgaaatttctcattttgtttgtggtttaacaatgaaacttttcgtagctttaaaaaaaagtacaaacgcaaacgctaaaataagtcaaggctttacttaagctcgagtaatccttatattggtcacaaattacaatgaatatgtttgttgagtaaacatatgacaaatccctctaactagttcgtacggttgtgttggtccaggtgatgatgggcctcaccctgatggcggcatccgcttccgcagccatagtttacttggcgcacaacgggaattcaagctcgaactggcttccggtttgccagcagctnttntaggtggggtnnttaagggggacttttgccaaggaacgagcggtgccgtggtggcatcctttattgctgcgactcttctcatgttcctcgtcatcctatctgcatttgctctcaagagaacaacctgaaaacttggattgatcctcttgactaaatttttatgtgctttgatattcatttgtgtgaatttttattaaaaggttcctatgtataatttggttttgttgtgtttggtaactcgggttttagtgtggaaaaatgttgtaaatcaatcttctatattcacatattgttttctttttccctatataattttcgtttcaaagataacaaattttaaacttatatctgcccgtcgatcatccaccaaaagtgaccgttgggagtctgtctgttcgatggcgcaccggacagtccggtgcacaccgaacagtccggtgccccctgccacgtcaccagtgccgttggaaatcgaccgttggagttctgactgctgggcccgcctggatgtccggtggcgcatcggacacgtactgtagagtgtctggtgcgccagcatcgtgcgtgcctgacttctgcgcgcnnnnnnnnnnnnnnnnnnnnnntgcaggtgaccgttggcgcgaagtagtcgttgctccgctggctcaccggacagtccggtgtgcaccggacatgtccggtgaattatagccgaagtcgccggagaaaaacccgagagcggcctcttcggtcgaggcagcctggggcaccggacactgtccgtgtgcaccaccggacactgtccggtgcaccaccggacagtccggtgccccagaccgaagcagccccttggctgtacacagccaagtcttctcttctcttcttctatctgtttctaacacttagacaaatatattagtacacaaaaccaatgtactaagacttagacacatacctgtacttgtgatttgcactttgatcatccttgggcatattttcacatttaagcacttgtgtttgcactcaatcaccaaaatacttagaaatggcccaaaggcacatttccctttcacccacatcgacgccatggttatcaactgcagcgtggcaggctgggacctgcacaaagtcttagtcgacaatggcagccaggcggatatcattttcctccatgctttgaatcgcatgggcataagccacagcctgctcatgcctttggacaaccccctgtacggcttcggcggcaagggcacctttcctatcggcaaaatagagttacctctctccttcggtgtagcacccaatgcccgaagtgagcaagtcacgttcgacatcgtcgacatggtgtacccgtacaacgccataatgggccggggctccatcaacaagtttgagacaactattcacggactttacctgtgcatgaagatcccaggtcccaaggcgccatcacagtctacggcaaccagcagacggcgcgcaacatagagcgggacttcgtgcccggtcagagaaacgtgcactgcctcacgacccagcgcgaggtccctgcgcccgccagcccaaccaataaacaacacgacaaggcacagctgcagagccaagacgggaccaagactgtccccctcgatcaggccacgcccaagcagacagtcactatcagcgaagaccttacctcgcatgaagaagagaaactcctctgctgcctgtccaagaataaagatgtcttcgcctggtccgccctcgacctagtcggagtcagccgatccataattgagcacagcttgggaattgacccttcggtgcgaccaaaaaagcagagcgtcgcaaaatgtccgacgaaaagacagaggcgccaaggcggaggtgcaccgcctcctagaggctaaattcatcgagccagtggcttaccccacgtggctctccaatgttgtaatggtgcagaaaaaagcgggaaatggcgaatgtgcatagacttcaccagtctcaacaaggcctgcctaaaggacaatttcccgttgccgcggatcgacaaaatagtcgatagcgcggccggatgcgaggtcatgtcactcctcgactgcttctccggttaccaccagatatacatgaaggaggaagacaaggctagcaccagcttcataacacccttcagcacatattgcttcatcagaacgccagagggactcaagaacgccgggtccaccttctccagactcaccaaaacagtgttcgaagggcaagttggcagaaatatatttacatatgtggacgacatcgtcgtcgccagcaagagcaaggaggaccatctcgctgacctcgccgagactttcgcgaacatgcgagatgcacgactccgcctaaacccggaaaagtgcgtcttcggcgttcgcaaggcaaaatattgggctacctggtatcacaccgcggcatcgaggccaacccaaccaagatccaggccatcgtaaacatgacgcctccgcagtccgccagggacgtccagcgcctgacaggcaggatggccgccctcaatagattcatctccaggtccgccgagcgaagtctccccttcctcaaaacacttcgcgatgcgaaagacttcgcctaggggccggagcaagcagcggccttcgcctcactaaaacagtacttatcggagctggccatcctcacaagccccgactcctcgctccccctattgctctatgtcgcggcttcgccgcacgcggtcagcgcggcactagtgcaggagcagactgttgaaggcacagtcagacagtgccctatttactatgtctccgaagtcctgacaccgtccaaatgcaacatgacagagctggagaagatcgcctacgcagttgttatgtcctcgcgcaaactgcgccattactttgaagcattcaaggtccgagtcacctcggacagggggctcggcgaactattcagaaacccggaggcatcggtgaggattgccaagtgggcaggcgaattctccggctaccacatgagcttcgagcccaggacagccatcaagtcacaagtcctggcagacttcatcgtcgactggactgggccaataacacagccggacccgtccacagagaaggtttggaccatccattgcgacggcgcatggtgccatgcgggggcaggcgtcgctgcagtcgtcacctcaccagccggagtcaaacacagatgtgcagcacgcctcagcttcgctctggaatccgacaaatgcacaaacaatatagcagagtatgaagcggttatcctcggcctccgcaagctaagggccctcggagtcaccacatgtatcatcaagacagactccaagatagttgccggccaggtcgagaaagactatgcagcaaaagaccccgcgctcatgcaatacctcgcggctatccgaagtctcgagagacagttcaagggattcaccctgcagcatgtggatagggccaagaatgaagaagccgacgcattggccaaggctgccgccaggggcgagtccttgccctccgacgtgttctttcacatcatcggcacgccagccgtccggagccccgaagggctccaaataactaatgatagcgagggccaccgtatagtcaacctaatcatgaccgaagactggcgggcaccaataaccctgttcctacaggggtactatcatccaaccgacatcaacgaggccaagcgcctcaaacatcgaagccgggacttcgcactggttgagggccaactctacaagaagggtgtcagtcagccaatgcttaaatgtgtcaccgagaccgaaggcgtccaaatcctgcgcgaagtccacagtggtacttgcggctctcacgcagggccaagggccctagccgcaaaggtgatcgccaaggtttctactggcccgcaatgatctgcgccgcaaatcgggtcacaaggtcctgcgacgctgccagaagttttctcctcggtcaagcagcccctcgcagtatacaaagctgattgtccacacatggcctctccagcgctggggcctggacattgtcgggcccctgcccaccactcaggggaaccttaagttcgccttcgtcgcagtcgagtacttcaccaaatggatcgaggcaagggctgtttccacaataacatcaaaaactgcccagaaattcttttggcaaaacattgtttgccgcttcggagtaccgtccgaactaacagtcgacaacggcaagcagtttgacagccaagacttcaaggatttttgcttctccattggcaccaagcttgccttcgcctcagtatatcacccacagtccaacggagttgtggaacgcgccaatggaaaaattttcacagctgtcaaaaagatgctcgtcgacgaaaaaagggcaagtgggccgatttgctacctgaggcggtctgggcgctaaacacgactgagtgcagggcgaccgggttcacccctttccgccttctatatggatcggaggccatgaccccacaagaaataaaacatgggtgcccgcgtacagctccgtcagccgtccccgacgtggatgagccaacttcaaaagatctcattgacggagaccgggtcttcgccctacaggccctaaacaaataccaagcccagaccaaagcatggcgcgaccacgcagtcatcccgagggagttcagcgaaggggacctcgtactcgtccgaacagctcggacagagtccaggggcaagctggagcgccaagtgggagggcccctttatagtcaagacgaaagcttcccccagcgcttacaggctcacaacgccaaacggcgaagacctggagcactcctggaacgtcgacaacctccgcaaattttttgtttgactcctcagggctgatttcgcccttgtaattcgcaaaaacaatcttattctagtccggcactcttttcctcccagggggtgaggtttttaacgaggcggagccatgtaatatatgtctgaaatcccccgcaaaaacatgcgtcgaaaaaagaccgcgacgacggtcttcgacattcgaccaatacgaggtcaccgcgaggctaagcgctagccaccctcgtgtgcgacaaatccgcgcagaagtcgcctaa

SEQ ID NO: 146620 - DNA, 1248 bp, Arabidopsis thaliana landsberg
aagcagaaaagaattgattttgagaaaaaccgtcttccttcccactatgacttgcttcttcttgggtttctggtgagaatttgcagaaaataaaagaattatctatctgacttcatcttttggaccctgtttcatacttaagaatgtgaatgcagacattaatgtgtggtctacttggagtccctccatcaaacggtgtcattcctcaatctccaatgcataccaagagcttagcaactcttaaataccaggtaacatcactgaccgcggtcttatttttcagtctttcctgagttttgagattgacgtttgctctctctctgcagttgcttcgtaacagactggtcgcaacagcacgaagaagtatcaaaacaaatgcgagtttgggtcaactctatgacaatatgcaagaagcttaccatcacatgcagacaccattagtataccagcaaccccaagtaaaaaaaaaaatctgaaaaactttctatgttttgtcaatagaacacgaaactgagagttagttctttccattggcagggtctaaaagagctcaaggaatcgacaatccaagctactacattcaccggaaacctcaatgctccagttgatgaaactctgttcgacatagagaaagaaatagatgatttactaccagttgaagtcaaagaacaacgggtaagcaacttgcttcagtctacaatggtaggaggatgcgttgcagctatgcctatccttaaaatgatcccaacatcagtcctttggggctattttgccttcatggccatcgaaagcttacccggaaaccaattctgggaaagaatcttacttctgttcaccgccccaagtcgccgcttcaagtaataactaaagttgcaatctttttctcacattcaacttcaaaaaggctctcttttttctcagttcggtcacatttctatttgtagggttcttgaagattaccacgcgacattcgtggaaaccgttccattcaagacgattgcaatgtttactcttttccaaacgacttatctcttgatctgctttggtctcacatggataccaatcgcaggagtcatgttccctttaatgatcatgttcttaatccccgtacgacaatatctcctccctagattcttcaaaggagctcatcttcaggacttagatgcagcagagtatgaagaagctccagctttacccttcaatctcgcagcggtaaccaaaaacccatttacaaagtcaataactctg

SEQ ID NO: 146621 - DNA, 1196 bp, Arabidopsis thaliana landsberg
caacacactcaagacggttttcgtacccacaaaagacaacaagcgactcttctctaacttcatagctgggattgccatcgctcttccactctattgcttctcattcgttcttcttcagattcatcgttagaaaccgtgagtccccaaatcattctcattggccatccactcataaaaaatctaacgaaaactttgttgatttctgtcatttacaggcaaaaacaagtgtttgttctttgtgtttcttcattgtggtcgcatcaaagcaaaggaaaataagtaaaaagacaagttagttttgttgatcattttcttgtgcacattcagcttcaaaggacgttcaccaaaggcagaaccaagaaccgcatagaccaacatcgctcaactacttttctctattgccatacaaaagcgaagtaattgtctccgatttaaagttttcaattttttgtgctatattctttagattttgttttgtaaggattaagcaaacaatatgtagttcgtccaaaaatgtatagtgatgttaaagaattatatgaaattgcaaagttttaaagaagaattcattctcaacagtcactgacatggttttctatcagtctagtcttgcaatttctgcggttcgctagccgagaatggaaaacattacccggggagatgaaaatgtaatgactctagttttcacagctattacttggcaagtctacacaattgtcttgtgtggcattgatctttgagtcatcttctgtgttctcgataaccgtcgtgagattgcctattgtccgatactagcagtggtattgtttcatgattaaatggaagggacaaacgtcatctccatcatgatgacaaaaacttgacgaaccttattcctgatctgcctgcaataagaaactatagtatccatgtgtagcctaatgcatttgtatatgaaaaagttcatcaaaaccaaatttcaaccttacataaaaacagaaatacataacgaaaagcaaaatcagaacgttttacgtccaaagtattcaaccttcgtaacagagtttggcaaagtcgaaaaattgtcatcaaaaaagctttgctgctaaacttctcgatcctcgttacgatcttctcgaaatgaattcgctttgcctctaagtttcatcagatgtgtaagaatctcgttcatatcaggtcgatcttcaggtctagag

SEQ ID NO: 146622 - DNA, 1444 bp, Arabidopsis thaliana landsberg
caagaaaaagccgatgagttagcttcacttggattcactgttctttggttacctccaccgacagaatctgtgtcagcgtggggggtacatgcctaaagacctgtataacttgaattccaggtgagttccgcatttttatcagactgtcttttgtagcttagttgcttaaacttcgtcatggattgttgaatcataaagtagaattctggttaatgttgtttttgttgccttaaatgcatgatcagccagcagtggaaatgttaattctcttaggagattaacaatacttatgcatttacatgatatcatgtatctgaagtacatgtttccccctattttttgttgcaaactttcagatatggaacaattgatgagctaaaagatacagtgaagaaatttcacaaggtcgggatcaaagttttaggcgatgctgttctgaatcaccgctgtgcacacttcaaaaatcaaaatggtgtatggaatctatttggaggacgtctaaactgggacgatagggcagtagttgcagatgaccctcatttccaggtattactttcctttctttggatttaaaataaacagctatagaacgaaagcgaggcaaattttttgatagagaatgtgctttttgctgttatatgctgccgtattatgaacttggactagtgtttttgagagaaataaggtgcatatgatctctattacccttgatgatacaatcaactaattcattgattcagggtagaggaaacaagagcagtggagataatttccatgatgctccaaacatagatcactcgcaagtctttgttaggaaggatatcaaggaatggctatgctggatgatgttagttcccctgttatttgtttaatatcttcttctgattagtttggtgtctgatttcgttcactattttgatttcacctgcagggaagaagttgggtatgatggatggaggcttgactttgtaagagggttctggggaggttatgtgaaagactatatggatgctagcaaaccgtactttgcggttggtgaatattgggattcgttaagttacacgtacggagaaatggactacaatcaagacgcacatcgtcaaagaatagttgactggattaatgcaactagtggagctgctggtgcatttgatgtcactaccaaaggaattcttcatacggtactaataatatcgtatcttgttacgtttgatacaacatttccttttggtatataatatctggtagctttctgtgtgtaggcgcttcaaaaatgtgaatattggagactctcagacccaaaagggaagcctccaggtgtagttggttggtggccttctcgtgctgtaacattcatcgagaatcatgacactggctctacacaggttttatttctcagcattctaagtacctcaagtttctgttctctataaataaaccgtct

SEQ ID NO: 146623 - DNA, 1721 bp, Arabidopsis thaliana landsberg; identical to SEQ ID NO: 9344

SEQ ID NO: 146624 - DNA, 2306 bp, Arabidopsis thaliana landsberg
  unsure (1)..(2306): unsure at all n locations
gattgcgtcactgtagtagtagtagtaatgtctcttcttcttcttcttcttctcttcttctgttgcttctttgcctctctttctatttctcattctcatggagccggagcttccattattcacatttctcctactcagcctcccacaggtttgtgttttctctcttgtaggttctttcttgaaaaagctttctcttcttctacattctctgtttcttgtttccctgaaaatgctcaaaactttacagattttcgactaatttcagtatttcacaatggggtttgtctatatctgaattttctcagtagcttctggaacttgatgagtcttgaacattgactatttgcaatttctagggttgacataacaaaaaggagtttcagtctctactacaatttatttgtttcttgaatttcaatctgattcgtctcttttcagcttcttcagagaaaaccggttctgtaatgaaatttatagtagcagaggcaccattattaggacctgcaggtttcaacaaccctcaagtaattgaagttgcttcagtagctttagctgctcaaagaacatatagaaaagatcctctcaatggttttgagaaatatactggaggatggaatatcagcaaccaacattactgggctgtaagattctttccacttcaattagattgttgtttttttctttgtgtgttgctatgatttgttgattatgtgttttgtgtgttttgtgtgttnnnnnnnnnnnnnnnnnnagctatacagctgttcctctctttgttcttgctgctgtttggtttcttgggtttggcatttgtttattagtcatctgtatgtgtcacatttgccatagaaccaattctgttgggtactctaaagttgcttatgttgtctccctcatcttcctcctcatcttcactgttattgcaatgtgagttaagagaaaatattacaagttatgatttggctttgttgttttctctgcttagcattttgagttcttattatgtagaatcggttgtgttctgctatactcgggtcagataaggtataataaaagcacgacagagacattagagtatgtcatgagtcaagcagatagcacgatttcgcagcttagagctatctcagattatcttgcttcagccaagcaggctgcagttcttcaggttcttttacctgcaaatgtacaaactgaaatcgatcagatcggagtgaaactggattcttctgtagctactatcactgagaaatcgactagtaactccaatcacataagacatttccttgattctgtgtaacaaactcctcctaacagtctatctgttacagaatctttggattttgaaaaacaaatgtataatagtcatttctgtactcgcaggagagtggcgcttatcgtagtttcaatcgtcatgcttgtggtgacttttcttggtctnnnnnnnnnnnnnnnnnnnnnntacatgtttctcaactatcaactaatgtattgaccttagtgatcttgttatcatttcttctcctgcagtttcttcgatttgtactgcagacacatgtgtggcaatgagcgaatgggttgagagaccatcaagcaatacggctctggacgagatattgccttgtacagacaatgccacagctcaaaaatccttgatgcgtagcagagaaatgcccacgggctgacccgtatatccgctgggctttgcgggccgggcttggacactgataattttatccgcggtcctaaacgggccaacccgccgcggcccgaaaaagaaagcccactgcggggcgggctagatgggcgcgggccggcccgtctgacacctctaacagggtcccttacggcagtcgaccctgcaatcgagtatatcagtcatttctgtgactttttactgttttttgcatcaacactaggactgttagataaccaatcaaattctgcttggcttgatttagcaacttctgatcatatctcatctgtctacatcacacccttttggattgacacctaaaatactacaacgataggatagtattttaggattaattgaccgtaaaaacctactatcatatagaagaaatcacagagaactcacatgaacctggtatgtggctagttttataccaaccaagtgatgaagttgaaatatttttatcatcagtattcgaggcattttatttttaccagtaacacaaacgtgaatttgtcttggagttgacatctagttaactactgtggtctgtacaatgttttaacacatgctgccttttaagtatagatcaaaatgctcgtggttcgaatga

SEQ ID NO: 146625 - DNA, 2628 bp, Arabidopsis thaliana landsberg; identical to SEQ ID NO: 37504
  unsure (1)..(2628): unsure at all n locations

SEQ ID NO: 146626 - DNA, 1240 bp, Arabidopsis thaliana landsberg; identical to SEQ ID NO: 58450

SEQ ID NO: 146627 - DNA, 2138 bp, Arabidopsis thaliana landsberg
  unsure (1)..(2138): unsure at all n locations
gctcgatttctaatgtgttttggtntggtgtntaggtcaccgaagacgcccatagaactagccattgactttatcttgcatgattttgagatggctggtgagttcttgagaaacacacatgataataatgtcgcagattgattggttgattgattctttatactactaatttcagaggtagagccaatatccacttatgtagactttggtgaaagagagttcttggttgctgatgaaagaggttacgaatgtttactttataaaatggctgaggaatttctcgttacctcacatggaaatatcttggacaaccgcctcaaactaaaccaggtatagtaagatctctgatattgattaggttttgagttaaaagagtatatattgacgttatttggaaagctacttttgctttttagctgttgtcactctctattaggttgattgatttgcattatctttttttctgctaaggttctctcagcctttggtgtatagtggaattgattacattccgggtccttgtagctatatttttgtttagtatagtaacagttttcaattgaaagttgatagtttcttgggaagcattattgtggggtatgcatgaatgagcgtgttttatttattgcctctctcataaaccagctggcttaactttgaaagctgtgtgttatattagtaatctatattggaggagcaatagtgtgatgaagttgtgggaattaatggcaggtagttagggaggtgcaacagtctatgaatggggtagtggtgaagacagaggatggttccgtatacgaagctaattatgtgatcgtgtctgcaagtatcggtgttctccaatctgatcttctctccttccaaccccttttacccgttagtttactttctcttcttcttctcatataatcataatttatgatcaactactcattggtcttaccttttatgcttatttaacattttaaaagatacaaggtgtagatgtttaatcaatcaatgtgcatgaatctagggaaatattaaattgtatcagccattaggatagcaagtcaaatattttggtgtctatatgcattattatgcttactatccaaaatttatatttggtgacagagatggaaaacagaagctatacaaaaatgtgatgtgatggtgtacaccaagatcttcctgaaattccctcaatgtttctggccatgtggtcctggtcaagagtttttcatttatgcacacgaacaacgnnnnnnnnnnnnnnnnnnncaggttaaatttcccttaataatgagattgtaattgtttgttaatgtcgatgcatctttttggtcgttccacttaaggtcgaaacgtggcacatattgactctctaatcttaaaattaaacacctgggggtccctttgatttaacactatcattgcttttatattatcttgagtgtctctaactagcggcatgatccatgtgggtaagagtatagaattcacacaataatataataatgtgtatgcatactacaacttgcttgctctcctctcaagcttatatgtgtgcttttggtaacagcacatggaaaatgcgtacccgggctctaacattctggtggtgacgttgaccaacgaacaatcaaagcgcgttgaagctcaatcagaccaggagacgatgaaagaggcaatgagtgttctcagggacatgtttggggccaccattccttacgcaaccgatattcttgtccccaggtggtggaacaaccggtttcaacgcggtagctacagtaattaccctatgatatctgataatcagcttctgcaaaatatcaaggtaaacacattttgttgttgttattaagacgcacacacatacacatgtctgtcagaaatttaagaggtttatgtttattcaggccccagttggacggatattctttacaggagaacacacaagtgaaaagttcagtgggtatgtacatggaggataccttgcaggtattgacacaagtaaatctttgttggaagagatgaagcagagtttgttgttacaacctttattggccttcaccgagtctcttacactaacacatcagaagcctaataactctcaaatttacacaaatgttaaatttatctcaggcacaagctag

SEQ ID NO: 146628 - DNA, 986 bp, Arabidopsis thaliana landsberg; identical to SEQ ID NO: 24403

SEQ ID NO: 146629 - DNA, 628 bp, Arabidopsis thaliana landsberg
gtctttttgcacaagaaacaaagctcaggaaaacctcaaaaccctaagctatgagaacaagtaaccatctcataggtttagtcaacttcctcacttttctcctctcaataccaatcctcggcggtggaatatggttaagcagccgagctaactccaccgactgtttaagattcctccagtggcctctcatcgtcatcggaatctcaatcatggtcgtatctttagctggattcgctggagcttgttaccgtaacaagttccttatgtggctatacctagtagtcatgcttctcatcatcgctgctctcataggtttcatcatcttcgcttacgcggttaccgataaaggatccggtcgaaccgtgcttaaccggggttatcttgactattatcttgaagattactctggttggttgaaagatcgagtctctgatgatagctattggggtaaaattagttcttgtcttagagattctggtgcttgtagaaagattggaagaaattttaatggtgtccctgaaactgctgatatgttcttccttagaagacttaacccagttgaggtaactttctataattattacttttcaaaacaaaaaaacaactttcaataattatgtttctctgt

SEQ ID NO: 146630 - DNA, 1350 bp, Arabidopsis thaliana landsberg
attttcaacaggattacttccctgctgcatcccaatttcagcaatcttacttcaatgggtttaccaaagaagtcctctctaccagtttcaacgtatgctattcttccctagaacatgttatgaatttcttattaaatcaggcacatactaaggattggaagaatttattttttttggtataggtgccggaagaattgctagggagattggttacgagatcaaaagaaattggtcaagggattatccgaagaatttctccagaccaaatcaaggaacttgctgagcacgctacatctccttcaaacaaacacaaagccaaaaaagaaaaggaggaagacaaagacctaagaacgttgtggactcctttcaatctctttgcaatagatccaatttactccaacgactttggtcatttccacgaggcacatcctaagaattataatcaactgcaagaccttcacatagccgccgcttgggctaacatgacacaggtttacattcaaaaattttaatatatcatgtggtatgatgtatcaattggtttaattactagctaatcgaaaaatcgggttgtgtaatacatgcagggatccttgttccttcctcattttaactctaagaccacatttgtaacgtttgtggagaatggttgtgcccgcttcgagatggctactccttataaattccaaagagggcaacaacaatggccaggacaaggacaagaagaagaagaagatatgagtgaaaacgtacacaaagttgtgtcacgagtgtgtaaaggcgaagtttttatcgttccggcaggtcatccattcactatactctcgcaagatcaagactttatcgcggtagggtttggtatttatgcgaccaacagcaaaagaacgttccttgcaggtaaagaaaagggtttcaacagatagttctctaaaattatatttttgagtttctcccactctaaaaggtatattgtttggttgggtgtaggggaagagaatttgctgagcaacctcaacccggcggcaactagggtaacctttggtgttggaagtaaagtcgcggagaaactgttcacgagccaaaactattcctactttgcacctacgagtcgtagccaacaacaaattccagagaaacacaagccatcgtttcaatcaatcttagactttgctggtttttgaaaatgcttttttacagtcctaagaaaggaaagagtttaagagtttaatataatctttgtgaagatatgcaataaaatatggtaacgctctgcatgtaacttctatgtactggtttcttgagttgtaaatttttatgtgacagttttaataaaaccaacggtttagttat

SEQ ID NO: 146631 - DNA, 1989 bp, Arabidopsis thaliana landsberg; identical to SEQ ID NO: 25342

SEQ ID NO: 146632 - DNA, 962 bp, Arabidopsis thaliana landsberg
acttgcagaaacaatcagtctcataaagtggcaaagatggttgcagaacgatacacagtcgatttgaataagccacttgtgtttcaggtgatgcgctcagtcacgtcttttccgcatagcctttttttaacaaattagatcgacaagacaaagtatcaaatggagaattctctgtcaatctttaaagctgtttcgtagattctttgatatatacaatgcataacaaattactaatacaaagaaacttatatccttgtcaggttggtcatcttggcgaagaatatcaggaatggattcatcaacctattgtatgcgtagagggtcctcgttttttcgaaagtgatttttgggaggtaacaactctgcctttctaagatttatcttcctatatgtaaaagcctctatgttttgcttaaatctattcttttgggaaatttgagcagttcttgactcgcacggtttggtgggcaatcccaacaatctggcttccagttgtttgctacgttctttcaatctccgcgagtaagggacttacatttccccagatcggtttaatagttgcttttggtgtactcacgtggacactcctcgagtacacgcttcatcgtttccttttccacatccaaaccaagagttactggttagttctgtatctatgattatgcaacatagaaaaaaaactgagtttcatcacgaagctgattctgtttcatttcaaacccttttttcttcagggcaaacactgcacactatcttcttcatggatgccatcacaagcacccacaagacggccttcgccttgtttttcctcctactgcaacagctattctcttggttccagtaagtatccatgcttgatccagatatggaatctctttcattcattctttacttcaatacgaaaacattaattgatgctcactttttccgttgtaagctatggaagcttctccatctcctag

SEQ ID NO: 146633 - DNA, 3906 bp, Arabidopsis thaliana landsberg
ttaaatgtattttgattttaataattgttaatataattcagtgattgatatggaagttattaatttcataattatatggtttttgttatcagcacgacaaaaagaccagttcccctagagcattgtcttttttactctggagaactctacaaagtttgtgagaatgaagttcttctttcaaaagggataaaggatgctaaagattcacaaaagaagaagaattcaaatgcagttagtgttgcacctaaacaacaaatgggatcttcagctcatcaagatgggagcaaatctcagaaatatgaagctcattctcgtggcaaacagaataaacactcaagtgcaaaagatgtgggaaaatcctcttacagtggtaacagtcagaacaatggggcatttagacgatcagcagcttcaaattggttactgcttatcaacaagctttcaaaaatgtccctattacctgtatgttagatgtagcttctgttctgtttcttatattcaattttagtcttgtccgttctggtccgttatgtctaacttttaatatttcttttcccgttaggtggttgtcttctgtttctcgaagaattattgtgataggtgtgccgacgccttgactgggaccgacctcaccagtagctctgagaaaagtgaaatccgtgtcttttgcgataaagcgttttcaagattgaaagggtctgatcggaatttacctcaggttggttatcttaagactttcctgactttcctgtcttctcacatattagatttcctactcattaactgttggggtaacacattttataggttctcagactccaaagcttacttcatagaggaattggtgttcatcatgctgggctgcttccaattgtaaaggaagttgttgaaatgcttttttgccgtggtgttattaaggtaggcttagaaactcagggacctgtgttattatatgagcctaccccattaatacaatgctggagttaatagttatctatgcttatggttgctgcttttaggaaatctaattgccatgttttcttaatctgaaatgcttcaggtgatctatttttattaatcttcctgcaggtgctattttcaacggagacatttgccatgggggttaatgctccagctagaacggtgaggctattttgatttttattattaatgttaatctggtgctacaatgttaagtgggttattctttacacataagtatcttcatatcatgtgggggaacaagtgtgggtattctgataagcatattattcatataaataacttctcgacgatattcgctacaggtcgtttttgatgctttgaggaagtttgatggcaaggaatttagacaattgcttcctggagagtacactcaaatggcaggacgtgctggcagaagaggacttgacaaaacgggcacagttgttgtcatgtgtcgcgatgaagttccagatgagagtgatctgaggcgtgtaattgttggaagcgcaacaagactagaatctcagtttcgactaacctacataatgatcctccatcttttacgtgttgaagaattaaaggtatctcaatgtccggaccgttgatctgccatgcgttttgctcaccaagcctttctcttggctttttctgactcgccagttttcaaatggttgttattgttaggtggaggacatgctgaaaagaagttttgctgaattccatgcccagaagaaactacccgagaaacagcagcttctcatgataaaacgttctctaccaaccaaacatattgagtaaggacaaagcctcattttacggatacttgaaagactgaaaatctactgaatttttatcctctgatggatcgccaagctttttgtagtctcagtagaattataaagaactcctattctattgtctcgtttgtgtcacctctgtattcaacttctctgtagaattgatctattgatttattcatccagatgtattaaaggtgaaccggcaattgaagattactatgacatgtatatggaagcaaatgaatataacaacaagatgtcggaagcggtcatgcagtctccttatgcccagagttttcttgtacaaggaagagtagtggtcatgaaatctggaatggtgagaccctgtctctaccactcttttatctggttcataaattggttgctcatgcgtgtaatttttacagggcatagacaatttactcggaatcgttctgaagggaccttccaacactaacagacaatatgttgttttggtgataaaatctgaaataccgccaccagagaaaaatatggtcagcattggcaagaaaagttcagatccttctcaaggttattttattgcgcctaaatcaaaacgtggttttgaagaagaattttatacaaagccgagctctcgtaaaggtcccgttgtgataaagatagagctcccgtaccatggggtcgctgctggtgtaggttacgaggttaaagggtttgataacaaagaatttttgtgcatatgcgatagcaagataaagattgatcaggtgcgcctactcgaggatgggaacaaggcagctttttctcagacggttcaacagcttctggatctgaaatcagacggaaacaaatttcctcctgctctagacccagtaaaaggttaattaactaaattatagctctgtattagtttttccggctttaagttcatttccctcttatattcatttcatggttctatttcagatttgaagctgaaagatgctgagcttgtggagacatactataaatggaccaacctattgcaaaagatgtccatgaataagtgccacggttgtgtcaaattggaagagcacatgaagttagctagggagattaagaagcataagacggatctcaaagatcttgaatttcaaatgtctgatgaagccctattacaaatgcctgcctttcagggccgggtacgttcaaatgagaaagtccacatgcatctttgtttactctttatgaatgataatttagagtaacatgtagagctctgatctcttttttgcagatcgatgttctgaagaacattgggtgtatagatgatgacctcgtcgttcaaatcaaaggtcgtgttgcttgcgagatgaattctggggaagaattgatttgcacagtgtgtctgttcgagaatcaattcgaagaattagaaccagaagaagcagtggctataatgtctgcctttgtcttccaacagaaaaacacttcagcgcctacacttactcctaagctggctaaggctaaacaaaagtttgtttcgatcactctctgtcccttctcataattactaacagtaattgatctgacctgattaatctaatctttgatcctcttttgcatagactctatgatacagcaatcagacttggtgaacttcaagctcagtacaatttacaaatagaccctgaagaatatgctcaggagaatctcaaattcggtctggtcgaagtcgtctatgagtgggcaaaggtttgttgtaaccagagagcaaactttctttaacactttgcgattcagacatctttttgatcatatatgattgatttttgcaggggactccatttgcagagatatgtgaactgacggatgtcccggaaggtctgatagttcgaaccattgttagattggatgagacatgccgtgaattcaagaatgcagccgccattatggggaactcggcgttacacaagaaaatggatgcagcttcaaatgctataaaacgtgacatcgtctttgcggctagtctgtatgtgaccggagtgtaagatttgatcataattcatacatctgaccagagacgcttctcacttaacttgaaattcaaatcactaaacatgtccacaaatatagtagttaaatttttcgttacgactat

SEQ ID NO: 146634 - DNA, 2142 bp, Arabidopsis thaliana landsberg; identical to SEQ ID NO: 15310

SEQ ID NO: 146635 - DNA, 1233 bp, Arabidopsis thaliana landsberg
aactttggtggggaagaagatacgatcttttgcggtgtatttgacggtcacggtcccatgggtcacaagatttctcgtcacgtatgtgaaaatttaccttcgagggtccattcaaaaattagatcttccaaatctgccggcgatgaaaacatagagaataatagttcacagagtcaggaggaactcttccgtgaattcgaggacattctagtgacattcttcaagcaaatagacagtgaacttggtctcgactctccttatgatagtttttgcagcggtacaactgctgtaactgtctttaaacaggtaaatcagcagtctctaaagctttatgagttttttaagacagttgatcaaaaaaaattgaaagatgttttgtcaaacattttgcaggctgactgtttggtgatcgccaacttgggagattcacgagccgttcttggcactcgaagcaagaacagtttcaaagctgtccaactcacggttgatctgaaaccctgtgtccaacgttagcatcttattattttcttttaacttagggcctaatacctctttgaaaagtaccaaatgttgagttgggacatacaaataaatctcctgaagaacttttcgttttgatttctgtaaacaggcgaagcagagagaatagtgtcatgcaagggaagggtgtttgctatggaggaggaacccgatgtgtatagagtgtggatgcctgatgatgattgcccggggctcgcaatgtcgagggcttttggtgatttctgcctcaaagactatggacttgtctgcattcctgatgtcttctgcagaaaagtcagcagagaagacgagtttgtggttctagctactgatggggtaaacaacttgacagctttcagttttctgacaaatgcattccctactaaatggtttctgcgtgttcttttgatgaacagatttgggatgttttgtcaaacgaagaagtggtgaaagttgtaggttcctgcaaggaccggtcagttgcagctgagatgttggttcagcgagccgctcggacttggagaacaaagtttccagcctcaaaagctgatgactgtgcggtggtggtgctttacctaaaccaccggccttacccaagagaaggaaacgtgagccgagcaatatcaactatttcctggagatcaaataagagcaataacgagtgttatggagccgcaccattgtcaccattgggtctatcccaaagggtttcat

SEQ ID NO: 146636 - DNA, 729 bp, Arabidopsis thaliana landsberg
ggatcagaccgagtgttcctgcagggcttttcttttcttacaactctacattggttcctccttaccgtgttttggtggatactaacttcatcaacttctctatccagaataaggtcggttcatcttcaattgcatttctctatcacagagctataatcagaatgtgtatcgatctttgtagagtttatagtcttggtgaacctgattggaatctctcattgtttgaaatcctttttgacttattttgctctggtgtatctaatagatcgatcttgagaagggaatgagagactgtctgtacgcaaattgtgagttacttaaagattttgataggtctatataggttctctctcttgttaaccacctgtaattgtttctggtttgaaggcactccttgtatcacggattgtgtcatggctgagttagagaagttaggtcagaagtatcgtgtagctctaaggtaaatcttttagactttttgaacaaggcttttctgtttatggttttgtttcgtggattcgtaattggtttactataatatttggtaggattgcgaaagatcctcacttcgaaagactaccttgtatacacaaagggacatatgctgatgactgtctcgttgacagagttactcaggtaatacatcgttcccggcttgttgaactttgtattcaagactctgaaatgatataccgatgctctggtcccatggttcttggtgtagacctg

SEQ ID NO: 146637 - DNA, 2953 bp, Arabidopsis thaliana landsberg
ttgtatgattttgcaggcaggactggtctcttttgtccgtgtgttctgtttgggcgtaacattgaagctgtgagggaagagattccttggacccaaccatgtgtatgccatgctgtatgtgtcgaaggaggtatggcacttgcagcagtaaccgcactcttcagtggctacattgatccacaaacaacagttgtgatctgcgaaggcctcttctttgcttggtggatgtgtggaatctattcaggcttgttccgccaagaactccagaagaaatatcatctcaaggtaaagtaaaaatcccacatcagatcgttctcatatatcagatattatctctgattgatctttgtgattattttgcagaatgcgccttgtgatcattgcatggttcactgttgcttgcactggtgtgctttgtgccaggaacacagggagatgaagaatcatctttctgatacagaagcctcatcatcaactactatggatcctcccccagttcaagagatgaacactgaggagagaagagacgcttcatcttcttcgtcctcatccccatcatctgccaaaagccaacacaatgatctcgagatggtccctctataggaaacgttccttattaatctctgctgcttatgctttaagctgttttttctgtgcagagaagttttcgtaccaaatgactctattgtccttaggttttaaatatgcaaaagtttgttctaagaacaagttcaatagtactcttaagttttacagaacttaaattcatgacttcattgaatctcttggaagaaggaagaaaactattttgtgattaaacactgcatgattggtaaatttgtttcgtatttcgttattttgttcttttttattataaaacttcaatgtaattacacaagcacccatggcctaatggataaggcgcttgacttctaatcaagcgattgtgggttcgaatcccactgggtgtgatttgtatttttaaaagcatatttgcctttttcttctaagctggcaaagagaatgaaagaccaatttccgacggttgaatatgccacctttggtcctagatatccgaaattcatcttcgttcctctctggtcctagatatccgaaatcttgtaatttgatagcatgatcgttttcattcttaatataatcattttgctgaaaacagaaaagaaaaaatccaatatataaacacttccatatagaagtcgcgggatgggagattaatgagaagaaaagacatgcagctattttataaaaatgctcgtcaatgcattatggtgatgaaataacatcattgggttttctataagttaataatcttattctcattaattagtcaaaatatacgattggaggtttatatatagattgactttggcctagaccatagccgtaaatcggaaaatgacaatggtttatctttgtgcaatactagttcaaaatgcaataatagtaaaaaataggaaacgtagggccttctccattagtgtataaagtactcatttctaactttttaatatatctttgtgtcaaaccacattatgacctcaaaactacttcctctcctcctcaatctcatcttcctcttcttctttccgcttctaaacgcatccgaacaaaaaccttgctacagtttctcatgtagtcaagagagcgtcgttgctcgtttccctttctccctattctcctaccaacctgagtcatgtggctactcaggattcaacctcatatgcaaagatgatgccaatactaccttaaagcttcctaagtctgaaccctttcttgttaaggagatcgactatgaaacacagcgtattcgcctcaacgaccctgagaattgtttggccagacgacttcttaactttgacccttcaggatctcctttttcttttcttcgctctcgtaactacacgttcttgatctgtcctaaggaagcgaacatcactgcatccttcagagctatcgattgccttggtaataccacttcctccttctttgttgtgcagtttgagaatctcggttcgatgccatcttcttgtcacatctttaagatattacctcttccattttcttggtttgtcgcctacacgacataccccgatggccaaaacagtcgagacatgtggctcaaatgggactcgccggattgtagagattgtgagaggaggactaattcaagatgtggattcaaaaacaatacttcccatcaagtcgaatgcttcagttctgttaaccctggtgcgtacaatctcaattcttctctgttcttttgtactgcacgatattccaacttgaacgacatcatctacttttgaaaaaagtctttcccaaagaatccataaatggttgaaagcttcaaatccaaggagttgttaattaaacaaagaaatgaatctagttggctttaaataatgacattaaaccattgactttgattaataaatcaatatcttttcaaatagcaaacatgagagaatgtcgtaacattagaatatatgaatacttgtacatacaagtttcaccgttgacccgttttgttgttttgaaaacaggacttcacaacacaggcttacaagtactaaagataatgtgcctctccctagtcggaccactcaccgccttgactttttgtgtcggtcttgtcatgtgcagttccgagagagtctcttcacagatacaacaagcagtggttgcacgcctttctggatccgtaacgtcgcagccaagcaacgaagtcgcaaggataggtctcgatgagtctacaattgagtcatacaagaaagttgagctaggggagagtaggagactcccgaccgggtcaaatgatgttgtttgtcccatttgtttgtcggaatatgcaaccaaagaaactgttaggtgtttacctgaatgtgaacattgcttccatactgaatgtattgatgcgtggctcaagttgcat

SEQ ID NO: 146638 - DNA, 1744 bp, Arabidopsis thaliana landsberg
aggaaaaggagagattgcaacttgttccaaggacatgaactcggatcttttcttcgccgtgttaggaggtttgggtcaattcggcattataacaagagccagaattaaacttgaagtagctccgaaaagggtatgttaaatttgtaaattatgcaactacagaaaattctatgaaatttatgaatgaacatatatgcatttttggatttttgtaggccaagtggttaaggtttctatacatagatttctccgaattcacaagagatcaagaacgagtgatatcgaaaacggacggtgtagatttcttagaaggttccattatggtggaccatggcccaccggataactggagatccacgtattatccaccgtccgatcacttgaggatcgcctcaatggtcaaacgacatcgtgtcatctactgccttgaagtcgtcaagtattacgacgaaacttctcaatacacagtcaacgaggtccgtacatacatacaatcataaatcatacatgtataattgggagatctttatgcattattcaattatattaatttaatttagttatttaacttatgcaggaaatggaggagttaagcgatagtttaaaccatgtaagagggtttatgtacgagaaagatgtgacgcatatggatttcctaaaccgagttcgaaccggagagctaaacctgaaatccaaaggccaatgggatgttccacatccatggcttaatctcttcgtaccaaaaactcaaatctccaaatttgatgatggtgtttttaagggtattatcctaagaaataacatcactagcggccctgttcttgtttatcctatgaatcgcaacaagccagtttaactcgatattgcaaaatttactatctacattctcgtttgtgaatccgaaatattcttacaagctaattttatgcggcgtttttaggtggagatgatcggatgtctgccgctatacccgaggaagatgtattttatgcggtagggtttttaagatccgcgggttttgacaattgggaggcttttgatcaagaaaacatggaaatactgaagttttgtgaggatgctaatatgggggttatacaatatcttccttatcattcatcacaagaaggatgggttaaacattttggtccgaggtggaatattttcgtagagagaaaatataaatatgatcccaaaatgatattatcaccgggacaaaatatattccaaaaaataaactcgagttagacgataattaatcctattgttagtcgttctgaaccacttttgtaaatattcctttccatgttatatcaatttttgacagaaattaattttagtagtgtggagagtgtatataccacaatttccacgtgaattggagatttttggctataattaagaacacgaaattaaataataatgttattaagaaaatggaaattgataggaaagtaaaggacatgatcataagattcgaaagtaagtctaaatgtgaaaactatctttttgtgaagaaaatgttgacatatctataaatatataatacattcaattaaagaaatagggaataattatgtccaagaaatgtccccaaacctttttgttacagtctgcgggaaagaaggagacatccacacttcttgcctcctttctgtttttatttttggcttaatttttaatatatatttttatgtactttgaagatcttggtcgaacgcagtccacgtataattggttggattag

SEQ ID NO: 146639 - DNA, 1049 bp, Arabidopsis thaliana landsberg
agatacatgaccagcaccctcaatagagaagagaaggaagcatgaagctagctctgcagcttcaaggtctcattaatggaggtctctaactcttgttcttcattttcttcatcctctgtcgacagtactaaaccttctccttctgaatcttctgttaatctctcccttagtctcacctttccttctacttctccacaaaggtcttattcacatcacttctctgttttttcctatgttctgtttttgctctgttttcttttgttcacatttgtgttttaaatctttatttttttgtagagaagcaagacaagattggccaccgataaagtctagattaagagatacactaaagggtcgtcgtcttcttcgtcgtggtgatgacacttctctctttgttaaggtttatatggaaggtgttcccattggaagaaaactcgacctttgcgtattctcaggctacgagagtctattagaaaatctctctcacatgttcgatacttcaatcatctgtaagtaattaatgaacaacacataattccgtaaaaacaacattcaactaaattcaaacagtttgaagtatatccatgcattgtcttggctataacaggcggtaatcgagatcgaaaacatcatgttttgacatatgaagacaaggatggagattggatgatggtcggagatattccatgggagtatgaatcttatatcttgatcttacattggtataatttcctcggttatagctattctctaatttttgaaatcgatgtttttgtttagtatgtttcttgaaaccgtgagatgactaaagatcacgagaccggagaggtattaaaacttggatcggtcaaggctgtgattgcgcagttacgagacgtgtaagatttaggcattgatgaagagacttgaggcgggacggagctattgctgcatattgcaacaaaggccttgaagaagttggagaattgattgatgcatatatttatttatatgacacctttgagtgtgttttttcttataaataaatcacaatatccaagacttctctt

SEQ ID NO: 146640 - DNA, 783 bp, Arabidopsis thaliana landsberg
aaactcttctgtttattattattatagttagctttttaatataaaacggatattagaattttgtaacaaagaaatcggcgcgagtcgtgtgctttagcccaaaaacattggcctcgttgtccaacgtgtgtatttggaggaaaacaaaattagagggccacatatacatctctctaattacactttacgaatattaaacacatttaattgtacttaatcctcggcataacacttgtccattaagtcaccatgtagttgctataaatatggtcaagtccagtccataatatatgcatctctgatctttcttggtgagagtaatagacatgggagctcttgattctctttccgagtatatctccgactacttccgcgtcaccagaaaaaggaggaagcggaaagtcatgcagacggtgaatataaaggtgaaaatggactgcgatggttgtgaacgcagagtcaagaacgcggtttcctccatgaaaggttcgaatctccaactcgtagactacttatgtcatgaatggtttctgtaagtttttttgtaattttgatttccattaaacgagtactcatgtaagcacgccaaaccatttctacatacaacaagccaaattaacacggtctttatatcaatataaaaatcgcgcaggtgtgaaatcggtggaggtgaatagaaagatacataaagtgacggtgagtggatacgtggaaccaaagaggtattatagagaatcgaaaggacagggaaaaaagcgagattggccgtacgttcttacacat

SEQ ID NO: 146641 - DNA, 696 bp, Arabidopsis thaliana landsberg; identical to SEQ ID NO: 45207

SEQ ID NO: 146642 - DNA, 664 bp, Arabidopsis thaliana landsberg
atgtctctgcttcttaaccagcccttgaagctctgctttcagagcaaacctgggttggtaagatcctctcctcctctctctaatggcttctcaacttccaaattgcaaacccctccttgtactgtcattgacgctgatccttgtggaaggggtctcggcaaactcttcatttactatcataatgaatctgaatacactggtttggaaaagaaggtggctatggatttggtggatattccaatggcaacgattgggtcatcccatggctgggtagctactttgaaggaagacggtatattgcgtctccaagatgatctaaacccggttgcatcgtatacagaaccaaaacgcattcccctgtctcccctcgtaactctgcctcattgccaaactcaaatcgttaccaatgtgtcattgtcctcatcttctcctaaggatgaggaatgtgttgtggctgtcaagttcttgggacctcaactcagcttttgcagacctgctcaaagtaactccaagtggatcaacatcagaatcgcaaacccttgcttctactcctctcgtgtcatgttttcgaagaaagataagatcgtttcgcatactcggatctggaggcaatatcaatggatcatgggatctccacacacacaatcaaaaaccgtttcagaga

SEQ ID NO: 146643 - DNA, 1219 bp, Arabidopsis thaliana landsberg
tggtaaaatccgggtatggagaggatcaaagaagaacgccgagaaatattcacgagtcggaagtttaccaactcttaaagaatttctcaccaaatcggtaaatcctagaaactacgtcgaagtccgtcgcggaaaaacgttttgaagatccgacatttcgacgctgtgtcttgtctgagcttaaacgaagatctcggtttgctctactccggttcttgggacaagactcttaaggtctggagattgtccgattcaaaatgtttagaatcaatcgaagctcacgacgatgccgttaacacggtggtttccggtttcgacgatttggtatttaccggttcagccgacggaacgttgaaagtatggaaacgtgaggtacaaggcaaagagatgaagcatgttttggtacaagtgttaatgaaacaagagaacgcagtaacggcgttagctgttaatttaacggacgctgttgtttactgtggttcgtctgacggaaccgttaacttctgggaacggcaaaagtatttgactcacaaagggacgattcacggccaccgtatggcagttttgtgtctcgccaccgccgggagtttgcttttgagcggcggagctgataaaaatatttgcgtttggaaaagaaacggggacggatctcatacgtgtctctctgttttgatggatcatgaaggacctgttaagtgtttaacggcggtggaagaggcggaggatgataacaacgacggagacaacggtggagagaaaggggatcaacggtggatagtgtatagtgggagtttagacaactccgttaaagtgtggcgcgtgacggattacgcttcgtaaaacgcgtgaagaagtatacgtgtggacgacgtaggagcgtgaaggaatgttattgaattgtgatttgtgacggtaccatgtgattgtgtagcgttttattgtcaaaggaggaattgattgggaggcaactagtaggtagattttggtacttgtgagttgtgatgaccaatagtgaattgtcacgtatcatgtgactttgtcatcttcttttggaagtgtgaaaaagtctttgtctccttttgttgttgcgttagatcttttactcttgtctcttgtaattggcatgcacttattttacattatgtgaaactaaaagaggaaagaaggtggagaaaaaaaggaaagtaaagattccgctacaatgagaaacaaaaaaaag

SEQ ID NO: 146644 - DNA, 983 bp, Arabidopsis thaliana landsberg
aagaaaaagaaaagatctaagaggaaggatgaaaacgtagggaagaagaagaagaaagttgtgtcaagaaagagacgtaagagagatttgagttcaagctctacaagtagtgagcagagtgataatgacggtagtgagagtgatgatgggaagagatggtctagggatagaggaagaagacttggtaaggttaaggattcccggagtagaagtagagatgagttggaaggagagagtgaagaacctgatgaatgctggcaaggggaagatgaagttatacctgagaagaatcctagaaggcttaaatcgattgttgttgtatcgtataattatgggaatggtgagagaaaggaagaagatgaccgtgatgtctatatgacacgcggtggtggcaatagagagttaggatatagtgaggactctgatgagatggatggtgaatctattgactcttattctagaattcgtgctgatgacaacggatttggggaatataataaatctgaaactagcaaagtttctcatacagacaatagcttgaaagatgatgatttggaagccattctaaagaaaagagctctggagaatcttaaaagatttcgtggagtgacccaaaagagtggaatagctaaaaaagaggtgtcttctgtttcagaaggagaacctatgcaaattgaatctgaaaaagttgagtcacaagaccatgatctcatggagcagaaactttgtgattctgctgtaagcaaagatcttgagaattcagaaaagattttacatgttattaatgttaaggaatctggaacagcattggctaattctgcctcgcaacaagatcagcagtctggtgatactgccaaggttaaagttagttctggtcttagctcttgtacaaccaaacgaaagttggttagaccggtattgagtaaagatagtttaaatctagctagcaagaaagaagctagtggtagccaagatgctgaagc

SEQ ID NO: 146645 - DNA, 1309 bp, Arabidopsis thaliana landsberg
acagaacatcactaccaaacatctccagctcagtttcttcaaaataaaaacagttaatctctctaaaacaattttttgttttctctctctcttaaataaccagagagttcagaatcattttgattctctttgtaatctttagttgttgtacctaacatcatggctgaagaggaaccgaagaaggtgacagagaccgtgtcggaaccaactccaacaccggaagttccggtggagaaacctgctgctgctgcagatgttgctcctcaggagaagcctgtggctccacctcccgttcttccatctccggcaccggcagaggagaaacaagaagactctaaggctattgttcccgtcgtccctagtaatttgcttactatcttgtttttcaacagaaagattattactaactcaagtttggttcaatgattattaaaaacttctgccaaaatatgtttctattaatcaactgattagcgtcgtcaaatatacctgattttcttaaagattattactgattacatttccgattaaaaacagaattttataccttttctttaatatagaaaaataaacaagtttcaaaattctgtaattatgtaagttttaaggttaaaaaagaagaactcaaagatttttgttcttctctaatgtgttgttattaatttttctttattaatacttaataaaaaatttattttgtggcctaagaagttgagggaagagaagaaagaaggttcagttaatcgaggtaattaacgtaatagattcatgactaatattaatattatctgaaagtaaaggatcatgggtataatataaataattagtatttttgtcataccggggaacaattaattaggtggtttgtgtgtcgtgttatcatgggatgtgtctaaaactgaaagatggtttaataatattcactaattttgggtgacataaaaaggttgttatatggacatgtgtgtttatcattgtctcttatttttcccacaaactctgattagtgattgtatttgcttaataattttgggagtgaagatgctgttctggctagagttgagacagagaagaggatgtcacttatcaaagcttgggaagaggctgagaaatgcaaagtggagaacaagtaacgtttttcatgttaacatttatccataaatgtctattaacccgatttagtaatattttgcaatgaaaccaagatattatcattaaggtcataaagaatatattttgaaacagagctgagaagaagctttcttcaattggatcatgggagaacaacaagaaagcagctgggaagtta

SEQ ID NO: 146646 - DNA, 3478 bp, Arabidopsis thaliana landsberg
atattccgcaatcgttactgtccttctttatcagccaactccccagtttctatctttccttttagagttcaccactcttcatagcttcttgaactttctttaggaatctccgtggacctcgccacaaatctactaaaggcaaaccctaatacctacgcagttattgttagtacggagaacatgactctaagcatgtatcgaggcaacgaccggtcaatgttagtccctaactgtctattccgagtaggtggcgctgcggttatgctctcaaaccggagtcaagcccgagtccggtctaagtacgaattgactcatattgtaaggactcacaaaggctctagcgataaacactacacttgtgctgaacaaaaagaagatagtaaaggtatcgttggagtcgcactctctaaagaactaacggttgttgctggtgacacgttaaagacgaatctaacagcacttggtccgcttgttttgcctttatctgaaaaactccggtttatcctctttttggtaaagagtaagcttttccggttaaaggttagtccatatgttccggattttaaactatgtttcaagcatttctgtattcacgctggtggtagagcgttacttgacgcggttgaaaaaggtcttggacttagtgagtttgatcttgagccgtctcggatgactttgcaccgctttggaaacacttcaagctcgtcgctgtggtacgagctggcttacgtggaggctaaatgtcgggtcaaacgaggagatagggtttggcagttggcgtttgggtcgggttttaaatgtaatagtattgtgtggagagcattgagaacgattccggctaacgagtcagtggtgggtaacccgtggggtgactcggttcataagtatccagttcacgtgacctaagttttaagtaatactactacgcgtgtgaagtcacgttacaagttatcataagtcaacaatatgttatagctttctattaaagtgtagcttttttttttgtttctctccccacaaatatgtattatttgcttgtttttgccaacaatttggtatctatttcttttatatgaatatggaaatcgaggaatttttatttattgacaaacaagtcgatttttttttgttgatatggtcatttagtaagacagataatgttgttgtattcactgaggaatgcaatggtctcggactatcacaaaactcattttatttaaaagccggatgaatttaatgggcctaatataaaaagcccaataatccattgattagaatatatgtggactggtttcaccattaccgcaataagggagactgagataaattcgcacagcaatcggagttactatgtggacaatgaaaccggcggcgatgccggttcaatttctcatggagcaatctccgttggctattcacagccaccaccaccgcataaagttatgatcgagaattcttctgaaaatttctgagcacaatttcttattttgtgaattgatttgtggcaagttaaaaaagcttcgaacatagcgtaataatttggctctcttatgaattgcgtttggtttggactatatgttatctgtgtggaatcgaatcaaaattatcaatctggttcgtcggagttggatcaatagtggaagtgacaattgctagtttgtcgtttgtgttttaatttcggttcggtttacatggttttgaaaaattcaattgatttcggttgggtttgaattggaattaaaggagaaagacactgaaatcacgcactcgaggcttttttttaaaggagcgagtgtgtttcaaaacaagccatttggtgggttagaacccacagaaaacgtatacacgcgctcatcacgcgattggtgagagtgggtgtgaaattgcccgagaggtgagagtggggtatgacatggaacgccctgattggcttataaaataaaaatagtagacatgtagctcctcccttcctatgtttatatttatttacttctcttttccgaagtatcaaaactgttgtcaaacaaaaagcttggaacaaaattaaaaccaatgcaattcatatagaagagcttaagcgttttctttgttgatgataatctctaagatgtctggtggtaaaaagtcacatattcagagggagtgtatcacttgccttgattatcatcattcttttggtgattttactcctggtttctgaggaaaactcgcttcatgattctctttttgatgtataacgtcagttttcatcttcttcaggtatttatttgctcttcacagcttttagtattcatttcttggctatgtcttatactattcagtaacattatgatccaaagcttttgaaatctaaagaatttatagtctggttttgtgatactttttagtttcctattcatgttccccattcataatttcttgacaaggttggtatggaagattttctccaatgagacattcttatgcatgttcctttttctgtaatgtgatgtaagtagattgcattttgtgagaatatgtggtagcagagcaagtttctgaaagtatctcaaatttgcttactacaatctttgcttttgttttttcttagttagcagaacaagaccatagcattcataggagactcattgggacgacaacagttttaatccctgatgtgtatggccagcggtggtcccattccaagatgtaaacctttcaagtatacatacgaaaaggagattgtcatatatccttcactacataatccttttgtatatatcgcttatacttgtcaacaaaagatattgtgataccttaacgtagctttacgtatgcttatttcaagaagctggattacttctccactgaatgtaagtgtacaatcatcgattttttgtaggttttatctgttcctaagttatagtttcagccaatctctagttatttttatggcttatttttttttttttgagtttgcaggcatttactctcctaatgcatatcgtgggtttgcccgtgagttcatcaaagatttggaaagaataaggttctttctcaacccttttgtttagtatccgctagaatgaaataagaaaactagagatctctaacttacacaaagtgcaggccaagggcgattctggacatcataaagtctggtgaagattttagaattgcaacaaccacaaagatgcctgagcaagggacgtgtgagcgatgcgggtatatttctagccaggtgagacctctcttttatcacatcaagtaaattgtttccataattagagttagtatatagtgtttgattgtttggattacaaatgatatgcagaaatggtgtaaagcttgtgttttgctggaaggactgaaccgtggtttgcctaagatgggtattggaagacctcgaggcgtaaatggtgatcataacaaggaaacaaagaagcctggatctgtagcaaaatctatagagagcaaacaatgtggatctctggatttc

SEQ ID NO: 146647 - DNA, 1274 bp, Arabidopsis thaliana landsberg; identical to SEQ ID NO: 34466

SEQ ID NO: 146648 - DNA, 2934 bp, Arabidopsis thaliana landsberg
cattttctgattacagtttcggttcacgttactttgccatgctgcatgtgaagcccctctcgtgctgcctcttggagggttcacttatggagagaaatcactcttccttgtcaatgactggcatgccggccttgttcccatgtaaccttttcttgatctctttaccttatactctaggctttatcttttaacggatgtgcagaatcctgctttgatttgtggacattgaaacttatatcgtgtatcttcttttattccagacttttggccgcaaagtatcgcccatatggagtttataaggatgcaagaagcattctcattatccataacctcgctcatcaggtaaattcataaacatttttccagacctgtatatgtaatatctcttcttctggtttttatatagttgtaagtttcgtataatgccccatagttagcttactgtgattagttagttatgtatgttgtgtttgattaagttaattggttatttttgtatttcatgaattggctcttttctaaaagggggtggagccagcagctacatacaccaacttgggattgccttcggaatggtatggagcagtcgggtgggtatttccaacgtgggcaagaactcatgcccttgacaccggtgaagcggttaatgttctcaagggtgctattgtgacctctgaccgtatcattactgtcagccaggtgatgaatcttttgtaaacataatccctgatattaatgaccacattcacttacggtaatgattctgaaattgtgtgggttggtattctgattgggatttgttttctgtattttcagggctatgcatgggaaatcactactgttgaaggtggttatggtcttcaagatttgctctctagtcggaaaagtgttataaatggtacttgtttctataaaccccgacttttataatcttacacttaaaacatctttctgagctgatattccggtgatgtttacagggatcacaaatggaattaatgttgatgaatggaatccatccacggatgaacacattcctttccattactctgctgatgatgtctccgagaaggtgatgtgaagttctcttgagtaaaggtgcctaaatccaatgctttatagtgaattcactttttgtgtctgctttgggaatcgcagatcaaatgcaagatggcactacaaaaagaattgggtcttcccattaggcctgaatgtcctatggtgatttttcaaagccactttatttttataagaaatgttctgttttgtcttataatcgctcatgtagcttgaatgttttaatacctttacagattgggtttataggaagacttgattaccagaagggcattgatctgatccaaaccgctggtcctgatctcatggttgatgacattcaattcgtaagtgagtctattgaacggtttgactaaaacacatgcagtacccgtgacatgtgtgatacacatttctcatctcctgtctttagcactgttttcgcacatttcttaaacctgaggcagaattatggaaaattttagtggaagatgtagtggttttccgcattctaatattccttttttagtgaaagacttgtttcttttgataagatatctttattcatatgttttaatgtggtttggttacttgcaggtcatgcttggttcgggtgatccaaaatatgaaagctggatgagaagtatggaggaaacatacagagacaaattccgcggttgggttgggttcaatgttcccatctctcatcgaatcacagccgggtaaaaacaaatcactctagcctagactttcaaatttccagaagacatgataaaacctgttagataatctaaaaggaactgttgtagaaaaccttaacaatgccacaaatatctcattggatttgtaatccatcaataaacagctgtgacattcttctcatgccgtcgagattcgagccctgcggtttaaatcagttatacgcaatgagatacggaaccattccagttgttcatggcacaggagggctcagagtgagtttctttaaatcttcaagaaccctgataaatacaaaatcaaaatatgttcagaatgagagaatggtttggtagctaaaagggtaatgacttataattcgatcataattgttttcaggatacggttgagaatttcaacccttatgcagaaggtggagctggtgctggtacagggtaataaacaattctgttttttagaaaaaacatcaaattcaaatgatttctgatcttataaatcgttcttttgtgagtttaatgtttcaggtgggtcttcactcccttgtcgaaagatagcatggtctcggtaagtttatcgaactccccatttctcaagagaatttgtggtttatggtttttgtgggtatatgaccttgttatgttaaatacatctcaggccttgaggttggctgcagcaacgtacagagagtataaacagtcatgggaaggattgatgagaagaggaatgacccgaaactactcttgggaaaacgctgccgttcagtatgagcaagtttttcagtgggttttcatggaccctccctacgtcagctagaccaaacataaactgaatcaaaccgagttggaccggatcagaccagacctgaccaattagatggagagtgtgaaacctccttttccggctatcgaaaatctatggttttcaacgtttccacattaaaccgtgtatctatctatgtctattatcttaaactcgtatggtgtttgttttggggaggtatagaattttagttatgaggctataatatgtttttctgtcggttattacatgtgttcttttcctaattatctgaatctgaactagatttcgtttgataagactatatatgtacgagtagactcatataacttaagcttaataacaatccaaacacttctatag

SEQ ID NO: 146649 - DNA, 857 bp, Arabidopsis thaliana landsberg
caatacacatctctctctctcttattaactcaatgacggcgactgcgtttagggtcggcttgtggttggccgttacggcttcctttctcttaaccgcaacaaacgccaaaatccccggcgtttacagtggcggaccgtggcagaatgcacacgccactttctacgggggcagtgacgcctccggcacaatgggtataaatattcactaccttacgtccttaccaaatccaccattgtcgatttcatttcgtacatataccatgaattatgatttctgacttcttcttttttgtgaagtttctaacttttttgttctctctgtttttctttttggcgcgtggggttttgctaggcggcgcgtgtgggtacgggaacttgtacagccaaggatacggtgtgaacacggcggcgttgagcactgctttgttcaacaacggattcagctgtggtgcttgttttgagattaagtgtactgatgatccgagatggtgtgttccgggaaatccatctattcttgtgacggcgacgaacttttgtccgccgaattttgctcagccgagtgacgacggagggtggtgcaatccgccgcgcgagcattttgatctcgccatgcctatgttcctcaagatcggtctataccgtgcaggcattgtccccgtctcctatcgcaggtctctctctgttttttgttttgcgtcgttttggttttgtcggctattataatttggcgaaatcaataagaatttaactgttaataatacggtgaagaaattacacaaagaaccatatgcattaatggatgattcatgatagtgacttttgcaaatctagattatgtttaaaggagattaatattt

SEQ ID NO: 146650 - DNA, 1224 bp, Arabidopsis thaliana landsberg
ctcttggtgatggaatgtttgagatagagaagcctatggtgtttacttatgaagaaattcgtgcggctacggatgagttttcggattctaatcttcttggtcatggaaactatggttctgtatactttggtctacttagagaacaggtttgtttttcatttccttgttttgtgttgtcgtaatggctttacttgatgtcatatttggtttaacttatcacaggaagttgctgtcaaaaggatgactgctacaaaaactaaagagtttgcagcagagatgaaagtgctttgcaaagttcatcattccaatctggtaaattccctttgtgtgtatatcttttttattagtctaaaatcattcgagattatgactcttatgtttgcttttcgtcttgtcaaaggtagaattgattggttacgctgcaaccgttgacgagcttttcgtagtttatgaatatgtccgaaagggaatgctgaaaagccatttgcatgatcctcagagcaaaggtaaagagactaatattaatacccgacaagaactaacaagaagatgatataaatgatatatttcttgatgttattgaaggaaataccccactttcttggataatgaggaatcagattgcacttgacgcagcaagaggcttggaatatattcatgagcatactaaaactcattatgttcaccgagatatcaagacaagcattattttgctcgacgaggcattcagggctaaggtctaaatcagaacatatgaaatccattacaagatctgattcttatagaggagaacatggttgatcttatctttgcattgtgtttagatatcggattttggacttgcaaaactcgttgagaaaactggagagggagaaatatcagtaactaaagtagttggtacatatggttatcttgcaccagagtaagcatttgaacacttgaagaagctacattgagttttaatacaagaatactttagtgaattcttatctgggacttttctgtcttttcttttgcagatatctaagcgacggtcttgccacctcgaaaagtgatatttacgcctttggtgttgatcttttcgaaattatatccggaagagaagctgttataagaacggaggcgattggaactaagaatccagaaagacgtccattggcatctattgtaagatcttggagtttgtttataaagattgaaccattacacttctttctttgatgc

SEQ ID NO: 146651 - DNA, 973 bp, Arabidopsis thaliana landsberg
  unsure (1)..(973): unsure at all n locations
gattgatctttttgtatttttgattttgacatttgctttgtgttcgatctctgttttgatgcgatttctctgtttttaaagccatttgatagattgtttccggtaaagctcagcgagagaagaagaagaacaacaatggagtttacagatttctcaaagacgagtttttactacccgtcgtcacaaagcgtttgggatttcggagatttagcggcggcggagaggcattctttagggttcatggagttattaagttctcagcagcatcaagactttgctactgtttctcctcattccttccttctccaaacgtctcaaccgcaaacgcaaacgcaaccatcggcgaagctgtcttcaagtatcattcaagctccaccgtcagagcaannnnnnnnnnnnnnnnnngagtctttgtgttcggatcatttgttgataaacccaccggcgactcctaactcgtcatcgatttcgtctgcttcaagcgaggctctaaatgaagagaaaccgaaaacagaagacaatgaagaagaaggaggtgaagatcaacaagagaagagtcatactaagaaacagtgagttcttaaaatttctcacttttttttttgttgagtccagaagctgttcgataaaaagtctcagagacaaaaaaaaaaagaagtatcctaaagaaagcatttttaatgaacaggttgaaagcaaagaagaataatcagaagagacagagagaggcaagagtcgcattcatgacaaagagtgaagttgatcatctcgaagatggttatcgctggcgaaaatatggtcaaaaagctgtcaaaaacagtccttttcccaggtatcagcaaatatatccatatcctttgaccatagttttacaacaacaagaagaaaaatcaaatctttttccttgttggtttgtttcttcttttttgatttgctcttggggtacatgcacctatgttaaatttggttggga

SEQ ID NO: 146652 - DNA, 3756 bp, Arabidopsis thaliana landsberg
  unsure (1)..(3756): unsure at all n locations
cattatctgatcgagtcaaagatacgaattgtgcatctctatagttttatgtcagtcaatccagctatccttgttccatttagggaggttagaggttgttagtagaggtctctgattaggtgttgagactttggaaagtgcacgagggtaatgtacagctttgataaagttattacttatgagtgccttcctcttgtaattgttatctgatggagattagtatattggattcatgtttattaatactctttttggcagaaaaattccgctttagtgccgaatttattgaaatgaggcgagcagcattggatatatttgttaatcgaatagcattacaccctgagcttcagcagagtgaggatcttaggacctttttgcaagcagatgaagaggtaggatatctggacttcacattgctactacatcatcttcacataaaaatgctcgtagaatgcttcttcttttttcctactggaaggactgcaatttgcatattagaaggttcttgtctctaatgacagtttacttttctcgtcagacaatggacagattcaggtttcaggaaactagtatattcaagaagcctgcagatctaatgcaaatgtttagggtaagaatgttttttctgaccatgtaaatattatttttctgctctttattgacctttgtggtgcgccatcatcttactgccatatctgcactattgacaggatgtccagtcaaaagttagtgatgctgtccttggaaaagaaaaacctgttgaagaaactactgctgactacgagaagcttaaacattacattttcgagcttgagaaccacttgactgaggctcagaagcatgcgtatcgcctagtcaagaggcatagaggtaataaaaatatcacaaatcagaatttagtctatataaattctgttatgttttctgttttctctttcccaaccgcatgaatggatcttcagttttaatgctgtatcaacctattggcagagttgggtcaatcactgttggattttggcaaggctgtaaaacttcttggggcttgtgagggtgaacctacaggaaaagcattttccgatcttggaactaaatctgaactgttatcgattaagctccagaaagaggtattaagtttgtaagactagatcatcttcttctttttttctaaatcattatagtaagaaatgtatatatcttggcgaaattcatctattctatattcctagatgcttttattgacctatcttgcactatttgtaggctcaacaagtcctgatgaacttcgaggaacccttgaaggactatgttcgttatgtacaatcgattaaggtgagttctctagcctttgcctgtgggattgatttctctttcatggtttcgttttgctggtactaaactcttacctttttgtttccatattttgcttttccaggcaacaatagcagaacgaggcactgctttcaaacaacattgtgaattgtcagaaacaacaaagttaaaagaaataaatctgtatgatggcttctctccctatttgtcttctctgtcaacaatcggcgtagaacattatagaaattctcgtctgttattgtagggacaaactcatgctcacacgttcagacaaagtaggagaagctgagatcgaatacagagaggtaagaagaactcaaaacaatccttgaaaattttgtagtaatgcttttgggtgcttgaacttgtggtgtataccgcaacaatgcagataaaagcagaaagtgaggaagccacgagaagatttgagaggatagtaaagagaatggaagatgagatagtaaggtttcaagagcagaagacggaagagatgggagtggcattccatcagtttgcgaaaggacaagctcgcttagcaaacagtgtcgcggatgcttggagatcccttcttcccaaacttgaagcttcttattctgtctaaatccaaaactaaacttacctgtgtctgtgtgtgttccttcatgagagggtttgtgtctagaggcagtttgtttttgtgagaaattctggtgtttttttgtcaacttcaagtttagttaacttggcttgtttccacttgtaaagaagatacatatgcgtcattattactctcctaaacgttcatataacaattttattttagattacaactttcccaattcactaacatgatactgctagtatattgaatcttcttatgttggatgctgcagatcacaactgtgtcattttaagatatgttgctggttcggttagagtttgtttaggcctaacttttagcccaaaatggtaaccttcgtagtgatcggagggttccaaaaagttgcaataacttaaaaaaattatccgaagaagacgatagacagcaaaaagcgttgggcgagaagaagatgacgtgcttctcttctgctactcctcatcgccatcatcttctactttcttctccatctacttccaaatccctgcttcgatttccctcatcttatctgaaacctagccccagtcttctcttccatggctcatctcgctctctcctctcctgttcagacggcagcaacaaccgtcctcctccctccggtgacaccgtcccaaagcaagttcctctgatttcttcctttattgatgaattctaggtttcatcttcaaatttcacctgggtttggccaaatcgatatctattgtttgagagctcgattagtgattaagtgggagccttgtagctatgtatatgatctatagcgtgtataacgattatcattttgattctaactggtaatagattatttgtttggtggatattgtttcagtaacttctgtatcattgagggatcagagacagttcaagactttgtgcagatgcagcttcaggaaatccaagataacataaggagtagacgcaataagatatttctcctcatggaggaagtgaggaggttacgtgtgcagcaacgtatcaagagtgttaaagccatcaatgaggacagtgagctcgaggctaccgagatgcctgagatcacatcttctattcctttcctccctaatgtggtcagttacaaattatgaaacggtctcttgttcagtttttgatattcccttctgttttaactcttctttgtctctgcttcttatcttttgatatagacaccaaagactttgaaacaactctattcgaccagcgttgcattgatatcgggaattatcttctttggtggtctcattgcacctaatgtaagtacaagagtagtagactccacgtttctttctttatgttcgcctatagcaatatcaaagctctagattttgtttgagttaatatgcttttcacacagtcatctcagtttactgcagctcttagaaccctactaatcttacaacaatgcacgagagctctttaaaatatatgcatttactttnnnnnnnnnnnnnnnnnnnnnnnnnnnnnnnnnnnnnnnnnnnnnnnnnnnnnnnnnnnnnnntaaatatacttgctttttgttgatagcaacagattgtggagattactatttttccttctttgtgatgtatacagttttttggttttttattgagttactgtaactttaccagaagaacaatagctattcttgttttttctaatccttgaatgataaattgatgattttacatggcagctggaactgaaggtaggacttggaggaacctcttatgaagattttataaggagcttacatctacccttgcaattaagggactactactagttca

SEQ ID NO: 146653 - DNA, 2110 bp, Arabidopsis thaliana landsberg
  unsure (1)..(2110): unsure at all n locations
catgggaggagtcgctattcttgttatactgactctgatttgtcttctctgtaagaagaaacgaagaagaagacacgacgatgaagctgcttactatgttcctcctcctcctccttctggtcccaaaggtaaattcaaagatcttaacttcatgaaataaaaatcgaatatttaaccatagttgttcaattctgatacgaattgctcaaatctgatacttgattatgcattgttatctgttaaagagattacctttgtagaaaagtttcaaactttacagagatttgatgttgtttatcagctggaggaccttacggtggtcaacaacagtattggcaacaacaaaacgcgtcacggccgtcagataatcatgtagtgacgtcattgccaccacctaagcctccatctccaccacgaaaacctcctncgccacctccaccaccagcattcatgagtagcagtggtggttctgactattcggatcttccggttcttcctccaccatctccagggcttgtgttaggcttttctaaaagcactttcacttatgaggagttgtcgagagctactaatggcttctctgaggctaatttgttaggacaaggagggtttggttatgtgcataaaggtatattgcctagtgggaaagaagttgctgtgaaacagttgaaagctggtagtggtcagggagagagagagtttcaggctgaggttgagatcattagcagagttcatcacaggcatttggtttctcttattggttattgtatggccggtgttcaaagattacttgtctatgagtttgttccaaacaacaatcttgagtttcacctccatggttagaacaaaactaaactctttcttttgattttgttacattgctttgttgttttcagttagtgatgatttgtttgggaattgaatttgttataggtaagggacggcctacgatggaatggagtactagattgaagattgctcttggatctgctaaaggactttcatatcttcatgaagattgtaagtctaaaaccttaaaaattatgtacagatgtttgataaatactgtctttgtttgttactgaggtatatatataaatatttgcaggcaatccgaaaatcattcaccgtgatattaaggcgtcagacatattgattgatttcaaatttcaagctaaggtatgtttactcgatatgttttgtgaagtgtttttgtaatttgagtcactaaagctcttctttcgttcaggaggctgacgttggtcttgccaagattgcttctgatacaaatactcatgtatctacacgtgtgatgggaacttttgggtaaagataatcttgaagctaccaaatatctacatttatgcagttttgttaaaagtttatgtgaatctttacatattatgaaacttttggattttaggtatttggctccggaatatgcttcaagcggaaaactcacggaaaagtctgacgttttctcatttggcgttgtacttctggagctaataactggacgtcgccctattgatgtaaacaatgtccatgcagataacagcttggttgattgggtaactaatataattacacacaaataatctaaccttcacataatgtttacaatgtgatttttgaatgaagaaaaacctatgtgtgaataatttggaacaggcacgacctttgcttaaccaagtatctgaaataggaaactttgaggttgtggttgataaaaaactgaataatgagtatgacaaagaagagatggctcgcatggttgcttgtgccgcagcttgtgttcggtccacagctccacgtagacctcgcatggatcaggtaaattaatcattcttttcttttctctaaaggcatttacgctttccggttttcaaactgtatacggagttagaaacctagaaccaagatattgtcatttgtcagttcagtttagtttttggcttcggaacaatataacttacaaagattgatttatatttgggtcggtttggttgccgctccgaattggtttcggttaataccgtgttcgatctcagttggtttggtatgtatgcctaaccttatattttgttgatttgacccgcccgcccatggg

SEQ ID NO: 146654 - DNA, 1388 bp, Arabidopsis thaliana landsberg
tgggttcttccctccttcttcttcttccacttgcctggtcgaaaacggcttccaacggtgcaattttcgcccggaaaaagagccgctcaagacgacggtggctcaggaactcctgttaagtccatcaccgccgctaaaactccagttccgttatcgttttcgccggaaaatcttcctatagatcatcatcaattgcagaaaagctgcgtgtcggcgagaaagctagctgcgacgctgtgggaaatcaacgacgacgcagaccctccggtaaattctgataaagattgcttgagaagcaagaaaccatcgagatacagagcgaagaaatcaacagagttctcttccattgatttcccgccacgatcatccgatccgatttctcgtctaagctcagaggttagggtttgcttcagtttcaagtttcctctgtgttttttttctttctgaaattctaagtctgaaaaatcaaaattgcacagagaatcgatctctgtgacgatatgattcgtagaagatcaacaaatcctcagaaattaaacccaattgaatacaaaatcattggcgcaaactcggtatgatttgcaatcttaccctaaaaacacttttcttgcggaagaagaaaggtctgattcttaattatattacaggtgaaaactcgtttcaagaatgtcagtgacggattaacaacgtctaaagaactggtaaaggtattaaaaaggatcggtgagctcggagatgatcacaagacagcaagcaatcgtttgatctctgctttgttatgtgaactagacagagcaagatcttcactaaagcatctaatgagtgaattagatgaagaggaagaggagaagcggaggttgatagagagtctacaagaagaggcgatggttgagagaaaactccggcgaagaacagagaagatgaatagaagattagggagagagctctcggaggctaaagaaacagagaggaagatgaaggaggagatgaaaagagagaagagagctaaagatgttcttgaagaggtttgtgatgagctaactaaaggaatcggagatgataagaaggagatggagaaagagagagagatgatgcatatagctgatgttttgagggaagagagagttcaaatgaagcttacggaggcgaagtttgagttcgaagataaatacgccgccgtggagcggctgaagaaggagctccggcgggttttggatggtgaagaaggaaaagggtcgtcggagattcgtaggattttggaggtgattgatggttctggttctgatgatgatgaggagagtgatcttaagtccattgagttgaacatggagagtggtagtaaatggggttatgttgatagcctgaaagatcgtcggagatttgatggc

SEQ ID NO: 146655 - DNA, 1483 bp, Arabidopsis thaliana landsberg
ttcgacaaggtaagtctctgctcttcttctttgtcttattttctctctctgttcttttcattgttttggtgtttctgagttgagactcttttcttttctccatccagatagtattgactttgctagttgtggtatggggtcttcgcttggggattttccttctaatgaggtctctaccaatgactgcaaaattccttttttgtttctttcctgatcattatagcattactctcttgttgttttaggatcttgcaatggggggaagatcgtcgctttgatgaacagcgtggaaatatagtgagactaatcattttctggactcttcaggtgaactgtttatactattctctcttttagcctatttggaattcatgcttgtggttctcaaactagagttgttgttttctttcatggtaggctgtgtgggtttggacggttagcttacctttaacacttgttaatgcaagtgatggtggtggatctcttaaacccgcagatgttatcggttggactatgtgggttttcggtttcttgattgaagctgcagctgatcaacagaagctatcattcaaaaactctcctgaaaacagaggaaaatggtgtgatgttggagtctggaagtattcaagacatccaaactacttcggtgaggttagtatttcggtatataatgagttcttcatctttggcataaatggtggtgatcgttcattgctgtatatctttgtggctatatatgttcatcagatgttactgtggtggggaatctttgtggctgcatcgcctgtgcttgaaggtgcagagtatcttgtcatattcggaccactctttctcactttgctacttctattcgtcagcggcataccattactcgaggttctcccttgttctcttcctctctacttagacaatttctgaatcacatatggctgatttgaatataaacaggcatcggctgacaaaaaacatggaaactcaggagcttacagatcctacaagaagacaacaaggtttaacgataacttgctttagataccgtttgataagccttgaagatgtgttgtatatatagctaacttgtttctatcttctgtcgatctttagtcctctgattctgttcccaagaggagtgtatgggaacttaccaggatggttcaagacggtctttctcttcgagtttccattttacagccgaaatctccctcaagaggtggctgtttagtaactgcttattctgtttcagtttcatcttttatatcttactttagtgtttgatgagtttggcttctctttgttgtatgtgtgcaagaaagttagggtagactccaaaacagcaaagagaaagaagtaaaagatgactgatttgtgatactcatatttgagttattgttcttcacaacactctttgataaaatttgtgtaaaaaattgcccgtaagaaactgaatttgtttgaaatattggacagtcttgacagattatct

SEQ ID NO: 146656 - DNA, 583 bp, Arabidopsis thaliana landsberg
ctttctctctctcctccctaagcaaaactaaaacaagctatggctggtatgcttcccggagttgagtgtgcaaggaggcggcgcttccacggtggtgctcctccgattgaatcctcgaacacagcttctgtggcggctgcggcgggacacgtctggacacggcgaccatcgttctctctttacactaccaatcatgagagccaccaggcccatgtctccttctcggtaatgaaatgaataaattattatacagaaaagagaacaaaattaatatatagttgtgttttatgttttatgaagtttttttcttaaaataatatttcgtaaaagtatttcggtttgagagtttggaatcttataattttgtaaaattataggagagaagtgttaggaataaatcttatggagaagacaacgatgagaaacttgacggagcagccaaagaggcaaagcagaggcttaacaagcggctgagaatcccaccacgtacaaggttcgatttagtaaaaaacggcgtgtgatagtaaaaccaactcgtaaatttaccttaaaatgcaccgaagaagcttcaagcctttagggg

SEQ ID NO: 146657 - DNA, 1533 bp, Arabidopsis thaliana landsberg
aggttacaacaaaggtttcaacaacttcaagcagaaccatcccaatctgtcttacagaagtacaaacgttgcaaacccgcaggaccaagtctacccttcacagcagcagaatcaacccaagccctttgttccgtacaaccaaggtcaagggtatgttcctaagcagcaatattagggcaactatcagcagcaagttccaccacctaggttcacacagcagcaacaacaaccagcttcaacaactccagattcagacttgaagaacatgttacagcagattctccaagggcaagcaacaggagcaatgggtttatccaaaagggtggcagaaattcacaacaaggttgactgcagttacaatgatatcaatatcaaggttgaagcactgacatctaagatcagatacatagaaggccaaactgggtcgaccgcagcaccattgtctagggatagcttgattgcgcttgttaaccattcgaataggctaggatagcactctactcgattaccccatccttaggaatttttcgtctatctgatttctctgttttatcgttatcgcttaatcgttctcattgcatgtttcttagtttttgcaattactcaaccaacttactcgacgaaacccagtgtgtggcaacagactgtgcagtcgagtacagttgtctcgtttcctgtctgttactcgaccagcatactcgaccacatccagtttctggcaacagattgtgtagtcgagtatagctgtttcatttcctgtctgttactcgaccacatcctgcttctggcatcagcttgttgtggtcgagtgattttagtaattctgttattgtttctgttttctgcatgttcgcttaggattgttagaaacctcaaaactgttattgcttggcttgacttagtgacttctgatcacatctcatctgtttgcatcacacccatttggattgacaaccttcagtactacaacgacatgatagtgctttaggattaattgatcttaaaaacctattatcagcggtgtgtaaaaagatctggtatgggcagctacaggtgtcgatcgatactcatgtaaactgatcgacaccgttgctctacaactcccatttgcgagctgagctaaaaggagcgtttttggtggctctatttggggattctgagcagtctgaggaggtgtgtcctgggtggagatcatgctactgataagcctaattaactttgtaccatccctgcctaactccatctccaagtcacaaatgttaagagacactgtacctctctttacatcaatcctagcaccagctgtagctaggaaagctcttccaaggatatgatatttggattccttatcataatccagaaccacaaaatcagaagggattaagcaattaccaaccttaacgggaacatcctcaaggattcctttagggattcatttggagagatccatgaagaggagagtgatcattgttggcctatagttagtcatgctcaatctctctacaatagacttaggcatgaggttgatactgg

SEQ ID NO: 146658 - DNA, 1149 bp, Arabidopsis thaliana landsberg
ttccaaggcttcagtttcacttcatcacactctctgcaaaaaaacaaaaatgagctctcaaatctgcagatctgcttccaaagcagccaaatctcttctctcttcagctaaaaatgctcgcttcttctctggtacgttcattatctcatctccgttagtgaatctctatagatgcttcgtgaaatcaattgattgattagtttttgaaatcgtttatcgaatttttagaaattgatataaatttgatgagattcgtgattcagtgattatttgatctgatggattcatttttgtaaggttagagaattatgcttttgtgtgttgttcttgaaagaaaaagaatatgaatttgggattctaatagttaagtatctaatcaaattagttttttaagatctgatgtttcttatttcttgatttggggatgattgattgttcagaaggacgagccattggtgctgcggcagcggctttcggcatcaggaaaaattcctttgtatgcatctaactttgcaagatcatcaggttctggtgttgcttctaagagttggatcactggactcttagctcttcctgctgcaggtttttttcagcctcattctttgaatatgtttgataatgtagccaaatcttaagttcagtcacatgttaatttgagtagaataggataaagttcgaatcttttagacttcattagtttaaaatgcggtgaaggattgaccgatgttttgttctattgtttctgttatagcttatatgattcaagatcaagaggttcttgctgctgaggtaacaatcgttattagtattcttgattttggtttatcggctctatgttcttcgtcgctgaacgtgtctgattcaatcagatggaacgaacttttattgctatcaagcctgatggtgtgcaaagaggactggtaataaaaaagaaaagctttgtttctgtttagtcttaattggtctcagttgttatagtttcttactcatatgtgcaaagactatctcagatatcagagatcatttctcgattcgaacgcaagggattcaagctagttggtatcaaccccattgttccctctaaagatttcgcacaaaagcaaaaccatgataaaaaggaaagacctatcttcaatggtatgtgtgact

SEQ ID NO: 146659 - DNA, 728 bp, Arabidopsis thaliana landsberg
  unsure (1)..(728): unsure at all n locations
catcactgttttcgtattgagctgcatacnatttagaagagtgtttatgattgatttatagatcataaggaagcaatcgttatgcatatcatgtcattatacatgtttacaatgtatgatgactcataatgcaaactatcctctcttgtcagcagtaatgtttggcttagtttcatcaatctcgaaattgtttgcttgttgatactgaaacactctcttctctctgattcttgtcgtagaacgagctggcgattctagagttcatacatcttttggtcgagacaatggacaagcattttggaaatgtggtaagctgtataggttcatagtagtctcgaatcgaatagactctcttgttttttgtgtttcccactttgtgatttatataaactcttttttattttatgcagtgtgagctagacataatgttccatctggagaaagctcatttcatgctggaagaaatggtgatgaatggttgcattgtggagacaagcaaagccaacatactttcacctatacaacttatggacaaagcccattaatgctaaacaccctgtttctatttctgttaatccgtttcatcactttgttacacacttcttcttgtattattattaacgatgcttcaaagagaggataatacaaaagaagcaggaaatcgaaaagtaccaattggaagtacaattcacaagaacccgatgataataaggatagttacattgtct

SEQ ID NO: 146660 - DNA, 1178 bp, Arabidopsis thaliana landsberg
cgaaacctgtgttttcccatcaccaagctttctctgcatcgccgccgtgtttacatttactgttgttaaggccgagagatagatagaaaaaaacatctgtgcgattttgccgcctctccctaaaatctttggagctccttcgtagttagccggaggtgaagtacaataaaagaaagaagaaagtccaagtgtctcttctcatctcttttctccagtaggtacgttttggtttaatttacagagttgattctaagcctaagagaaggttttctatcgattagagtgtttgatttgctgtaagggttgctcaaagttttgatttttagtttactagtgatagcagataatggaggggagattggctaatatgtggaggttgactgttaacgaaagtaaattcgtggaaactgcgttgcaatctgagctcagagtagatggtcgtggcctttatgattatcgcaagcttactattaagtttggcaagtaagtgctcatagaactgcttattgatggcgtttcttttctgcactttgtaggctttgtttgctttctttagctctaaagcttccctctttgtcgagttttgtgataaatttgaatgtagataactttgttcagtctattacctctgttagaacgaatactagcatgcttttcttttagtgtttgtaaccaaagacagcttttaatctcgtttgaattaacagagaatatggtagctcggaagttcaacttggtcagactcatgtaatgggtttcgtgactgctcagttggtacaaccttacaaagacagacctaatgaagggtctctctcgatcttcacggaattttctccaatggctgatccgtcttttgagcctggtcgtcctggcgaatctgcagtggagttgggacgcattatcgatcgtggtctaaggtaaatgtttttttggacaaactttgttgatgctgcaagagtattgctggctgttctggttggagtaatggtaagttggtctttgtgttgattgcagagaaagccgtgcagtagatacagagtcactctgcgttctagctggaaagatggtttggtctgttcgcattgaccttcatatcttggacaatggagggtaagttttgttggcaacagtatatctcattgaaggttctggttttaaaatgatctttaatgggtgtt

SEQ ID NO: 146661 - DNA, 1800 bp, Arabidopsis thaliana landsberg; identical to SEQ ID NO: 8776

SEQ ID NO: 146662 - DNA, 889 bp, Arabidopsis thaliana landsberg
aacctgttgtaaagttttccttcttactgctgcaggatcaaaactgaatcttgcactggttctaactcgaaatgcttgtagggagaaacaaagacgtgatagactaaatgacaagtattttcttgctttctcgtcattctcttctatcatttaccttttgagttcttaatcttttggtatggtgctttgtcaataggtttacggagttgagttccgtattggaacctgggagaactccaaaaacagacaaggttgctattatcaatgatgcaattcgcatggtgaatcaagcaagagatgaagcgcagaaactaaaggacttgaactcaagcctccaggagaaaatcaaggagttgaaggtaaaaactgaaaactcctgcaagatctttagcttgtccattgatcttatgtatatgccaatatgtaggatgagaagaacgagctgcgtgatgagaaacagaagcttaaggtcgagaaggagagaatcgatcagcaactgaaacgtattaagacacagcctcagcctcaaccttgtttcttaccaaatccgcaaacactctccaagctcaagctcctggaagcaagcttgtccctttcacaacttatcccggctttgcaatgtggcaattcatgcctcctgctgctgttgatacctcacaggaccatgtccttcgtcctccagttgcttaaagctgctgcttctctctactactattaacggttctgtaagattacttcttacgcgcttttttctgatgtaatgattctcacattctgtgattggtgacatagtccactgcaacttaaaatgtaaaattgaaataagcgtgcactaaaaatcaaatctcattgtgcaaaaagttggataatttggaaatcgttgttttca

SEQ ID NO: 146663 - DNA, 1302 bp, Arabidopsis thaliana landsberg
ggaggagaaaaggtagtgccaatattagccggcgattcagatggagacggtggtcgataaagatgttctgaagtcttccggggctgagcttcttcccgacggacgtcgaggtttacgcatccatgactgggagatcgaaaccctccgcggcacgattctcacttctctcgctgtcgaagagtacttaatctctatctctctcacctcataagatacgatcatatatgatgaatttgttggtgtctgtgattacttgtaggtgatatttgtgtttacggttttgtatttgtgctcgtcgttaatttgatgaactgagtagtgtagtttgggtttttgagctcgtgtacaccgtattagtggaacgtatcgaaggaaatcagaattgtgtccttgatttcgagtttttcctagtttttggtggagtatatgatctattctgtaaaaaaatcaaaatcgtatttgctttggtttagtttttgtgcttactgattttagttgttccgatctctgctcatcacatttcctggtatagctctctgtttatctcaaatatgtaaatagcatcttctgagattcacgaatgtgatgtttgattgtaacacaggtgggaaaaaaagcttaagacatctcacttacctgaaatggtttttggcgagaatgcgttagtccttaaacacttaggtagcaacactaagattcattttaatgcgtttgacgcactagctggttggaagcaggaagggcttccacctgttgaagttcctgctgcagcacaatggaaattcaggaggtaagtttcaggatttgactgaaaaatatatcacaaaagatattattcttttcaatagggaagctttgcttgatagttgtatctgataccactctgatctacttgcagcaagccgtctcagcaggtgatactagattatgattacacgtttacaacgccatactgtggaagtgaagtagttgagaaagacaaagaaacggttcgccttgctctcattttcactctttttctgtctgtcacacgataatcaatcaagtgtgactttcatgctcattgctgtatgcttttttaatgtgaagcaggttgaggcaaaagctaatccaaagggggaagctactcttcagtgggagaactgtgaagatcagattgatttggctgctctctcacttaaagaacctattctcttctatgatgaggttggtcaccttatccatacaaactcaaacacacatttttctgggcccttagatgtactaattctctactccttcaggtagttttgttgaagatga

SEQ ID NO: 146664 - DNA, 402 bp, Arabidopsis thaliana landsberg
caaagaacaaaaatgggtctggtaacaaaagctctcaaatatctcttactcctttctatttccttgactttcatctacaccaatgcagtttcatccgcttctccaatgactccaccgtcatcgccggctaagatgagcaggagacttgtggcagttgaaggcatggtttattgcaagtcatgcaagtattccggcgtcgatactctcttggaagcatctcctcttcaaggtccgttacattataacgtccaatctctttcaaaaaatttagttaccatgtttttatccttttttttgccatgggaccaaaattgtaggatttacttaattgtatgtcttaaacctttttcatttttcaataaaatatatatattattagcaaaaaaaaataaaattagttac

SEQ ID NO: 146665 - DNA, 992 bp, Arabidopsis thaliana landsberg
  unsure (1)..(992): unsure at all n locations
aatgctggctcgactgctgcgactgctttgcttataggtgataagttgattgttgctaacgttggtgattctagagttgtagcgtcaagaaatggttcaggtttgattattgttctttctagatttatttaactggtgtttaaggttttggatatgtgacggctctttgtttgttctgtagctgttccactctctgatgatcataaacctgatagatcagatgagcgacaacggattgaagatgctggtggctttattatttgggctggtaaagtttctacattctctcttcttatgtttgctttagagtgtatgtgcaatgtgttttgggttgtttagttattagttgttacttggaatannnnnnnnnnnnnnnnnnnnngtggaattcttgcggtctctcgggcttttggagataagcaacttaagccatatgtgattgcggagccagaaattcaggtacttagatggtttactctcttgttgcatggccattgagcctctttgttcttnnnnnnnnnnnnnnnnnnnnnnnnnnnnnnnnnnnnaggatataagcacattggagtttattgttgttgctagtgatggactgtggaatgtgttgtcaaacaaggtttgtttccagataaagctcttttgaattcttatgctttactctatgtatggttttgcaaatgcacatgttgtctataaccattaacaaggaattgagtacctacctaaaccacattctcgaaactattttgtcaggatgccgtggcaatagtacgagacatttcagatgcggaaacagcagcaagaaagcttgtgcaagaaggttacgcacggggtagctgcgacaatatcacttgcattgttgtacgattcgaggtttcttgagcaagaaccaaattcatattgttcttgttctatgaatgtatcatcttcagctgttgaatacactaacatatttgggttatacaattgtataaaagaaagatatatttatg

SEQ ID NO: 146666 - DNA, 1411 bp, Arabidopsis thaliana landsberg
atcataagggaatgaattcagtatcagctgcagaaaggctaaagagttttggagatgctggtccaatatgtaacaaaagcattatatttccaagtaaagttgttacattagctaacagcttcgagaagaaagaccgttcctggtattcaaactttttatgatatatacatggtactgcagacaagtttagcttaagctaatgagttttttttttaaatctattgcaggtatgtcaaatctcaaatccctactgatctgtctattcaagtcaacgatattaccttcaaagcacacaaggtagtctgtttatagcaatagagaaaattgtgttagcttgtgagtctagtgtttgcaattctagacaactaagatgtgcaaaagctcagtatggatagactaacttggacttttacgcatgtttttgccttgaacagtttcctttgatctccaaatgtggttacataagctctattgagctaaaaccttcaacttctgagaatggatatcatctcaagctggaaaacttcccaggtggagcaaaaacaaaagagaccattctgaaattttgctacaatctcccactggacttgaatcctctcaatgtagctccactgaggtgtgcatcagaatacttgtacatgactgaagagtttgaagccgggaatttaatctccaagacagaagctttcatcacttttgtagtacttgcctcatggagagatacactcactgttctgagatcctgcacaaacttatctccgtgggccgaaaacctccaaatcgtaaggagatgctgtgacttgcttgcttggaaagcctgcaatgataacaacataccagaagatgttgtagatagaaatgaaagatgcttatacaatgacatagccacccttgacattgatcacttcatgagggttataacaactatgaaagcaagacatgccaagccacagattacaggtaaaatcatcatgaagtatgcagataactttttgccggtaatcaatgatgatttggaaggtataaaaggttacggtttaggcaagaatgagttgcagttcagtgtgaacagaggaagaatggaggaaagcaacagtttaggatgtcaagaacataaagaaactattgaaagtttagtcagtgtacttcctccacaatcgggagcagtctcatgtcactttctcttaaggatgctgaaaacatcaattgtttactctgcatcactagctttaatatctgatcttgagaaacgggtcggcatggctttggaagatgctaatgtatgtgacctcctaattcctaacttcaaaaatgaagaacagcaagccagagcccggtgagaaaaatttactctttaacaatagataaatcgactaaagaagtctttatttgataactttgatttaggttt

SEQ ID NO: 146667 - DNA, 5361 bp, Arabidopsis thaliana landsberg
acaaccagtaaccacatagagaagaatcaaaaacatctatcaaaatgtaatcaaaccaattcttgccaccaccaaaacctaatcactagtccatcacgtttacaatgctaatgatacctaaaacagtgtcaccagaatcaaatactaactaagtatttttaaacatgcagaggatggaagaaactcaccgacgaatctgcaaaattgatctgcggccgggactagatggaacgatcggatacgtcacatcgtcggcagcgccgccgcaaggagacatgatccatggtgagagtaatagtagtaagaagaaaagatggcggaggaaaggacatctcggcggcatggtccggatcaattatggagaatccgaacagagatagagatgatgatgatgatcagctgtgaaaaaacagaggaggacgagtcaatcatcgaatttaagaattgggagataaaagataagagaaagggttttcgaatttacctaagagtgaagtcaacgatggatcggagataagatgcgaagctttagtctgaggctgcggtttagggatctccgtctctgtccggcgagtttctcctcccttgcccccacccttagtgtgtctaacgcgttttccttttgaatcttcttaacaaaaaaatattttaatggaaaaaaatacaaaagttttttttttttttttaaacccccacgaacgaaccaaacactgttttgcttcgagtaaggtttgtctgaggctgcggtttaaggatcttcgtgtgccccaccgtactgtccagctaacttattcggccgagccgagccaatatgcgttaagctttttggtcttctaaacaccttttgctatcaacaaattcgagtgaaaatatcactaaaattactaattgtgttaaaaaaaacaaattttcatattgttaaaggtaaataaatcacattttcttttgttaaaggtaaaacaatcacatatacattagacatagtggcaaaaattgtgacgattatttttggtttaatcgtacttcttatcatataattttgtgtttatttcagtgtttaagaaaatgttaggcgcttagctggcggtaaccctccgcttagcgcatagaacgcttagtcgaggcctagacaattttagccggtttaatcggttttagaataaaacgatatatatttatatactattatctgaactgttgcaaaaactattataaaaagcggaaattatcaaatttttaaaaataaatttaaaatttaacattttagtaaaataaaataaaataataaaaagtataggtgtccttaaaattatttaaaatatatttttgaaatttttaaaaaatattaagagacgattagatccgcctagcctaacccacctaatgagagtctaatccgcttaatgtttacatagtctgccaaatctatctcactgattaatagaaccgattttgaaaaagtcaaaacggtataaaagcgtttagtgtctaggcgtcctagacgacgcctagcccactttattgaacactgatttatttactagaaattgtatcggtataattggagatgcatcattaaaaaaatttctatgagatcaaggtaaatgatcttaggtatgcaatattatcttgcaaaaattggttagttttggttaaaataaaaagagtgtttttgacctttttccatcaagagtaataccgagtttactagctgtattgctgtgtttacttcggtttaatcagattgagccggttagagaaaaagtaactaaaccggttttaaccgtcatcgtttcgttaaccatgaacgaataaggagctatagaattgaaaattttagtagtcaagttggctggcttaggtttaaatttaaaggctttaaaaagcttcttcctctcttccgttctgacgactgaaatcttcttcaccggcgaaatcgaaaagttttccagcaagaaattgaagatgttgcagagcaaagttttcaataagaaaaccagaggaggaagaatccaaaaggtttctcttcaatctctctatgcttcttcttcttcttccttccgagtttttttgttcgttattgtaacttttaactctttgtctgcgacagcaagtaagagaggtttatctacgagatgacatatactgtggagctttctcttgcaagtcttgtgattcttcagctgctcgtttgtcttcctctaagataatcgttgttgataccaacgtcgttcttcaccaagtaatttttctttaatttgattacataagctaaaagttttgagcttgtgggtattactaatgtaatattttgtttgtttctggtagattgatttgttggaaaataaggctatagacactgttgttgttctgtctgtggtgttggacgaagttaagaacaggaatagatcggtttacaatagaatcagacttctctgcagcaatccagcgagacaattctatgttttctccaatcatgtccacaagtaagaagaccttgttcgaacttttagcttttagattaaccagattttaggtggacaaaagaacataaagaattcaatgattttggaatttctgttcggttatattgattagatgctctccttactggaacctactaagctatagaaacgcttttctccgtgtccttatcgttgttttctcgcgtttactaaactcttcacagggatacttatgtgcaagccatggagaaagagagtgcaaatgaccacaacgatagaggttttatttactattcaatcaccttctttgtttgttaacatcatgttactttcttgatgatgaacttacatacttctcttggtaagcatctgttattaaaattttaaatttatctggaattcagctattcgcgtcgctactctatggtaccagaagcatctaggggatacatctcaggtgttgcttgtaactaatgatagggaaaataaacggaaggccactgaagagggaatatctgcggagacaagtatgtgaatcatctatatttttcatagaagttgtcgaagcttggttttgcatgactgtttgtgtgtcttgctacatgatgttgaagtttatcaatgaatgtttctgtatcagttgaggcttatgttaaatcacttggacaacctgaattgctggatctgcttgcccaaccaaccaatgaagacataactatggaagatgcagatgattctagaccttcgaagaggaaacttatataccaagaggtaatggagataaacacatttgtttttcagtctcagctttgggtaacttgatactgccatcaaacaacttttatctccaattttgttttttttcctgcctgcagcataagcccatgtctgagattactgctggcttacaccgtggaatatatcatcaaggaaaactccgggtcaatcgtttcaatccttacgaagcttatgttggaagcgagagcattggtgaagagataattatctatgggcgcagcaacatgaacagggcttttgatggtgatattgttgcagtcgaactcttgcctcgggatcaatggcaagatgagaaggcattatctatagctgaagaaggtctctttcaatatctacatatattttacagcagttatttccttgcatgacgttgtgttaaacttatctttcttccaaatatcaaattcaaatgcagatgatgaagaggatgatactgttcatttggctcccgacaatgttgatgatgctcctagaacctcaaatttatcccatgaaacttctggggataaaaatgcagcccctgttcgtccatcaggccgtgtagtcggtgttatccgtagaaattggcactcgtgagttcattacttgattacccttaccttcttgcttgtttttttttctaattgagacattgatatatcatatgagatcatgttaacagacttgttaatacattctcattagaggtacctgtttctggtgactacatatgtgactggacgattatctttagtactcttgattcagtgtcctttgtctgtgcaattatgctttacttttccttaagtttgtcttctgtttcaagccatggtttctggatgacggttcctaatttgtatgttatcatgcagctattgtggatctcttgaaccgatgtcactacctgctaatagtggtgcaacggcacatgctagatttgtctgtaaaggtcgcaggattcccaggatccgcattaatactcgacagctgcagaaccttttggatatgaggatagtagtggcagttgattcctgggaccgtcaatctcgatatccttctggtcattacgtacgaccaatcggcaaaataggtgacaaggaaactgaaacagaggtaagggatcatattaatttattcgattctattctagtaggagttaggtgggcaagagtaggaaaagtatattggtttcctttcttcagagaagtaactgatttagataattgaatataacatcaatactctttcttgtgaatgctgcaggttgtgttgatagagaatgatgttgactactcgccgttctcttctcaagttctggcatgcttgccacccttaccttggtctgtatcctctgaagacgtatccaatcctgttaggcaagacttacgacatttgcttgtctttagtgtggaccctccgggtatgtatctagagctttacattttataaagtatatatgattcaagccaaatttaaatgtctcccagagtctgcagttagttgtgcacaagcagattaactttatttggtgctaacaggttgcaaggatattgatgatgcattgcactgtacatcgcttccaaacgggaactttgaacttggagtccgtatcctagagtcctcagattctcataaatatgactgtgctttcaatttaggacatgtcaatagtcaatgagttaaaaatcagtttgtgggatatatttaaccaaagcattgaaatggctcatattaccttttagcttcatagttcgcttttatcataattatctagtacgagaagtgcttttgaggtgatctgctttatgccttttagtgaatcggtatcttccagaatttgtagctagttccgttgtattctcttcttgtcttgggagtgaatatatatgatgcttatccttgaccatgtttgattagacattgctgatgtaacgaattttgttcaccctggtactcctttggatgatgaggcatcaaaaagaggcacatctgtctaccttgttgagcgccgtattgacatgcttcccaaacctttaactgaaggtaatatcttcttacagaaatacattccctttgtgttggaatttctatgcactcatgaaacatgatattgcttgta

SEQ ID NO: 146668 - DNA, 4449 bp, Arabidopsis thaliana landsberg
atggacttgaatgtacgaatggaaagtttaaatcctttttcatatattcaggtaaacattgatgaagttttggtaatttatgcatattaaaaattggttaacccggttgtagatggtgcaccgggttaaaccgacccgagaaaaattcgggtcaacacaaaccaggggacagagacacgagaaagaagaagatagtaggtagaagaaaacgagaggcaagggtcaggcataatatgctctctcactagcctaagaatttgtagaagcaaaaaccatggattagggtttttcagtttcctctttcaatcgattaacccacagaacaaagtatctcttaccttcgggtttagatattctcttcgtctccgtctatatatcatttctcaaagtcgacttacgaatttgactcaggagatatttcgtttgtgattttgttaaggctagcttcaattctattcagattaatcaatggattctcagatgctcgtggcgcttggactatcccttgttgggggattaagtacctctttaggttggtcaatgttagcttccttctacttaaaaaaaaaaattctgtattttgcaagtgttgctgaattttagatgtggcagataagtgtatgatcttagaatcatgattcattgttgttcgattgttttaaatgatgattgatggttcttttgatgatccacaacactctgcctttgttttactatctttggtgaattgttttcgttcaagaaattgtcaaaaagctacttgtaggatcagcaattgcttgggttaatgataagatttgtgcaatgcttgagtgttcaatacattgctagtttcgagatatgaagcttcaagttagattgttttcttcaatttaattaagtttcatgttactttttcgtaggtgcgctttttgtaattcttagtgagactcccaatatgaagatgcttggacttctacaggtgacgatgctacgtctagttttccaatattggtcaatttctggtacaacagggttcccgtaattgtagtcttgtagaagccattggtggattttcattgctacattctctttttaatattgcatcaatgctatattctcttgtcgtcaagttttgtagggtgcaagtgacgagaatttgtgttcttgctccaacattcttttgtactgaaccttttcacttgggaaaatttgatccatcttgtaagtttgtttaactgatattttcactcctttttacagggttttgcttcaggtcttattttgaggcatatcgttcttggatttggctcataatgctataaactttattgggttcttaaaagccaacctctgggttagtacttctgtccatcttggtacttcagtggtttttgttattcaaataatatgtttatttatttcacactgaaagtaatatagttttctagtgatgcagtttttcggtggtgtgatattctttgcgtgtattaccaaattcatacccgaaccaacacttggtccttctactgacggcaaaagaagaaaggcaagagtgttttttttttctttttttacgaattgttatcaaaggctttctggttctgtagcatcatgtaactttggcatattgttgataacagaaaaatggagacgagggaggtaaagacatgatgaagaagcatcgcaagcaagtcttatatagtggacttataacagctataggtatactaactttcactaccatccctttcttttattaatcatctgttgtccgagacttgggtgcatattttaatctgtaatttgttggctagatgtttcgacaatgactcctacaaaccattacatccaatgtacttgaactttattcgtttgcacaaacgtctggtgttgacttgcaactttaaactctttatatttagctaactagtcaatatattacacaacaataagattatatgtgtgaaagacctaatgatctgtgtgtttgttcaactgggaagtttcatgttttttggaattatataaaattttctttgattttgatgttaatgttatagcttaaatacaaaataaatgtttttctaaactcttcatgtatttcttatcattttggctttgaactataggcataagcttgcacaattttccagaagggatggctgtatttctcggatcaataaaggtgaggattaaaaaacatgaaaaacagaaaatttcagggagcatgcatgcattctaacaatatatctctatactatttgataacctgtgtcatctacgtattaatatcaatatttgcttgttggattctacttcacagggcatgcgagttggtgttaatctggctttggccatcgctttacacaacattcccgaggtagaaattctgtaaccattataaaagatacctagaaagaataacatgtcttatttttcttgcgtgtttcctgtttgactgtctattttccactataaactaatattaaagaggattaaacacctagattgttcatatttctgatttgacatgcttctcttgctgctccggtgtgatattttcagggtgttgcagttgcacttcctatttattttgcaacagagaggtaagaacatgattgcatgtggatttacatttatttctctatccaccttgtatattaggataggatttatgcagttcattatactccgtggttgtattcattccaaatcaattttatgcatgtaacagcaaatggcaggcatttaagttggcaacactctctggtttagctgagcctctaggtgtaattatcgtgggtaagttgcattggttttctttgctcaagttgcttcttatatacgagtccctgttctcttaagagttctaaaaagagtattataaattctgctttgatccatcttccttacgatgcagcctatctattcccgagaagcttaagtccagaaatccttgaaggtttgttgggagcaggtaagtaggaattctgcagcatttctatactttaaactaaaatcattggatggaaaacgaattgatgcaaaactgttgtttgtatgatgcagttggtggaatcatggctttcctaacattgcacgaaatgcttcctttggcatttgattatgcgggacagaaacaagctgtgaaagctgtgttttttggcatggcatgtatgtctgcgaggtaaaaatgcaaacctgagaacccatattcataaatctacttgctgtaaaacataattgaggccttgaaatagtacttgcatcctaggattcaacctagtagttagaaattattggtttaccttaaccattcatcaacataatagacgagaaaattgtagtggtgaaaatgtatctaatccgtggcgtagattatgatgtgtttgtctatgttttttctttctcttttttgcagtctttactttctggagctgagtttgcctgagacaatgagcttgtaagtttaatgatgtcatgtgcaataattgcctcccccaaagagataaatcagtctctggagtgaagtagtctctttgtatctgtaaagactgaaatctgtaaacaatctgactattcattttaattcaaaaggaataatctctttagtaaactagagttttcacataatttataacaaatgtcactctaaatctatatttttttcaaataataatattgggcaaatactacacaaagtgcttatttgtttctcatcacaatttagtctttttcttttagaagaccatgtgatctgtggaccaaaaatccttttgccaaaaacaaaaagattctttctattttattctgagaccaattcaaacttatcagaaaaattacagctctagtttattattgccatgaatttattcctaaatttagtaaaaaaaaaaagaaaattctttgaattctcctgttttgcatatcaatggcagagcttgaaactctctctacattttattatagtatatattccttccccaccttcaccttcaaatgcatcacaacaaaaaatacaaaacaacaaccaaaaaacaaaaaaccaaaaaaaaaaacaaaaaacaaaaaaaacacaagaaataatggagatgaagaacatctttgtggccctctttatctcggccgtgttagtgagctcagtctccgcggctacaatggagtctccagcaccatcaccaggtgcttcctctgcctccaccgtagcttttccggtggttggctccattgttgctgcatcactctccgccttcttggctcttctcttgcagtagaaagacaagagtcctcaaaatatgaggagatatataacaaaactctttttttgttctgattttgttccttagaatctatgatgacaaataacccattttgatgtataatttcattgtgtaagttattacactaatacatatgagtatatgataataataacactattttatcagatctaatgatatctgatca

SEQ ID NO: 146669 - DNA, 1137 bp, Arabidopsis thaliana landsberg
agttgcttatggctcttatttgaacttaaaaaccacttgtcgaacattgaacgatgtcaacaaatccaaattttaatattcaattgaaagttttaaaaattgggttgtacgtttttacttgtgaagcaagaaactacactgattcacttttccattttcctcatgaacagatgggaacagcaagtgcgttagatacgctttgtggccaagcgtacggagcaaagaagtacggaatgttaggaatacaaatgcaaagagctatgtttgttcttacactagcttctattcctctctccatcatttgggctaacacagagcaccttctcgtcttctttggacaaaacaaatccattgctacactcgctggctcctacgcaaaattcatgatcccaagcatcttcgcctacggtcttcttcaatgctttaacaggttcttgcaggcccaaaacaatgtgtttcctgtggttttctgctctggagtaacaacttctctacatgtcctcctttgttgggtcttggttttcaaatctggtttagggtttcaaggagctgctcttgccaactccatttcgtattggcttaatgtcgttctcttgttctgttacgtcaagttttcgccttcttgctcactaacttggaccggtttctctaaggaggctctacgcgatatcctcccttttctgagactagctgttccttctgcacttatggtctggtaatacatatatatgaatcaatgttacaaatacatggatctcttaattagctatcttgatttcttatgtaatgttgtttgagtgcagcttagagatgtggtcctttgaacttttagttctcttatcaggacttcttccaaacccggttctagaaacttctgttctctcaatctggttagaacaatgcatatgaataattgtgtattttctttatcatgttcttgagtttagtcagaaattatttgcagccttaatacatcaggatcaatgtggatgatcccatttggtctaagtggcgctgcaaggtaaacttatataacttgaatcatgtaaccttacatcaaactcatgatagaccattgactttcctttaatattagtgcagcacaaggatctctaatgaattaggagcgggtaaccc

SEQ ID NO: 146670 - DNA, 1265 bp, Arabidopsis thaliana landsberg
gagctctcgtaagcctctgaattcgatttgacctcacaaccatacaaaaaattctcccgagaaaatctctctctcaacgaacgaatttcgaatcaccaagaagaagtaagctctctctctttctcattctcattctctctatctttcaatttctcgtagtcaattttgtcttaatcttcatagcttttctcgatttatacagattctgagatttgtttgcgtttcatcggaataatggaagtgaaagtagcaacaacgacgtcgtttcattggtcaggacgacacacggcgattcctcaatgtccgtcgttttcacaaaccctaacttcatcaaaacgccgtcgttcccgtggcggtgatgtttccgtcggaggaggatctttgagattaaaaccttcgacgtttctcggaacacaatctgggaaacttcaccgatctaaatcatgtgagctttggcaattttctaattccaccacgaagaagataagaactgatgtgaagaagaaacataatcctttgagaagagtttgtagtgcgagctccggtttcttctcctccgacgaagcattctctgtgaaaatgcaggaattagcttcacaattcagaaacgcaggcgatgaagaagaagaagagaacaaacagaaatcagaagcagtagataacgataacgatagcaataatcatagatttggttctttgaagctattacaagagtctgttccaggtttagcttcattggaagctccatgggcagagatggttaaccattcaagtattgagcgtaaagcaaacagtgttgatttacctctatcacttaggataataaagaggaagttacaagaagaagctcttaagaaagctagtgctactacttactgttctatcaatagagctttttcttctatggttttcatgattgaggagcttcatagctttgcgttgcagactagagtgggtgttcttaagcaggttaagaaggaaatgcacgcttcattgttgtggattttccaacgtgtgttctctcagacacctactttgatggtttatgtgatgatccttttggcgaactacactgtgcattcagttgcatcaaacctacctattgcagcatctcctccagttgttaataaaggtccggatcagacgcaacaaaggattgatttttcttcgttaaaggagtctaccccgcttgatgggtccaaatggttaggatagataaaatttgacaaggtttcccacttgccgagacatcgagactcggtttc

SEQ ID NO: 146671 - DNA, 3007 bp, Arabidopsis thaliana landsberg; identical to SEQ ID NO: 26527
  unsure (1)..(3007): unsure at all n locations

SEQ ID NO: 146672 - DNA, 1125 bp, Arabidopsis thaliana landsberg
ttagagctatgggtggatctgttccatttgaagaagctctagctgcaagactttctttattcaagccttctctttcaaaagtagaggaatatctcgacaagagacccccaaggtattgattttggttacagttactttgcatgtgttgtgattttgatcttttggtatgatgcgagctaccttcccatgattcactctgctaaataaatcgtttcacttataaagatagattttacttgtaagtgttccattggcccatgttcttgtcttgaattagactttgaccaatagacatctagctggcttgattcctgcttaagatatgtccagattactttctcaagtttgttattatagtgtgtttctttggtttgtttaggctatctcctggcattgaagagttggtcaagaaactcagagccaataacattgatgtctatttgatatctggaggttttcgacagatgatcaatgtactctatctctctccctagtttcttcatgttctttactaagaccagctgcatcaattcttgtgtagaatactacaatcatggtgataaggttatgattcaatttcttttcactgtagcctgtagcatcgattcttggcatccctcgggagaatatctttgccaacaatcttctatttggaaactccggcgagtttctgggatttgatgagaacgaacctacgtcaagaagtggaggcaaagccaaggcagtgcaacaaatacgaaaggttcacggaactttattaatttgcaagctcccatatctcttcttaagtacaacactttgtaccaatgaaacttggttctttccagggtcgtctctacaagactatcgccatgattggagatggtgcaactgaactcgaagtaagctagtgacaaccgagaatttgcagactactctgaactctcacttacagtcttgaagtctctaaggtactatacttgcaggcacgtaaacctggtggagcagatttgttcatatgcaacactggagttcagcttcgtgaagccgttgcagcgaatgcagagtggcttatctttaagtttgaatctctcgtgaactcattggagtagaagcctctatagcgattattctcgtttcggtaaa

SEQ ID NO: 146673 - DNA, 1522 bp, Arabidopsis thaliana landsberg
cttgttgcgtataattcgatgatcaatgtttatggaaaggccaaattgtttagagaggcgcggttgcttataaaggagatgaatgaagctggtgtcttaccaaatacagttagttactctactcttttgagtgtttatgtagagaatcacaagtttttagaagctttatcggttttcgcagagatgaaagaggtgaattgtgcgttggatctcacgacttgtaatataatgattgatgtttatggtcagcttgacatggttaaagaagctgataggttgttttggagtttgaggaaaatggatattgaacctaatgttgttagctacaatactatccttcgtgtttacggtgaggctgagcttttcggtgaagcgattcatcttttcaggttgatgcagaggaaagacattgaacagaacgttgttacttacaatacgatgattaagatctatgggaaaactatggagcacgaaaaggccacgaatcttgttcaagagatgcagagccgaggaattgaacctaatgccattacctactcaactattatatcaatatggggaaaagctgggaaattggaccgagctgcgacactgtttcagaagctgaggagctctggtgtggaaatcgatcaagttctgtatcaaaccatgattgtggcttatgaaagagttggtctaatgggtcatgctaaacgtctgcttcacgagttaaagctcccggataatattcctcgggaaaccgctatcaccattctggctaaagctgggagaacggaagaggcgacatgggtttttcgtcaagcctttgaatccggggaggtaaaagacatatcagtatttggctgtatgatcaatctttactcaagaaaccaaagatacgtaaatgtcatcgaagtgtttgagaaaatgagaaccgctggttactttccggattcgaatgtgatagctatggtgttgaacgcgtacgggaaacaaagagagtttgaaaaagcagacacggtttacagagaaatgcaagaggaaggatgtgttttccctgatgaagttcatttccaaatgctgagtttatactcatcgaagaaagattttgagatggttgagtcgttgtttcagagattagaatctgatcctaatgtcaatagcaaggagttgcatttggttgtggcggctttgtatgagagagcagataaactaaacgatgcttcaagagtcatgaatcggatgagagaacgaggaatcttaaagccatttcctggttgaataatgtcatataattcttcttgtgctttctcgagtaaacaatccggatgaatctgttccatgcaacagtgttgaggttgatctattcgaaatcagctcccaaaattctatgtacattcattgttgtttccaataatcgttcttctcgcccgtgacgcagccaatgttactctcgttatgccgcctcctttgttgttaagatgtatgacacttcacatcctttgtctcaatagaattacgttaaatatgtgcttctgtttct

SEQ ID NO: 146674 - DNA, 755 bp, Arabidopsis thaliana landsberg
aaaaagaagaagaaaactttgatccatcttccaacactttcgtaatttgaaagaagaagaagaagagataccaatggcggcgtttacagggacaacagacaaatgcaaggcgtgtgacaagacggtatacgttatggacttgatgactttggaaggaatgccttatcacaagtcatgcttcaggtgcagccattgcaatggcactctcgcggtatctttctatcttccttttcctccattgttccctcatgaaaaaaaaaacacaaagagaacacatctttcttctccttttcagatatgtaactactcatccatggatggagttttgtattgcaagacccattttgaacagctcttcaaagaatctggaaatttcagcaagaatttccaaacaggttgctaacaaatcctctgtttccttagctctgtttttttattaacctctcttgaaaagctaacaatctttgctactttctcttcttggtcttttacagctggaaagaccgagaaatcgaatgatgcggtaagcacataattcatcaacattcctctgttttctctttttgttttctaatctgatttcttggtgtgatcatttgcatagacgaaggctccaaacaggttatcatccttctttagcggcacacaagacaaatgtgcagcttgtaagaaaacagtttatcctctagagaagatgacaatggaaggagaatcttaccacaagacatgcttcagatgtgcacatagtggttgtc

SEQ ID NO: 146675 - DNA, 2049 bp, Arabidopsis thaliana landsberg
accggaccggaccggaccggtttggttcaatatcagagatcaatcgaatcgacccgacccgcttagatcgatgtgtgtgctctgtgattgactgattttctcagagggataatcagtgacacatcgagtcgaagaagaacatacatttctattgaatcagatctgatctgtttagtcagtttttaaactgttctgatctaattgagatttctcaattccactcaaaatcctttaaagcttgtctcttttgttttctctgaatctaatttgggtaaatcaagaggagaagtgacaatggatgcttttagaagacaagcgagtaagcttagagatcaagtcgcaaagcagcaactggtaattccttttcatcgccgcaactagtttcattgttacggattcagcgaaacgaagctcaatttaggttctttgttgctaatttggataaaaattggaaactttttgatgggttttgatttgtatattattgagtattatagagttacacaatcttggttgtgatgatgtgttgattgatgtgtggtaatggggaatgtaggctgtgataaagcaattcagtgggactggttatgaaagctcagatgtaatggtgattgatgagcttgaaatgcaaaggcatcatcaactcgataaactttaccgctctactcgttctgcaaaggtttgactgatattgacctaatggcattgtcacattttatatgagttcattgttgggggagaaggtttcagtatgattcatcgtagcacaataccctcaaacatatgttattgtcactttcaggagttccagagagatattgttaaagcagctgaggcatttaccacgatcgggctcagacacattgaagcaggtacttaactacttatgagtgtctgttttgtgttacctatcattgaattaagttatactatgatacatttgtgagttttcttttaatattctttaaaatttcaggaaccaagttgtctgaagactgttgtaggtatgggaacgaaaatagtcagaacattgatgagaatatactggccaaggctgcagctatatacggtgatgcacggaaacatgtagacaaagaacaagaagacttcaacaagcttttggcttctcaggttcggcttggattagctgtgtttaatcttagtatgtttacgtagaattaaatctagtagataacaagagaaaacctttttgttaaatgccgttaaggttttggatcctctaagagctatggttgccggttctcctcttgaagatgctcgtcatcttgctcaacgttacagccgcatgagacaagaagcagagacacatgtaatcatcttaagatcttagttctatgatgatgttggctattttattttgtaatgtaagttaaaacttaaaagcaaaacaggcaacggaagtctctagacggcaagcacgtgtaagagaagctccgattccagaaaacgtagcaaagcttcaactagcggaagcaaaaatgcaagagctaaaagcaaatatggcagtccttggtaaagaagcaactgctgcattagccgctgttgaatcacagcaacatagactcactttccagaggcttgtggctatggtatgttttacatacacacacactggatttttttgtcttatgcagattactatttaccttatcgcttattctaggttgaaggggagaagaattatcacttaagaatagcagccatcctcagtgacattgaagccgaggttagtattggatgaatctttcccacatctttttctcatcaaaggctcacacttttggtcttaccgcgtagatggtaaccgagaaacaacacaaagaatctgctcctcctgcgattccaacagagaacggctcagagaaaacgtcttactttcttgctgaagtaagttttatcttccgtaatattatcatcgcatatctcacagaaagaaaaagactctccataagcaacatatatgttctctcgcaggtgattcatcgatttctgctgctttcagagaagagtagactttggacaaggaga

SEQ ID NO: 146676 - DNA, 1055 bp, Arabidopsis thaliana landsberg
ttgttgatgcaaatcctaaactgtttctcatcttgacaggctgttgcagaaggaagggctatatataataacacaaagcaattcattagatacatgatttcttcaaatataggggaagtggtctgtatatttgttgcagctgtactgggaatccctgataccttggcacctgtgagtttgtttagcgtggtagtaacttatctgcaaagtttatttttatcaagctccgtctaaatctatgattttcgtggtaaataattgtaggttcaacttctgtgggtcaatttggtaacagatggattgcctgccactgccattggctttaataaacaagattccgatgttatgaaggcaaaaccccgaaaggtagcagatgtaactggacggtatctcttgtgtattttagttcattgagagaagtaatgtgacaaacgattgctttcgcccgatttgcattagtgtgaaatcactaggagagctcataatactatactcattttttaggttttatgatgctttacatctccctttggctgttaccagtattatgggttttagtgatgatggtgcaaggttttgtcatttaatgaagaagggatttagaacttctcaattgactatctgctagtagtgtgctaatttcttctcaaactagtcacaccttttatcttcattattgttctgtttgttgttgaattccaggttggtgaagcagtggtcactgggtggttattcttccgctatttggttatcggaggtaaacttaaaatgttggctctgtaacttatctaatcatctttcgaaactaagatcgtggaatctttgtggtcaagtagtaaaagttgaatttattcgccttcaagcttctatatccttctagaggacctatctgcttgagctgtctatatttctttgcagtttatgtcggcctggccactgttgctggctttatatggtggtttgtttactctgatggtggtcctaaacttacttacagtgaactggttagatattatttccagctaaacctccacatttttaagttgtttttaagt

SEQ ID NO: 146677 - DNA, 1435 bp, Arabidopsis thaliana landsberg
gcaagccaaagaacgtagactagaatcaatagacacaagaaaggaaaatgaagaagcaaaagattacaacctttgttaaagaactcaacttacggatgaattcgaagaaagaaccgataagtctccgatacattcacatccttggcaccgttgtcttcttctcctctgtctcctctctcgtcatcctccttgctttttaccttaaccaacgcctccaaacatcactcttcctcgtcgaagattatcacactctctcctcaaatcctctcacttctccttccctctctcctcctccttctccttctcctcgcagctctggtagtaatattgcagacgaagagctgatgtggcgagcagcgatgcccccacgcagccccatgaagaatgagacccatccaaaggttgcgttcatgtttctaacgaggtggaatttgccgttgtcccctctttgggaaatgttcttcaaaggtcatgaagggttttattccatctacgttcatacctcgccggagttcactcaagagccgccggaatcttcagtattttacaagaaacggataccaagcaaggtatatgattatatatttacattcattaattaggtttaatttgttgccttgttggttaacatattattgtattttacaagataacattgcgatactttgacatttgtaaaatattgtaggccgttgaatggggaaaatgttcgatgatggatgcagagaagcgtcttatatctcatgccctactagaaccttccaacgcacgcttcgtcctcctctccgagacttgtatccctctcttcaacttcaccacaatctacacttacctcacgcgctccactcgctctttcctcggctcattcgacgacccaaggcccatgggccgaggccgttacacccctaaaatgctcccacacgtgtcgctctctgactggcggaaaggaaaccaatggttcgaaatctcacgtagagtcgccgccgagatcgtctctgatcgccggtactacgccgtctttaaggatcactgccgaccgccgtgttatatcgacgagcattatcttccgacgttagttaacaagatttgtccggagatgaattcgaaccggacagtgacgtgggttgattggtcaagaggtgggtcccatccagcgaggtttgtgaggaaagatattcgggtcgggttcttggatcggatccggttcggttcgaattgtagctacgaaggtgaggtgacgaatgtgtgttttcttttcgggaggaagtttcatgtgagcaccctcgagcctctcatgaagattgctccatatttgtttggaatttaattaagactttaatttttcattttaaacacacaaataattcattcatatactaatatacttgtgatgagactgttaatttattcattcgaatacacaatcaactccaat

SEQ ID NO: 146678 - DNA, 1394 bp, Arabidopsis thaliana landsberg
ttcgatccacaaatgggtttgccacggtttctgatgaatcaaatgttgacaatggtgagaaacttgtggataagaagccaaagattttttacaagaaaccaattgatttcaccaaaatagatgccaatttactacctacggtgatgcttatgggcaggccaaatgttgggaagtctgctttgtaccatcggtcagtttcttctgtgtacgtttaaaatatgaaacataaggtttgatattattgtggatttagtcagttgtgttgttgtttagattgatccggaggagggaggctcatgtttacaacactcctgatgatcatgtgacaagggatataatagaagggattgcaaagttaggtgatttaaggttcaatgtgttggactctgctggtatagagactgaggtttcttcgggtactattcttggtagaactacagcaatgacggctaatgtgcttgcaaggactcagtttgcggttcttattatcgacgtgaggtgagattttaatcccgagttgcagcaaactaatatgatgcgagtgttcttttttccttatagattgttgtcttgttcatgtttttgatagggctgggttgcatccactagatttagaggttgggaaatggttgaggaagcatgctccacagattaagcccattgtggttatgaataaatctgaatcaatcggctctcttgatgaagttgcttcagaggcccttgcactaggttttggcgagcctatagctatttcagccgagactggacttggtatgaccacactttatgaagttctgcgccctctactagaggattacacggtcgaaatgttaaacggtaatatacccgtatcaagataatcatacctcccttaaatttcttcttcactgaacctcgcagtcttataatagatataggcagtcaagatgatgttctgaccgatgagaatctctctgatgaaatcgacgagtccaagttgccattgcagttagctatcgtaggtaagcctaatgttgggaagtcaaccttgctcaatgcattgttggaagaagagcgtgtattagtgggtccagaagctggcctcacaagagatgctgtgagagttcagtttgagtttcagggcaggaccgtttacctggtaagattagaattcttatttttcttatactctgactccaactattattctcttgatgttagacagagaagtggaaccagcgttcattattattcactttgtttgatgtttagaccggatatctgttaaggttgatactgctgggtggttggagagaacagagcgagacaaaggaccagcatctttgagtatcatgcaatcaagaaagagtcttatgcgggcacatgttatcgcgttagttctcgatgctgaagag

SEQ ID NO: 146679 - DNA, 2143 bp, Arabidopsis thaliana landsberg
aaggaatcttcgtcgtagcttcgtcccgcttcgcaccaccgccaacactgttcggatccggaactggagccattgtaagtcagactatcacttgaatatatcaacgaatccaaacaatgagtatcgaaattcgtaaaactcggaagaatcgagcagcttctatcttatgagctctcgcgtaaaccctaagtctctctggaatggctcgttagagaagaactatgcttttcttcaggaactgtagcaaaaaggttcaactgtaaaaaataaatactatcagataaaaaaaagtacttatacggaagaagattacccctcgatcaagaattccattgtgggctcagcccataataaattgggctattcattgggccatagtattctactatggtctctatataaaacaccttgtctttggcaaacatctctatatataatcaacactttaaaatttattttatttgggcgatatagccaatcacaaaataaaggactccaaaaacatctattttatcggatttacatttgatcaatttaaattcgaagcaactaattcgatcggatttaaattcgaacaacataataatagcaacatttatataaatacgttacatgtcttagtcgacatgcttttatatggtaaagttagcaatattagtcgaactcaaacattataccttcacagaatgaaagaggaaataacatttaattgtttttttaaaaattaattatataaatgagagaatctgaattacttgagcgataataaaagaagaaaaggaaaacaaatggagaagggaagaggcaagatggcaaagctgtgattaaaaacaccgtcacctccccgtcaacggagacaaacaaagatcgtgttttctcgaaccttccacgagatatactaagccaaagaagaagaagagaccagagacgaacaagaaatccagaaattaccaattcctttttttgtttaatcggattcaggaaaagtgaagaaacgaaagagagatgaagaaggtgagatgggagttgattattacaaggttttacaggttgatagaagcgctaacgacgatgaccttaagaaagcttatagaaaactcgctatgaaatggcatcctgataagaaccctaacaacaaaaaagacgctgaggctaagttcaagcagatctctgaggcctacgatgtatgtgtttgattcctccactgcttttgctttattgaaatcgtccctaaagttttgatttttatttctattgagaaattttcattcccttgatactgtcggtggtcacgaacttgtttctgatttttgatatgagatgcaattagtctgatttcacgatttgatgttgtgttggttcgtggggtttctagatttcgtgttcctgagtaattcgaatcatagtatatagtaaaagatgattgctttatatttgggcaagctaggttatctccaaagctcttaatttgtgctttctttgctgatcttctgagtcatgatttatccgttgtcttaactctgtgattgattattgagaacctcttaggcactctgtacttgtcaatgtgtagcttaggattatgaggaacatactaagattgtttgatttgactcaggcttttatggggctaatgttggtttttgttgtgagatgattaggttcttagcgatcctcaaaagagagctgtatatgatcaatacggtgaggaagggttaaaagggaatgtgccacctcccaatgctgctactagtggagcatcctacttctcaacaggagatggatcttcgtctttcagattcaacccgagaagtgcagatgatatattcgctgagtttttcgggttctcgaccccgtttggtggcggtggtggtggcactggagggcagagattcgctagccgcatgtttggtgatgatatgtatgcctcgtttggtgaaggagcaggtggaggaggagctatgcatcatcatcaccatcatcatcatcacgctgcagctaggaaagtggctcctatcgagaacaagttgccttgtagccttgaagatctctacaaaggaaccaccaagaagatgaagatttccagggagattgtagatgtcagcgggtaagtgattgaactcagataccatttcgatcacac

SEQ ID NO: 146680 - DNA, 2016 bp, Arabidopsis thaliana landsberg
  unsure (1)..(2016): unsure at all n locations
ccaagtggtttcgaagcagcacagattcttgatctttcttcaaatcttctcaacggctctcttcccaaggatttgggaggaaaaagcctgcattacttgaacttatcacacaacaaagtcctcggcgagatttctccaaattttgcagagaagtttccagcaaatgccacagtcgatctctcctttaacaacctcacaggcccaatcccaagttccctttctttacttaaccaaaaggctgagtctttttccggtaaccaagagctnnnnnnnnnnnnnnnnnnnatcctttgttcaattccttccactctttcaaaccctccaaatatctctgaaactacttcaccagcaatagcagttaaaccaagaagtacagctccaataaaccctttgacagaaaaaccaaatcagacaggaaaaagcaagctaaagccaagcaccattgccgcaatcacagttgcagatatagttggtctagctttcattggtctactcgtgctctacgtataccaagtcaggaaacgcagaaggtacccagaatctagcaaatttagcttcttcaagttctgtctggagaaaaacgaagccaagaaatcgaaaccaagcaccactgaggtcacagtcccagaatcaccagaggccaaaacgacatgcggttcatgcattatcttgaccggaggaaggtacgacgagacatcgacatcagagagcgacgtagagaatcaacaaaccgttcaggcattcactcgaacagatggtgggcaactgaagcagagctcccaaactcaattggttacagtcgacggcgagactcggctagatctagacactctgctaaaggcatctgcttacatattgggaaccaccggaaccgggatcgtgtataaggcggtgctggagaacggcacggcattcgcggtgaggcggatcgagacggagagctgtgcggctgcgaaacccaaggaattcgagagggaggttcgtgccatcgctaagcttcgtcacccaaatctcgtcagaattcgtgggttctgctggggagacgacgagaaacttctcatttccgattatgttcccaatggcagcctcctctgtttcttcaccgccagtaagttcctctgtttctgtaagcgcacgaaaaaaaaaacacagtatcatatctaaaatacgcaagtcatttggtacacattagcactctaaaatacgcatcactgtttttttgtccttcacaaacagctaaggcaagctcaagctcatcttcttcgtcgtcattacaaaaccctcttacttttgaagcacggctcaagatagcaagaggaatggctagaggactatcttacatcaatgagaagccacaagtgcacggtaacatcaagcccaataacattctcttgaacgctgagaatgagcccatcatcaccgatttagggctagaccgcctcatgacaccagcgcgtgaatctcacaccactggaccaacttcgagctcaccgtaccagccaccggaatggtccacaagcctgaaaccaaaccctaaatgggacgtttactcctttggcgtcatacttttagaacttctcacaagcaaagtgttctcggtagatcatgatatagatcagttctcaaacttatccgactctgcagcggaagagaatggccggttcttgaggttaatcgacggtgcaattaggagtgatgtcgctcgccatgaggatgctgcaatggcgtgctttaggttagggattgaatgtgtctcttccttgcctcagaagcgaccatccatgaaagaattggtgcaagtgttggagaaaatttgtgttttagtttgatttcttaattcgtatagcctaagtcgttttggcaatatagaaagttatgtgttatgtatgttttagatgtgttgcttaatgcttactttaccctcgcataatactaactcttactttagagtttagaatgtgttcactgttttgttatgttatatcacaaccaaaaagctatataaaaattagaatc

SEQ ID NO: 146681 - DNA, 1145 bp, Arabidopsis thaliana landsberg
  unsure (1)..(1145): unsure at all n locations
tagtattcgcatagtatcagaagatggattttttcaatcaagctaaagccgtaaggatgcgtaacgtccatgataagtatctaacagcggatgaggacgaggaaacggtgactcaagacaggaatggttccgacaagagagctagatggattgtcgagccggttcgtggttcctttgaagtgatccgtttaaggagctgctacggtaactatctcaccgcttcgaatgagcggttcttgctcggagccactggacgtaaagtggtcttgtctaaaccggctcgactcgactcctccgtagagtgggaaccggtgagagaaggttccaaaatgaagctcaagactagatacggaaacttgcttcgagccaacggtggacttcctccatggcgtaactctgtcacgcatgacacttctcatgtattggattctttcttgtgggatgttgatgtggttgagattttggtgggaacgacgactccggctcnnnnnnnnnnnnnnnnnnnnnnnnnnnnnnnnnnnnnnnnnncgtcgtacacgtattctccggtttctagaacatcttcagaaaaatccgaagaagaggtattaattaattcgactaggaaaattatccgttacactgtttcactttctttttttaacatttatctgcggaaataaaaactgaaaataatatccaaaattctaaatatctgaaaaaactagtgaagggatggtattaaatgattgttctttagatatttatagaatatccaaagattttagtaagctgtattacgaaaaattctatcagattttgtcaagattatcgtcttaacattttttggttttggtttgactagttgaccgtgccgccaccgaaatctgaagggaggcctatttactaccacatcgcggacgaagaaggacacgtggaggaagaatcagccgttggatatgcgttgactttcaaaggaaatagcgtggaacagttgacgcaggcgttgcaagaagagactagtatggatgatgttgtggtctgtacacgccatccttcaaacggcaagctgtttcctcttcgtttgcaacttccacctaatagtggaacaatgcatgtcattctagtaccctcaagtacttaacggcaagctgtgtggttcccct

SEQ ID NO: 146682 - DNA, 1666 bp, Arabidopsis thaliana landsberg
ttcagaagaatcgctcaaaatcaaaagccaatggtttcactattacacaaaaaacaaaatgtagagattaaaatgatactttcactgtttcacagagctaatcattcacgtagatgaatacaataaaaacgtaaatataatatatatacacattggtttaaccttacacaggagattcgaagaagtaacccaaaggaggaagaggaaagaagatgtgaatgaagtaggcgaagaagcagaaagtgattagattagttggatgattaggctttgtttttctttataattacttttataaattaattatccatgcagtggaccaatgaaaacgatttttttaaaaagctttctacaaaaataataaaatggtgagagccgtcaataatactaaccacgtatacgaaccatttgggtccgctcgtacgaaccaagccaaaaccataactctaaagaaaccaaaattgtgttttacattttgaaccatccaatattattatccttatctttatccattttattttctttttcagtttaagtatatcagactctgaggtttgcagtagataaccaaatgaattatcttctaaatcaaaatcgatttaaaccgaatactatagaatttaaaccgtataaaattaaaccgaaccggaataaattaccggctcaaccgcgagattatagtgtcattctcgtccagtttcagacgaatcgatggagttgggatccagacgaatctacacgacgatgccgtcgaagctccgatcttcttcttcacttcttccacgtattctgctcctttctctcttattactccttttctattccttaattctccgccgtccgattacttcaaacattgcctctcctccgccgtggcgatctcttctccggcagatgggttttcaatccagaaactccgaaaccgttgtacgacgagacttgtcctttccacagaaacgcttggaattgcttacggaacaagcgagataatatggatgttatcaattcatggagatgggagcccaatgtatgtggattgagtcgaattgacccgacccggtttctagggatgatgaggaacaagaatgttgggtttgttggggattctctgaatgagaatttcttggtttcgttcttgtgtatacttagagtggctgatccaagtgctattaagtggaagaagaaaaaagcttggcgtggagcttacttccctaagttcaatgtcactgttgcttatcacagagctgttcttctcgctaaatatcagtaagattgcttacttccatagtttaaaatcttgtaattagctctgcaaggatcaaacttttgatgaatcttagtattttgggttataggctttgtaggtggttttagaatcgtataaggaacatcgactcctttctccagtttatgttaagagttgaaactgaaagaataatgtttttgtgtatatgttgagttttatccagccttgttttttctaaactgacatgttaaaaggtgccaggatagatcttctgctgaagctaatcaagacggagtgtaagggactaatcgagttgatgttcatgatcctgcaaatgagtggatcaccgtcaaaagcttatatgatgttctcagatttaactgtggccattggtcatggttatatccatgaattttcttc

SEQ ID NO: 146683 - DNA, 1664 bp, Arabidopsis thaliana landsberg
  unsure (1)..(1664): unsure at all n locations
atgagattccttcacagatttctgttggaggatannnnnnnnnnnnnnnnnnnnnnntctctctgtaaaaataattgcatccaagagttgaaaactctaggatactgttcatcctattgccttgacgagtgtccttccatctgcgagatcgtcgtaatttcaggtctttcaccacctgcagagatccaccacgacgacaacttaaagaggatcttgatcatctctgcttcatctatcatcacaactctgtttctccttactttacttgttctctgcttcaagttttactataggaggagaagatcaataacagcatcaagaagatggagtatggaagaagctaggaattgggattttgatggaccagcacctgttattgttgatcatccgatttggcatatcagaaccatagggttgaatccaacggttataagttccatcaaagtttgtcagtatagtaaaaaagatggtgttgtggaaggaactgattgctccgtttgtttaagcgaattcgaagaagaagagacgcttagattgttaccaaagtgtaaacatgcttttcatctttattgtattgatacttggcttagatcacacaccaattgtccgctttgtcgtgctcctatcgttgaggccaacacaatgattgatgatcatagtgaggggctagaggagataagtgtgatgattccagaagaaaatggagatgataccgatgaagaaatcgaggaagaaagagatggctttgttagtaatattagtagagatcatggtgagtcacaacaacagcgagtgagacgatcagtgtcgttggattcgttatcgggtttaagggtaagtgaagttgttgtgggtagagaaaaggagaagttcaagagaggcaataatattggatctgggaggtcaagtttattgaagagatctatctcttacagtggaaagtagtactagctagcttcagtgctaataataaaaacaagaagtccataaagtaagtaagtttcttgaagaagaaaatcaaatcaaacccaacaagatatagattgtattcatatgtatgaaggtgatataagattacgattatcaaagctagtcactcttgtaaagttaaaagagagttttgacaacttctactactctgcttagatactctggatttgtggattaagtataaatatacaccaaacttcgttttgtatgttacttatttattgttcctcaagaaataccatctggattttaattatttttagattcaactgtcttatgtgaatggatttacatttggcgttgtggatctctaacactaactatatgaaacgctgcgtttcattaaaagaaggtaaaaacgacaaagagaatcttcgtcttcatcgatcattgttgtgtaaaactcttgttcctcttcctcttcaacgtgaacacttctatttctcagagaacattcacctatatgtctttcttcaaggagaagtcttcctctttccagatttaggttagattcatgttataactttttctaagatttctgatttccgaatttgaattttgtttatgatttagtgtcggtgtagaactgaatgatactaatgcaaatgattgagatcgatttgatgtaaaattatcaccttttcgtgtaatttaaaggtcgaatcgtccggggt

SEQ ID NO: 146684 - DNA, 2617 bp, Arabidopsis thaliana landsberg
tctttgttgggatttgtagactggtgaaagcagtgagttcttacctttggtatatgatccggagaccatttctgcctattgggggaaacggcctcgtgctgttgcttctcgagttatccagttgctttcggttgctggagggtttctatcgcgtattgcaggggatgtaataaacaagaaagttaaagaggtaatattttgtttactgctcttctagctaagagtagaaaagatagttgtgacttgaagattggtgatatatgtaaactcctttagctaggattgagtggataaacagtagacaattttcatttcctatctttcagtttcttccttgttccaagcatggagcccatgatgtgaatttttttgcagagcctatgatcaacataactttgtttaatccccagtgcatttgagcaatagatgttggtttaaatctttgaaaacgatgtagtacacagttgtagtattttattcaatttaggtgtgtatatctttgttcacgtttcaattctcttttgcttgcaattattttatatgcagtttgagtctcattttccgtctgtcatcattttcagaatgaggttgctagggcaattgaattgagggaaattgtaacttccttgggtccagcatacattaaacttgggcaagctttgagtattcgaccagatatattgtcacccgctgcaatgacagagctacaaaagttgtgtgataaggtatgatgctgcaattatatctttcccttcattcattcccaaataattttgattgctaaacttgtctgtttttttgtttatgtgaaggtcccttcatatcctgatgatgtagcaatggctctaattgaggaggagcttgggaagccatggtacgacgtttattccgagctctctccttccccaatcgctgctggtaaatctcagaccatcaatgaacatgcacaccttatcatttcaatagagttttatgtcaaatgattcattgttattctggtttttcagcatccctgggacaagtttataagggaagactaaaggaaaatggggatctagtggcagtaaaagtacagaggcctttcgttctcgagactgtgactgttgacttgtttgtgatacggaatttaggtctatttctgcggaagttccctcaggcaaggttttgtctgacggctcagcttatgcagttctgtaattgttctctttcacctcaatgactttcgatcttcttgttttcatgggaatttgtgcaggtgtcagtagatgttgttggactggttgatgaatgggctgctcgcttttttgaggagctggattatgttaacgagggagaaaatggaacatattttgcagaaatgatgaagaaagatcttccacaagtaggcttcataacttttctaatggaccctttagttcgttgtctatatatgaggcgtctgatcataaaattgtatttgacaagtacctatgtggatttatatccgtggaatggttcgtaatcatgcaattattgtttcaggttgttgtacctaaaacctaccaaaagtacacgtcaaggaaggttcttacaacctcatggattgatggtgagaaactgtcacaaagtattgagagtgatgtcggcgaacttgtgaatgttggtgttatttgttacctaaagcaggtaactcttcctacatgcttgttacggagcataattaatgtggtcctagcttacttgcgttcattaaatcgtccgctttgttcagctttttctgcaatcatgctaaatgacatagatctaggcatgctatgctaagtttttctgagatagttaattctttaccaattgaagtgatggtacatataattctttggttgttcctattatcctatatagcatggctagtcaatgttcctaaccaaatattctcagtcatatagtgagtataatgtgattttgaggcaggggacctgtaccattgtagtttgcctcaggtttactcacttccttgattgatttaatgtgttgaccagcagtagtctgtattgactttctctgtcctcttttctagttattctgctcgcacactttctcttgttttagaaacaagatgatgtgcagacattaacactgttactgttttgtgcttcagttgctcgatactgggtttttccatgctgaccctcatcctggaaatatgatccgtaccccagacgggaaactagccatcctcgattttggtaatgattgtagttccagttattagtgaaaaattagattcgggtagcacagttgcattcgatgtgatatgagaaaaaactttgttgacatcttatccatgtctgttcgatgacaggtcttgttaccaagttgactgatgatcagaagtacggaatgattgaagccattgcacatttaattcaccgagattatgatgccatagtaaaagattttgttaaactcggtttcatccctgatggggtcaatctggctcctatattacctgtcctggccaaggtttttgatcaggcgctcgaaggtggtggagcaaaaaacatcaattttcaagagttggcagcagatttggcacagattacttttgactatcctttcagaatccccttattcgcct

SEQ ID NO: 146685 - DNA, 1472 bp, Arabidopsis thaliana landsberg
  unsure (1)..(1472): unsure at all n locations
attttctttcaaaaagaatcatcaatcataataattttgcaaacagcaccggtcaagtaactattaaaaaaggtgtagtggcaccacgtgtgttttactaatgaaccaatcaaccatttagttccaccaacttcgtatagttctcgacttctaatttactaattttgttttaacanaaaaaaatattattgtttcttaccaagaaatttttgttcactaatcattatttttccgtaaccagagatataaacagattaaaaattagtctttccaccaatcgtattactggcgctagattttttttcttacaattttcgaccacaactttatcttacgcaaaaaaaaacaaaaaaaaaatactaattctgtggaggagaaaaacagtgaagactgaagacaagaagcatcatgatttgaaaagactcatacaaaactcgatcataaaaacagtgaagacaagtatgaagtatggtatgaataacaaaaagactaaaatgattttgtttgaaactgttgtaggtgagaaatttggacatgggacttgaccgtttggtagttggtgaagcctactctcgtgagctgtgtcccctcaaggcattgattttgcttctcttataaatatggaccccaaaacttattttggaagtaacaaagacccataccattcttattattaaggtatggcgacacttgaaattaccgatatagccctggttcaaccttctcaccaaccactctccaacgaccaaactctctctctttcccatctcgacaatgataacaacctccacgtcagcttccgttacctccgcgtttactcctcctcctcttcnccagtcgccggagaaagcccctctgccgtggtatccgcctctcttgccaccgctctcgttcactactaccctcttgctggctctctccgtcgctctgcctccgataaccgatttgaactactctgctccgctggtcaaagcgtgcctttagtcaacgctacagtcccctgtacgcttgagtcagtcgggtatttggatggacccgatccaggtttcgtcgagagattggtaccggatccgacccgggaggaaggaatggtcaatccttgtatcctccaggtcactatgtttcagtgtggtggttgggttctaggtgcatcgattcatcatgcgatctgtgatgggttaggtgcgagtctgttcttcaacgctatggcggaattagctcgcggagcgacaaaaatttcgatcgaaccggtttgggacagagaacgtttacttggtccaagggagaagccttgggttggagctccagttcgtgactttttgagcctggaataaggactttgatccatatggaccagcccttggagacgtcaaaagagactgcttctttgtgacccacgattctttggatcaaatgaaggctcaattactctaagaaatcggttctgaatttcaccactttcgaagctcttg

SEQ ID NO: 146686 - DNA, 1570 bp, Arabidopsis thaliana landsberg
  unsure (1)..(1570): unsure at all n locations
agagcgaactagaagtatgtttgcgtggatctaattgttttgttagcatgtttggatctagtattgtctttaatcaaatgtattctctttgctgatagaaactctttttttttttgttgtataaaggatgatgctgttgtctaccttgtggatgctcatgacaaagaaagatttgcagagtcaaaaagagagcttgatgctcttctctcggatgaagcccttgcaactgtcccgtttctgattcttgggaacaagattgatatcccttatgcagcttctgaagacgaactgaggtatcacttgggtctcactaacttcaccaccggtaagggcaaagtgacgctcggagactctggtgttcgcccacttgaggtcttcatgtgcagcattgaccgtaaaatgggttatggcgagggattcaaatggctctctcagtacatcaactgaagacagacgtcaagtcttttatcatattttcaaaccaaacccaagaagattttccgtacaatttgtctatttcgagctaaaagatttgtgattgacgatgtcacatccttcccttagaagacttgagaacacttttttctcatatttgttctttttgttgttttctgtgtggaacataagtttggtggcttgcatttccaaacttattcatttctcttgtccacatttttgtcaactgcttatgtttcattgaacattattcccaagttagaccaccaacttttttgaacatattctcactttatattaacgtgtgccctacataaacccaaattcaaatcgattcaacaatcaatctctctctgcttatttctctccctaagccatgaatgttccaaaggtgtcaagactttggctactctatgcagtgttgctctttgatagtcagagacattcaggtgcactttggttttccaagtcttagattctctttgttcaaacactcattaagtttatttggtttgagattgttgatgcagtannnnnnnnnnnnnnnnnnnnnnnnnggggcgcggggattttggttcagagagccgcgttctgttttaacaataatctggttagtatgatcgatgtcgaaaccccttaagtaaaaggaaaacactttttgacaatagtttcttttcttgattttttgcagctctacagaggatgtaatgaggcgttcagactaaaccaacaaggtgaattcaaggttccacctgaggaaacagacagattctgcaacggtccttgttctgcagaaacagaacttgtgcttacatgcattaatagtgtcatgtctgatttcgtgttttacaatcgtgctaccccgagagatgtaaggaacgccctccgtggtggctgcagctcctctttcacacgaggtttgtaaccatgaaataccccctaacttttcatctttacacataaccatgaaacataaacttgacttgagtttgaatatacaggaaacttcaatgtgggagactatgctcaaggactctatttcggcaaggcagggaaaaagctgcctggactgttcattgtactagttctcgggtttgtaccactgatcctgtga

SEQ ID NO: 146687 - DNA, 659 bp, Arabidopsis thaliana landsberg
ccattgaagccaattctgatctaagccactcttcttatgttcagctcgtatgtctcttttttttgatttttgctgaatttttcttcatcgggagatgttgttgatgtttttgcgtgtgtatgttttcaggcaacgattggtttaaatggacggccttcgaatcgtaccgtcgtattcaggtgacacaaatgcctaatttctctgttccagttgtcaaattttgatttgtttggtgtcggttgataggggatttgaagagaacagtgacaggattcaaatcaacaccgatcttcgcagtcgtaaggtcttagttatcttttcagattatgttgtagctacttgcagatttgagctctctttgattgatcctgtaaaaatccttgttgcagattgaagagcttaagcattgtcctttttctgaggtaagaaattatttggattatacattatggatcgaagaatcatgcgttgattgattctactgcggtggtggttgttttttccccaagatgtgtcggtattcctcggatacttgggaccaattccggatcaatggaagaattgaggtcattgatgcgtacaatcctgaccagaccaagcttcaggttttatgtacattattacaatttaatattactattttggaaaggaagaaacac

SEQ ID NO: 146688 - DNA, 512 bp, Arabidopsis thaliana landsberg; identical to SEQ ID NO: 10666

SEQ ID NO: 146689 - DNA, 1401 bp, Arabidopsis thaliana landsberg
gcaagctttatatctactatgctgaggattcaaggaatgtcggtgttgtgttcaataatatctatgagctaagcggccttatttctggagatcaatacttctctgctgattcacttactgatagccaaaaggtttgctccatgttgcttaacttataacaacattctttgctttgctgcaagttatagtttagtttaagttaagattcactatcttctattaaaagtttattagctatgattcaccatcttcttttgaatccacttaaagaagagagttatcaaatttgattctttctttcacttctgtgttctaaaggtatatgttgaggggctggtgaagaaagcatatgaaaactggaacctagtcatagagtatgatggaaaatctcttttagacttgaagcagccccagaggttgagtattactcacactaatctggaaaattactcgactgctgccattgaccatccaatgcagatggtggcagggcattcgtcttcaatgccgcctaaccagtctccagtgctttcagattttgctattggaggtttgcatattgaaatcaatctcttgataatttgtgttatagtttaatactaaatcttatatatttgttcgattcaatcaatctacagggtatgatcaaactctggcaacaagatatcattcgcatccccagcttttaaactccaacccgcgagcacaatttgaggttgcttcatgcagtacatcgcaagaccagttcatgggaaatctacatcaaactcaaagcaccataaacaatcaacacatgaatggcctggctctcggtcctccacaatcatctacaagcggataccaaaacatcaacccttcttctgttcaccaggcagatctcaaccatttagaagactggtcaaacccccgtgagagaggaccagatgatttcttctcagaggaagagatccgactcagaagccatgaaatgctagagagtgaagacatgcaacagttcctccgcctattcagcatgggaggaggaggcaatggctctgcaacacacttgccagaagatggatatactttcccatcgtttctacacacgcctatgcaaggttatgatgaagaccgtggtcgatcaggcagagctgttgttggatggcttaagataaaagccgcaatgagatgggggttcttcatcaggaggaaagctgctgagaggcgagcacaaattgtagagcttgatgatgatgatgaagatggcgaatagtgtataaaaggaagtgtacagttagattcagtggatctgtggatgtgtgttttatgaagcaggagacttctaatatgcttgattgatgataactcatttagacagtagcattcttaagaactgattctacagtcttagatatgtgattc

SEQ ID NO: 146690 - DNA, 964 bp, Arabidopsis thaliana landsberg; identical to SEQ ID NO: 25097

SEQ ID NO: 146691 - DNA, 532 bp, Arabidopsis thaliana landsberg
ttccaatcaggggtcgcatcttgtctggaacttgtccaagtgcaaagatgcagaggacgatcattgttcgtagggactatcttcattttgtgaagaagtatcgaaggtaaaaggatcggttttgttattgtgttcaaattctctcagcttatttgaaaccctccagctaaatgcttaatcctaccagatatgagaaaagacactcaaacattcctgctcatgtttccccgtgcttccgtgtcaaagaaggagatcgtgttaccattgggcaatgcaggttaggagcactaatatctatatacttggtttttcgttcaaaggaattcatgctattgtataatactgcctgaactttgataccatctttatttatcacgcaagtttctaaacttatcaagttaacgattcaggccattgtcaaagacggtgaggttcaatgtcctgaaggtcattccggctggaagctcttctatcgggaaaaaaaaaatcaatggaatgtaaaagagattcagatttgttgaaaaggtgcgaa

SEQ ID NO: 146692 - DNA, 1590 bp, Arabidopsis thaliana landsberg
cttttgtgtagaaaatatttcctgaggcagcagcagcgctggctggtggaggtcacaatctcggctgtgatcttccttcagatgattctgatgatggagagcatgatccagcttgtttgagtgatgatgaaaatgatgtagatggcagtgatgacaatgaagcatctgagagcgaagctggtagttctgatgagtctgaattcacatctgcatctgtcgaaatgattgagtcatttagagaagggaacgatatcatgcaagctgtaatggcccttccatctgatgattctgaggatgatgactatgatcctgatggcccaacttgtgatgatgataaagaaagttcaaattctgattgtacatcagacactgaagatcttgaaacttccttcaaaggagatgagactaatcagcaagctgaagatacaccacttgaggatcctggcagacagacgtctcagctccaaggtgatgcaattttagagtcagatgttgggcttgatgatggtcctgccggtgtatccagaaggaggaatgttgaaaggctggattacaaaaagttgtatgatgtgagtgatctctctttttcttgataatcgatttctatctggctttggaaaaacctctgaatggtatttttcttctatgtgcaggaggaatatgacaatgttccgacttcgtcaagtgatgatgacgattgggataaaactgcaagaatgggaaaagaagattccgagtcggaagatgaaggggacactgtacctctgaaacagtcttcaaatgcagaagatcatacttctaagaaacttatacggaagtcgaaaagggcagataaaaaggataccttggaaatgccacaagaaggtcctggagaaaatggtggttctggtgaaattgaaaaaagcagctcttcagcatgtaaacagacagatcccaaaactcaggtaaaaagatatagctgtcttgaggcttaaaggtgccaatcttacattattatgagggagggagcaatggattgaaaggatccctcttttatgcagagactgtacatatcttttcaagagaatcaatatccagacaaagccacgaaggagagcttagccaaagagctacaaatgacagttaagcaagtaagaagtttctcctagtaaattgtttgtttagttctcccttttagtcgacctagtttcatctctgctaagaactgattatgttctgtaggttaataactggtttaagcataggcgttggtcgataaacagcaaacgtttagtttcagaggaaaatgtcgagaagttaaaaacaggcaaggaaggtgaatgtgagacatctgttgctggaagtagcaaacaaactatggaaaccgagtcagttgcagagaaaccaaccaatactggatcacggaaaagaagaagaaagtagactttagattcaatcatgaaggttttagatctaatgcaaggacaatactggaacacatacttacccaaacccccgagatatgaagacaccaaaccctgcaaagcgatcgggtttgttcagttctttgtttcacatttttggggtactttgaagacattgaaatttgag

SEQ ID NO: 146693 - DNA, 1562 bp, Arabidopsis thaliana landsberg
aaagaaacataaaacaatattcacaaaatggccgatggttttggtgaaccgggaagctcaatgcatggagtcaccggcagagaacaaagctatgcattctctgtcgagtctccggcagttccttccgactcatcagcaaaattttctctccccgtggacaccgaacacaaagccaaagtcttcaaactcttatcctttgaagctccacatatgagaactttccatcttgcttggatctcattcttcacttgcttcatttccactttcgctgctgctcctcttgtccccatcattagagataaccttaatctcacaagacaagatgtcggaaatgctggtgttgcttctgtctctggcagtatcttctctaggcttgttatgggagcagtttgtgatctccttgggccacgttatggctgtgctttcctcgtcatgctctctgctccaaccgtcttctccatgtctttcgttggtggtgccggagggtaagcattcttgtgaattgtaaaatttctcaaaaaacttaagattaacttcacttagtcctatataaatatatgtactaatgtacatatgatatgcagttattgaaacaattttaaaagcatttttctaaaaaaccaaaggatttcatctcaaaattaattgacaataaggaaagtagtttatataatggattattcttaatgtgggtttctaacaatattttggccatatataggtacataacggtgaggttcatgatcgggttctgcctggcgactttcgtgtcatgccagtattggatgagcacaatgttcaatggtcagatcataggtctagtgaacgggacagcggcagggtgggggaacatgggcggtggggtcactcagttgctcatgccaatggtctatgagatcatccgacggttagggtccacgtccttcaccgcatggaggatggctttcttcgtccccgggtggatgcacatcatcatggggatcttggtcttgactctagggcaagacctccctgatggtaatagaagcacactcgagaagaaaggtgcagttactaaagacaagttctcaaaggtacttcatcagtacttaagtaaaataaatgttaattcttcttggatcctttgattcttagtcttatatattagggtctgcagatcgttgtttaaattatattattttcattgaatatataaagaaggttgttctgatatagatcttagattaacatttagatagagacattaaattaatccaagaaagcgattcgactaactaaaaaaaaaaaaaaaaaatcaattacgttttcatatagaaaaagcgaaatccttataatactcttccatagattttttgttttctctgtttttttttttgttatagatctttttatttggttaagagtaagactcacagttttctggtggacaaattaaccaggttttatggtacgcgatcacgaactataggacatgggttttcgtgctgctatatggatactccatgggagtagagctcacaaccgataacgtcatcgctgagtactttttcgacaggtataat

SEQ ID NO: 146694 - DNA, 2480 bp, Arabidopsis thaliana landsberg
cactggctctctctctctctcgcgacgcagatttcgattcgtcgaatattttagctaatcctctctcttaatctctttgaacatttttccccaaattcgccgtagtgaatactttctcttcccgtaaatctccaaaaatcgagttttttttattacttctcaattgaatttgcttcttccgattgatctcttaattgattcgcttgtgggttggatttgaatcctctcttactttccaaaggtcataccttttcacagatctatctttgaaattgtgaagaagaagaagaagacgatgattcgactaagaacatacgcaggccttagttttatggcaactttggctgtaatttatcatgcattcagcagcagaggcacaatcttaccctgcgactgtttatctatcaacctcaaagatcagtttggtgctgcttaatcaatatgtgtttggtacttatgctcagtctctggcatatggtcaaatttgtcttgttggggtctcttacggaagcataagtcgagaggctaaatgaactagcttggagagaacttatggagattctctatgccattactatctttagacaagacttttctagtgggtttcttcctttggttgttactcttctgttgatcaaggctttacattggcttgctcagaaaagagttgaatacattgagactactccttctgtctctaagctttctcattttcgtattgtctcttttatgggtttccttcttcttgtggatagtttatttatgtacagttctatacgccacttgattcagtcgcgtcaggcttcggtttctctcttcttctcattcgagtaagttgattttcatctctcattcttagcaggattgaagacagtcatactggtgatattatgtagctgatgataggtttctgttgtaggtatatgatactggcgacaacgactgttgctatttttgtgaagtatgttttctatgtcactgatatgttaatggatggtcaatgggagaagaagccagtttatactttctatcttgagcttatccgtgacctgcttcacttgtccatgtatatctgcttcttctttgtcatattcatgtaagttttttcatccatttttttttgttctcaaattagattatttcaggaatatataatgcagaatgaaacatctgggaaagcaaagatgcttagactttgtagaacaagttcttgtttctttgttagactcattaatattcttatttgctgtttaggaactatggcgtgcctttgcatttgttacgggagctctacgaaaccttcagaaacttccagattcgtgtttccgattaccttcgttatcgtaagatcacgtccaatatgaacgacaggtttcctgatgcaactcctgaagaacttactgcgtaagtttcagatatcccatttatttttttatgactccactgaaaagtagacatattatgagtttggtcttatggatcttggatagttcttggggaatcttgtgttattgaatgcattttctttcttttatgcagaagtgatgccacatgtatcatatgccgtgaagagatgacaaatgcgaagaaactaatatgcgggcatctctttcatgtgcattgtctacgatcatggttggagagacagcagacatgtcctacttgcagagcacttgttgtacctcctgagaatgccacctctgcagctccaggccaacgtgaattacaccaaggttcccaacagggtaaatcatgttgcctcacatgcaaatttgcaataaaattgaaatctgttatttatgcattatgtgttgaaataattttttgctttttagactcttaatattggaacaggaaagactaattattagttttgtgcaaattgaatcaggtacatcaagctcaggtaaccagggctctgaaataagttcttcagctggcgtttccaataatagtttgagcaggcaccacgccaggctttaagcagctgcttctgcagcctccgtgtatgggaaatcaatggtttacccatctgcaaacacagtagcatggtatgtatttatctgttgactccatgcttggtctcgagttgtagaacagagcaagcgtcaactgacaaatatgtttgtcccttatgttaaggtcatcgggagttcctggaacagagcaagtgtcaactgaaccacatcaaactcgtccttcatccatttcccaatctccgcttcctcatcacagccttcctgttgaaaactctcaagcctatgcaaatatgtcggagactaagctagaagaaatgagaaaatctctggaaacccacctcgaggtatggtacctgactaatgtaatatcttatatgaaactccagaacaggttgttatatcttgtcactgtaaacgttgtggtgtagattttgcgaaaccgacttcactttctggagaagaggaaaccagaatccgcaggggaaccagagaacaaaggaa

SEQ ID NO: 146695 - DNA, 611 bp, Arabidopsis thaliana landsberg
tatgttgttgtagttgtgtgtttggggctgaattgaatatttttttgcagaagaaagcacatcaaagattttaggatcaaagatttgcatagcgattcggtcttttgttaacccggaaaagcaagcttggtgtcttcctcctcacactcgtaaagtcgcaatgcccgatacacgaactctgtacacggtgctaagatcgcctcacgtcgataagaagtctagagaacagtttgagatgaggttcaagaaacggtttcttgtcatcaaagctcagagtcatgagttgagcaagaagctgtttttggttaaaacgttatcgtattcttggagctcaatatgaactccagttccattgcaagacccgtttggatatgactcaagtgttaggcaacatcaatggctccaccaccaatgcttactgagatggctaaagacatcattttgtagaagtttcaagacccaaccgggtactatgcaataatttcgaaccttacggatccatgaaaccagctttgcttcacatcagatcaagtagttattttcttgcttagtataaacatgtgtttttggacgattttgaaagatacaattgagtttcagttacagtgctt

SEQ ID NO: 146696 - DNA, 1193 bp, Arabidopsis thaliana landsberg
atgacattgttcttggtccttatggtgttacatgttccagagataagcgtgctgtgtttggaagtcgttctccggattcagatattccttatattaggagttatgacgatgagaaacgtcatgatagcttccttcagagcttgcatgagtgctgcatatgcttctctgaatctgcaggtatatcttgttcttcttcatagctgttttctttagtaatgtgggttggtttacagttgttttacaccctctacaggtatcgactttgttaagttaccatgccagcatttcttttgtttgaaatgtatgaagacctatacagacatacatgtcactgaaggcacagttaacaagctcaagtgtccggactcgaaatgtggagaaactgttccgccagggatattgaagagattgttgggcgatgaagcgtatgaacggtgggaaactcttatgttacagaaaacactggaatccatgactgacgttgcttactgtcctagatgtgaaaccccttgcatagagggcgaggaacagcttgctttatgcttcaaatgctacttcagtttctgtacactttgtaaggaaaagagacatgtgggtgtggcttgcatgagcccggaacttaggcttcaaatcttgcaggtatcattattgtgcctttgatcttctctttgttaaaccgttgactctttcttacatgtaaatctctatacaggagcgtcaagattcttctcgtcttggagaggaacaaaggcggaaagagaaagaaatgatcaatgagattatgagtgtgaaggtgataatgaaaagcgctaaacaatgtccgtcgtgcaaaatagccatctcaagaaccggaggttgtaacaaaatggtatgcaataactgtggtcaatacttttgttaccgttgcaacgaagctatcactggttatgaacatttcaggttagtgatgttacatatataaaagaacagatacatatgtatataaatcttggaactaagtaagctccgtcttttttttgggaaaaagtgagggaaaatgtgaactgttcccacaagaggcgatccaagaatggaatgagatgatgaatgagagacaagtcattggacagattcaagcgcaactgtttgcacaaggcggtcagtttccacagcgcggtcagttatgtcctaattgccgccagttcaatgcaaag

SEQ ID NO: 146697 - DNA, 295 bp, Arabidopsis thaliana landsberg
aaattagaaagacgatgatggagaaaattatggagtatctgcaattgagcgatgaggtggttgacgacggtgaggcaccgcgagttgaagaatttttaggtgaagggaaaagcttctacgagaattttagtctcagaggaatccgagtcaaccgagtcgaaccgggtttcatttcctgctctttcaaggttcctcttcgtttgacggtaagtctttctctcaatcctctaagccccttctattttgattaattgtcgaattagcgtgataggtttttggaaataagctaatttga

SEQ ID NO: 146698 - DNA, 3440 bp, Arabidopsis thaliana landsberg
gattgctccgctaggtaattttggctttagtattcataggtcaatatgttttcttcatttatttattgtcgcatgcatgatgacataatgcatagttaaaaattccaatgtttcgactaattaactatttcttattcgttgttaaaggtgaaggagaagcatggatacaagacaagaacagaaatctcacatccgaaaaaactacattatcatcatttactgcccaacgtgtcgcttacgtgacgctactacactcatcggaggtctacgtatgcggagcaatagccttagcacaaagcataaggcaatctggatcaaccaaggacatgatactcctccacgatgactctataaccaacatctctctcattggcctaagccttgctggctggaaactacggcgagtggagagaattcgtagtcctttttccaagaagcgttcttacaatgagtggaactacagtaagttacgtgtgtggcaagtgacagattacgacaaactagtgtttatagacgcagacttcatcatcgtcaagaatattgattaccttttctcctatcctcaactttctgccgctggcaataacaaagtcttgttcaactcaggagtcatggtaatgcatctaactaacaaatatctttaacaatagattgtttgatttgaatatgttgacttttttaagtttctaaagatattgccttatcaatccatttcttactattttattttatcgaattttccatatgttttatataagaaagtctggttttcttcaggttctggagccatcagcttgtttattcgaggatttgatgcttaaatcattcaagatcgggtcatacaacgggggagaccaaggatttctgaacgaatatttcgtgtggtggcataggttatcaaaacgtttaaatacgatgaaatactttggtgatgaaagcaggcatgataaagcgcgcaatcttccagaaaatttagagggcatacactacttgggactaaaaccatggcgatgttacagagactacgattgtaactgggacttgaaaacgcgacgtgtgtatgcaagcgagtcggtgcatgcgagatggtggaaagtgtacgacaggatgcgtaataagctgaaaggttattgtggtctgaatcttaagatggagaagaacgttgagaagtggaggaaaatggctaagctcaatggttttcctgaaaatcattggaaaattagaataaaagatcctaggaagaagaaccgtctaagtcaatgagaagagtcatcaaactcgcttattcaacaagagacttaattttttttttttctttacgtaaagattttggaagggaatttaatttctaacaggtaattgtggattatgaaggaaaaacattatacgtagttatgatatatatttcgttcgagtgaaagtattaaccatacttttatttggaataataatatgcgtaatttaagtaaagtaattttctcttttcaaaaatataatttcgatgccttttttccctctcactcgttaacacttttgtgccgaccgatgaatcaaaattagagtaacagtgaaacgcattcttccctcaatcgttcaaatgcaagatttcttcggctccgttcgtcgatcgcttgttttccgtccttcttccgacgacgataaccaggagaaccagcctccgtttcccggtgttctcgccgataagatcacctcttgcatccgcaaatcgaagatttttatcaaaccctccttctcgcctcctcctcctgctaacactgtagacatggcacctccgatttcgtggaggaaaggtcagttaattggtcgcggcgcgtttggtacggtgtacatgggtatgaatcttgactccggggagcttctcgccgtcaaacaggtaatttagggtttgtttttctgattgctgtggatttgaagctaattgggacttaattttgaatgacctaattctctggcatgtgtactgaacttcaaaagctttgttctactcaggttctgattgcagccaattttgcttccaaggaaaagactcaggttcataaacaatccatttcatcgagttttccctctttcaatttccattgatttttgtacttcattgagtttgttatctgtgttggtgctaagtaggctcatattcaggagcttgaagaagaagttaagcttcttaaaaatctctcccatcctaatatagttgtaagtaactgttggtattgtctccttctcaatgcatacggattcaacacttccttgtgttatctatctaactcaggtattttttattttctggccttagagatatttgggtacagtgagggaagatgataccctgaatatccttctcgagtttgttcccggtggatcgatatcatcgctcttggagaaatttggaccttttcctgaatcagtaagtcatgcttggatttttttttgttcaatctcttacaatgtgtgcattgcttaagtggtgagaacgattgaattaggttgtccggacatacacaaggcaactgcttttagggttggagtacctgcacaatcatgcaattatgcacagagacattaaggtaacaatttttctccatactttataagtgcttacaatctcgagtccttacccatgagactatatgtttctatgttttctcagggggctaatatccttgtggataataaaggatgcattaagcttgctgattttggtgcatccaaacaagtagctgagttggtaagtcaaaaaataatttgttttctacaaagtatattgcaggaagcattctgttctgtgtattctcttatttcttagttggtctagtataacatatccttcagagtgatttaatgtgattgacttgatttcatctctaggctacgatgactggtgcaaaatctatgaaagggacaccatattggatggctccggaagttattcttcaaactggacatagcttgtaagaaaccaagcgtgctcgtaaatgcaaaattagatgttttgtaactgatactcatacaattgtggctattaattgtagtcctggtgacttatgtcccatatttttgatttctcacaaacatgtggctattgttctcagctctgctgacatatggagcgtcggctgtacagttattgaaatggtgactgggaaggctccttggagtcagcagtataaagaggtaatttgttcgtatttctggtgatattttttcgtgaataattttgcttcttaattacaagtggacatactttcttttcaggttgctgctatcttcttcataggaacaacaaaatcacatcctccaatacctgatactctctcctctgatgcaaaagattttctgctcaagtgtctgcaggagtaagctactttgcttcagcaacattagtttggaactttaataggtactttcctcactactattgg

SEQ ID NO: 146699 - DNA, 604 bp, Arabidopsis thaliana landsberg
gtaagtactaattcatattatcgttcaacagtgaattattgaagagtatgagaacatatgcaaaagtcgcagccaagttgatgtggttcgcattaggttcactgggagttgaagaaaaggacatacaatgggccgggcctaattcagactttcaaggaacccaagcagctatccaactaaaccattatccaaaatgtccagaaccagacagagccatgggcctcgcagcccatacagactcgaccctcatgaccattctgtaccagaacaacaccgccggtctccaagttttccgggatgacgtgggctgggttaccgcgccacctgtccctggctcgctggtggtcaacgtcggtgacttgctccacattttaaccaacggaatcttcccgagcgtgcttcaccgagccagggttaaccacgtccgatctcggttctcaatggcttacctgtggggtccaccatccgatgtaatgatctctccacttcccaaactggttgatcctctccaatctcctctctacccatctctcacttggaaacaataccttgctaccaaagctactcattttaatcaatctctttccattattagaaattaact

SEQ ID NO: 146700 - DNA, 683 bp, Arabidopsis thaliana landsberg
gtcattgtttagaattaaaaaaaaagaaggtaaaagagtcagagccgcctagagaaatcgatcacaaattcagaagaaaagaacagagaaaacagaggaagaggttgagatggaggaacttgtagggcttctgagaatccgagtgaagagagggatcaatcttgctcagcgagacactctaagcagcgacccttttgttgtcataaccatgggatcacaggtcttttctctctctatctctgtctttgattctaatctgatttggtctttgtggatttcttctgtttttgagacatatatctctttttatcaaaatattgtcctccaagaagcatgataaatttcaattaagtatggaaaaataagagagtttaaacaacagagaaatgaaatcaatagataggtttagtatatgattttgatttttgatatagagaaaatcgtctttcgatattaggatgttcatatcttgcatgcactctaatagaattctttaaaatgcaccagaagctgaagactcgtgttgtggaaaataactgcaaccctgagtggaacgaggaattaacccttgcgttaagacatcccgatgaacctgtgaatctggtgagtccttctatctgtctatttttttataactggcaataataggaatcatgaatttccaactcaaaaacaattgacaa

SEQ ID NO: 146701 - DNA, 2775 bp, Arabidopsis thaliana landsberg; identical to SEQ ID NO: 34067

SEQ ID NO: 146702 - DNA, 2183 bp, Arabidopsis thaliana landsberg
gttggattaggcatctggagaaaagagctaacctgcttctatggtggtgagttttgattttctcgaaattattacgtttttttgactaatttagagatcacatttaacttgaattctctagaaaccagtagaaacttgtatgctcttatcatcggatttgtgtctctccttttctcaataaacttgttcttgcaatcatcttcatcgttggattataattactttctgatgaacttgctatttctaattataaattctgggtttttaccagaaccctactctaaggttactttatttgaaacaccgcatcctcttgagtctaaagttttggaatttatgctataccgtactttaattctgttacttgcatgttattttctagtatttgttgcgtaaagtttgcagttttggtgttgttgttcttttactgctttggttttatacaatgagctttgatttaacagattgtgttatgtttaaattctctttgcagagttatgtttaaatcaacatctttctctttgatcttgcagagttgagattatctgtcttgagaagctggtagatttttctattgatgaacaatgggtgagaacggggagaatctttcagtctctcaagagagtaaatccaagaaacttgaaagtaaaaattattcaggtgttcccaagagtgatctttggactgatgggattatttgtgcctttgagtttattcgaggtccgaaaaaacatgttgattcaaaacaacttgataaaggtgctttgaagcaagaagatggaccaatcagtcatagtctccctggtcataacccgtttgttgattcgtctccagttgatgatttaaggtcaaggtcggtatcttctttggattttaaagaggctcatttgcttccatcaggacatgttgagagatatgagggaagtcattgggtacctattggttgggctagaataactgaacttgttcaaatggttcaagtaaatgcggagtggcctaatctagagttgattgatgatgaagaagatgttcctgttacagatttagcagctccgtattgggaacgaccaggtggccctacatggtggtgtcacttgactgctggaaactcttttgttgagggatggcttagaagtgctacgtggttgcatcctgcaattagtctggcattgagggatgaaagtaagctaataagtgaacggatgagacatcttctatatgaggtatgtgcataatcaagttgagtgtcaaaattcagccacctaattttggtttatagacatgttctattgaaatacttccacattgatcatagtggttttgatataattaaaaatgtttgttagtctctgagcatagtatgtctttcatttagtgttacatcaaatgtctcgttacagtttaaacatgtacatatagtgtattttcttggatgttgttttcttacttcagttctgttgcatatccttaggttccagtgagagtagctggtggtttattgtttgaacttttaggacaatcagttggtgatccagtaatcagtgaggatgatgtacccgttgttttccgctcttggcaagcgaagaacttcttagtttccgtgatgcacataaaaggaaatgtaacgaacaccaatgtccttggtataactgaagtagaggttagttcaaaaagtgtcaaaatattctacttaataagattcttaaagcttaaataacacaaggctataatatgggttctgacctacactaattttcctgatgattctcctgataggagctgctttatgcaggaggttataatgtaccaagaacggttcatgaggttatagcacacttggcttgccgtctttctcgatgggatgataggtgacaacagttttctgatttacttttactctaatgaacgcttgtctagttttgctgaccagaaaagtggacttgagttttataccatgctcttgtctggaaagtatctaattggttgtccttgattggcgatagattattccgtaaatccatatttggtgcagccgatgaaatcgaattgaagtttatgaacaggttcttaaaaatatgtttccgtttgttttgataatacacaatgcatgtttaactaaagatactatcctttcttgttattaggagaaactatgaggatttgaatcttttagtctcattctc

SEQ ID NO: 146703 - DNA, 505 bp, Arabidopsis thaliana landsberg
gccatcatggtatataccatcagtatatctaatatcttatgatattaattcatagatacgtttcttcgtctcttgtagtgcacatacgataggagtcacacattgcaacaacgtattatcgcgtttcgataacgcaaacgcgacaagcgagaacatggatccacgttttcaaacgttcttgcgtgttgcttgtccagagttttctccaacttctcaagctgcggaagccacatttgtccccaacgatcaaacttcggtgatcttcgatacagcttattacgatgatgccatcgcgggacgtggcaatcttaggattgactcggagattggagctgatccacgtacacgtccatttgtggaagcgtttgcagctgatcaagaccgtttcttcaacgccttctcttccgcgtttgtaaaattgtcgtcttacaaagtgttaaccgggaatgaaggagtaattagaagcgtgtgtgacaaggttgattgatgtatatttataattatc

SEQ ID NO: 146704 - DNA, 392 bp, Arabidopsis thaliana landsberg
attggctataattatgacaaaaactaccaaaaccatgaatcctaagttttacttagttcttgccttaaccgcggttctggcctcaaacgcatatggtgcggttgtagacatcgatggaaacaccatgttccacgaaagttactacgttctccctgtcatccgtggccgaggcggaggcctgactctagcagtgccgcggtgggcagccatgtccttacgatatcgtgcaggaatcttcagaagttgatgagggcattccgtaaaatcatcaaactggaggcttaaggttgcgtcagttccgaatcacagaacctcaacatcgaaacagacgtcggagcacgatctgcatccagtcaacctactggcgggtcggtgagtttgtcacgagagga

SEQ ID NO: 146705 - DNA, 1016 bp, Arabidopsis thaliana landsberg
agcagttggatttactaaaatatctccttactttcctatgttgcagtaacgacctgtggattagctagagagggctttgaggttgctgagggagcgtaaagacggatatgatatcgtgatcagcgatgtgaacatgcctgacatggatggtttcaagcttcttgagcatgttggtcttgaattagacctccctgtaataagtgagaagaaagatcttgacttgttgtgtaataaatgaaaaaggttattgatttttgtgtgttttgcgttgtagtgatgtcggtggacggcgaaacaagccgagtgatgaagggagtgcaacacggagcttgtgattacctcttgaagccgataagaatgaaggagttaaagattatatggcaacatgttctgagaaagaagcttcaagaagtgagagatatcgaaggctgtggatacgaaggaggagcggattggatcactcgatacgatgaagcacattttcttggaggtggtgaagatgtttcttttgggaaaaagagaaaagactttgactttgagaagaagcttcttcaagatgagagtgatccatcatcttcttcttccaagaaagctagagttgtttggtcttttgagcttcatcagaagtttgtcaacgccgttaaccaaatcggatgcgatcacagtaagtacgttggcgactttggtttcttatcatgtccccttgcctccctttattatcatgtcttcatagagccgtgaaattttttccggtctcttgtttggcagaagctggtcccaagaagatattggatctcatgaatgttccatggctcactagagaaaatgttgcaagccaccttcaggtaaaaactttaccttgtcatcatcattattcagaacaagtgttagattaagcttttcgtcactttttttttgttctggttttgtagaaatatagactttacctgagcagattagagacaggacaggagctcaagtgttattcatgtggcgtgaagaatgcggattcatct

SEQ ID NO: 146706 - DNA, 1717 bp, Arabidopsis thaliana landsberg
tgtatacttactgcctttcatcggtcatctcgtttagagttggcattgcataatttttgaaatctctttttcgtttctttttccgtatgtcattatgtattaattataatctttaatgtctttgattttcagagggaaaagatgggaaaactgaaaccgaagtctttacatttactggtgaaggtggtgttgctatggcaatgtacaccactgatgaggtatagttatgcttaccctttcttccaactacagtacaaataactcgtctttttggagattgtcctctaagatgttctcttataatacagtccatccgtgcttttgctgatgcatcgatgaacactgcttatgagaaaaagtggccactttaccttagcacaaagaataccattcttaagaaatacgatggcaggtatgcgacatttagttttggttttcatatcatataggcttttcgctcatatggtggaggagatagttttgctgttggttacatttttgttttcctataaagattcaaagacatcttccaagaagtctatgaagccagctgcaagtcgaagtatgatgctgctggaatatggtgagctgtctctttgttttttcatttttggaatagcatggtcccttatattaccttttactgataagaacctaaataattaaattggttaggtatgaacaccgtcgcattgatgatatgagtggcctacgctcttaacagtgagggaggctatgtttgggcatgcaaaaactatgatggtgatgtccaaagtgatttcttggcacaaggttagtgtaatcgtaaatgaatatgtccttcagcgcttatgtctatcttacatattacttgttaactaattgtttcttataatgtgttttaggattcgggtcacttggattgatgacatctgttctggtataattctcacaagttcttagctatattgtcacataatctctttgttaggctgttacatgattctaagtttccgcttttacaattgttgtgtattttcattaggtctgcccagatggaaagacgattgaagctgaagcggcccatggaactgtcacccgtcacttcagggttcatcagaaaggtggtgagaccagcacaaacagcatagcctctatttttgcttggactcgtggacttgcacacaggtaacaaaaagaaaacatgcttaataatgtttcattagaaggaagaggattgtctaagctaatgtctttgaaacagggctaagttagatgacaacgcaaaactcttggatttcactgagaagctggaagccgcttgtgttgggacagtggagtcagggaaaatgaccaaagatcttgcactcatcattcacggctcaaagtaatcaattcaacactttctatttacgtccttgttctcatcaagatcacttaatttactgtcggattttttcaggctttcgagggacacgtacctgaacacagaggagttcattgatgcagtcgctgctgagctcaaagaaagactcaatgcttaagaaactgaagaaattgggtaaaattcgaacgtctcagttcctaagtgtcttatctggttggtggggttggttgggatcggcaggaataaacttttgtggagaggagtgttgagaacgacctgtttcctctcttataatatttccaaaatattgaaacattttaccatttttattcagatcccgaattttatgtt

SEQ ID NO: 146707 - DNA, 1347 bp, Arabidopsis thaliana landsberg
aataaaaagaagcatcttctagagagagacatattgagaaagagagagaaagctttagggtttcaaaaaaaaaaactgagaccctttagaaatctcctaacaggaaattttttctcaatcgctatagaaaatgggagtcatgatcaatcaccatttcctcgcttttatcttcggcatcttaggtaatgataaatccacaaagccaaatcctagtttgttcatcatctcttgtctttactgttattcttatgttttttacttgttaacataaagaatttgcaacagcaactataatgttgcaactttacatctaagcttctgatttcaaaacaatatatactatgtgtagggttccattgtagttctagcttagagttaattaaacaacagagtagtaagaaatgaattgaaattctggagtgttcatcatgactcacctaacaagtttcaagttttttcttcattaactaaactaagtcatttgggatcataaatgatcttctaattctttagttaaatcccaaactaccaaaaaataaatcaatacgtaagctattaattaaattgaaatcgtcacgcattgttgtccatgttatatcatactcaatacgtgtatagtggttaatgcacaatttaacttccccgctgaggttggttagagatcccgtactgattcatatgtacttatgtttccacaaaactagaagcctcttaattatacaattgactcatttttttatttttacatggaattacaggaaacgtgatatccttccttgtattcctcgctccagtgtaagtagattcaatttactttttttatttcattttatttatttgttagttttgagaatgattctgatgatttcgtttttcaaaatattcaggccaactttttatagaatatacaagagaaaatcgacggaaagtttccagtcgctaccgtaccaagtgtcgctatttagctgcatgctatggctctactacgcattgattaagaaagacgcttttctcctaattaccatcaactcctttggctgcgtcgtggagactctctacatagccatgttcttcgcttacgccaccagggagaaaagggtaaaattattcccctctcctcctccttaattccgctatgtaattaaatacgaatattaaatgaataatatgcgtttttggcagatatcggctatgaagttgttcatagcaatgaacgttgccttcttctcgttgattctaatggtaacacatttcgtggttaaaactcctcccctccaagtctctgtactcggctggatttgtgagcaaattctgtttatgttaacactgcccctcaaaagatcgtgg

SEQ ID NO: 146708 - DNA, 1773 bp, Arabidopsis thaliana landsberg
ccgccctcggaatatgtgaagaaaatcaagcaatgaactcgatgctatattcacgaagtgttgactacattcgataagttggagccggagatgagcaagtccaagagggcatggtttgagaaccatccaagtttccaacacatcttccacatgccaaaagacccaaacctccgacttatggagttgtggatgctctttcttcgcacgacgcgcatggaaaggaagaaagaatagtggttcatcgtgaatggcgttccaatccgatatggtatatggaaacacgcatatacacttgggtatcagaatatgggaagtttggagttcaagacaaagcatttcaagaatactgttgtgaaatgcaaagacgtaagagagaagctcttaaatatagtaccgacgggtgaaagatccacagaaaggttgaggatgatggtcctctatttcttaaacaacattattatagcgtctatcaagaccagggaaaaggcaccttaagtggatgaattgtgtctaaaggatgtgagtgaactcacgttttgtactttcagttgggggaggggggagggaggaaaatagtttcattagctcctgaggtattataagatctaactatcgatagcgatagttagtatcggattaaaaaaacaggtattgaaataaaattaattaatagattctgtatcacgcatatacccttaataataaaatattaagaatttaattcatatattaatatataattcgtctatatctatatataaataaaagaaaaagaacatgttgattatatcaaaattatagaacaataaggaattttaacttatcatggggaaagacaccattgctgatataataacctctatacgaaatgctgacatgaatagaaaaggaacggttcggataggatcgactaacatcacggaaagtattgttaaaatccttttacgagagggttttatcgaaaacgtaaggaaacatcgcgaaaacaaccaatattttttgattttaaccctaagacatagacgaaataagaaagaatcctacaaaacgattttaaatataaagagaataagtcgaccgggtctacgaatctattctaactctcaacgaattccacgaattttaggcggaataggaattgtaatcctttcgacttctcaaggtataatgacagaccgagaagctcgactaaaaagaatcggcggagaaattttgtgttatatatggtaatccttctaatataaaaattagatatctgtaacttacaatttgtgaaaaaagggggttgtgtaataccacccctgttcaaaaaagtttcggatgttttacttcgaatgaaattaaagaaaaaatgaattaataaaagttttctttcttaatcacttccgaacggcatggttcgattttgtttagatactaaagattttttttcgttcatgcttctgaaaggattcgacatatttttgtataggtatacctataggataaaaaggtaaaattttgagtaagttcttaagtataagttaataaggggacagccattttctagactccataataagtattcaaatgagtaagtgttttttcaatttcaaccattcctttcacgaagatacaattcaagattcaaaaatatcaagaaacctttttttcgtccaccaataaatatattcacagaattaaggaataacaactatgaaaataagggcttccgttcgtaaaatttgtgaaaagtgtcgaataatccgcaggaggggacgaattatagtaatt

SEQ ID NO: 146709 - DNA, 896 bp, Arabidopsis thaliana landsberg
gtttctcttgagagatgttcagattcttgagctccttatgccaatgttcgtctttgtcgcaatacatgccttgcgtcagaagaaataccaaggtcttcccgtgtggccgtttcttgggatgcttccttctctagcttttggcctcagaggaaacatatacgagtggctatccgatgttctatgtctccagaacggaactttccaattcagaggtccctggtttagcagcctcaacagcactatcacttgtgacccaagaaacgttgagcatctccttaagaaccggttttctgtcttccctaaaggttcttactttcgagacaatctccgagacctcctaggagatggaatattcaacgcggatgatgaaacttggcagaggcagaggaaaacagcgagcattgagtttcattcagccaaattcagacaattaaccactcaatctttgtttgagctcgtgcacaagaggctcttacctgttcttgagacatcggttaagagctcatctcctatcgatctacaagacgtcttgttgaggctaacgtttgataacgtatgtatgattgcttttggagtcgatccaggatgtctcggtccagatcaaccagtgattccttttgcgaaagcctttgaggatgcgactgaagctgcggttgtgagattcgtcatgcctacttgcgtgtggaagttcatgaggtatcttgatataggaacagagaagaagcttaaggaatcaataaagggtgtggatgatttcgctgatgaagttatcaggacgaggaagaaagaactgtctcttgagggcgaaactacaaaaagatcggatctcttaactgtgtttatgggtctgagagatgagaagggagagagttttcagaccagtaaatgtgatatgc

SEQ ID NO: 146710 - DNA, 1717 bp, Arabidopsis thaliana landsberg
  unsure (1)..(1717): unsure at all n locations
gctttctactcgtttttttttatgatttcttttgcttattctgttatggactntgtattttcttgttttctattcgtggttctcttgtggactgattagcgttaacacgttataaatcttgtatactttactttttgtgttatacagaaaatcttcgagagagaaagataacgaggcataacacatgatttttaccaaaaaaatatattaggaagacatatatatggcttgaaaatgtgactgaaaagttgagattctaacaaacattttgtctcaacggttaaaatgtgattgcactctctaaaccgttagtgtgacatcgtgagaaagcagcagacacatgactatgatgttaacatttattatcttaaaatgcatgtagtctttactctttagcatgggagaaaaaacctcaatccaaagtagagtttggttatgatttcggtggtttggcatgtagtctttagttttgatagagaaaagggctaagagacatgcattgatgatttgattctagtttatgctgttatcgactctgtgctagccattatatttgtttagagtcagaatttatgatcagtacgaaaattccaaaaacaatttctatagatatcatcattgatatgtgtccctatatattaatttccattaatgaattcaatttaaaatgaaataaaaaatgttggttactatagtagttcctaaaatcaaatttgtaaggcatgaaagatgaaagaagggagtcatgtttttaatgcatcctctttgtcctcattcactttgttttctttcccttttataaaaacctctctccctatctcacacactcacaaaagtgtctcccttattttcaggcacttcaaaataaatatacgaaaataaaataaccatttcttaagtctaaagaccttctctttcaactagaagcctttaagccatgtcttcttcttccttgatacttctcttctctactctctctctctttctcaatgtctcactcgcagacaatcacacggcggttgttataacaacctcagatactccaccgccacttcctccgccttctccaccgccacggcataacttcacttcctctctcatgcccggaatcgcagtcgttatcgccgtcctcactgcgtttttctctctcactttcttacttctcctctacgtcaaacactgtaaacgacgaaacggcagcgtttacgtaaaccacccgcagcgtttcgcaatcactagatacggaggaggatattacaacggtggaggagtagtaggaggaaggaaaaactccggtatagaccggtccgtgattgaatctttaccggttttccggtttggtgcattaagcggtcacaaggatggtttagagtgcgccgtgtgtctcgctcggttcgaaccgacggaagttctgaggttattgccgaaatgtaaacacgccttccacgtggaatgtgttgacacgtggcttgacgctcactccacttgcccgctttgccgttaccgggtcgacccggaagatatactcttgatcggtgattgtaactcctggttcgagctccagttctctaaagatgaatcaaacagtgttaataataatcctcccggtttaacccggtttattccggttagtcgaatttccggtcgtcattcctcggctggtgaacgagcgagtcgactcaacgagattagaacatcttcgtcgtataaatcgaat

SEQ ID NO: 146711 - DNA, 1210 bp, Arabidopsis thaliana landsberg
agtggagaaagctaaagagatattaagcaaaactcctggtggttacatacaacaccagtttataaatcctgaaaatccagaggttatattatattatggcatccgactatatttttaaaatctttctcattctttctcttttatgattgagtttaaacttgtttcttgcagattcattatagaaccacgggtccggagatttggagagattcagcagggaaagtagatatcttagtcgccggtgttggaactggtggaacggttactggaacagggaagtttcttaaagaaaagaacaaagatattaaggttcaaaactttaataatccttgaaaacaaccataggaaataggatcttatttttaacataattttcttacaatcttgataataggtttgtgtggtggaaccttccgaaagtgcggtactcagcggaggaaaaccaggtgaggaataaacatcattattttcttggagtacttgattatctctatccatcattgatgattcttgatcaataggtccacatttgatccaaggaataggctctggtgaaattccagccaatttggacttaagcattgttgatgaaattattcaagtaagtagccgagataatttacttcttgatcgtgaaacaataatctaagttttgcaatgttttgcattaggtgacaggtgaagaggctattgaaacagccaagcttcttgccctcaaagaaggattactggtactataggttaacttgtttttgtcggtataaacccgaaattttgacagaaaaaaaggagaagtttctgataaatgagataattcatttggcaggtgggaatatcctctggagccgcagcagcggctgcgttaaaggttgcaaagcggccagaaaacgcagggaaactcattgtggtaagctttttcactaactgcttacctataagctttttcactaactggttattgtttggttttcaggtggtttttcctagtggaggagaacgttatttatcgactaaactgttcgattcggttagatatgaagcagagaatttgcctattgaatgaatgttggacgtgtgccggtttcgtgtgtaataagagacgttcgttccaagagtccaagatttcaatttgcttattactggtcaatgtgaaatgtataaaaagttgcatattcgattatgaataattttagttgactacttccattgc

SEQ ID NO: 146712 - DNA, 1977 bp, Arabidopsis thaliana landsberg
  unsure (1)..(1977): unsure at all n locations
ttctctcgccgcgcttttctactcgcgctaccactnctagcactacgngcttccttgtttctcaaaccgtctgtcgctttagcctccgaggagagctcgtccgctacagtaacatcgcctgcggaatcagcagctcctcctcctcctcctgcgaccacaacaccgccgccgcctccacccgtgaataaggaagagacgataacctcgagaatctatgacgcgacggccattggtgagccgatggctatgggaaaagataagaagaaggtgtgggagaagctgttgaacgcgagagttgtgtacctcggtgaggcggagcaagtgcctaccaaagacgacaaagagcttgaactcgaaatcgttagaaacctgaggaagagatgcgttgagagcgagcgtcaaatctctgtagcactggaagcattccctctcgatttgcaggatcagcttaatcaatacatggataagaggtttgtctacacataaacttactgcaaaattcgagattgccgccgcgtacttttcacgtgatcgtgaatattgtttggtggcaggatggacggagagacattgaagtcttatgtgacacattggcctgctcaacgttggcaagaatatgagcctcttttaagttattgccgcgataactctgttagactaattgcttgtggcactcctctcaaggtagagtcttgaaagtatttggattttgttaactgtttgatttggtttcgatgatcttcctagttcagtgtttaatttctaatcctttaaactatgctgcttcattttacattggtttctatctgatggaagtttgtgagactaattacatcttgatacttgtaagtggtatgaatatggttttgatcatttgaaatgagtatggacatgtttaagctgttaagactaaagagagcgagcttatcagaaatattgctcttgttttgtgactctggtaagagctgacaacactctgcttaatctgatgtaggttttaagaactgtccaagcagaaggtatccgtggtctttcaaaatctgagcgtaaattatacactccccctgctggttctgggtttatctcaggattttcttcattctcacgtagatctacattcgatatgagtctcccaacacagattgttccttttggaccgagttcatatttgtcggcacaagcaagagttgttgaagaccatacaatgtcacaagttattttacaagcagtagcagatggagggggtactggtctactgttagtggtgacaggggcaagtcatgttgagtatggttcaagaggaacaggtttgccagcaaggatctcaaggaagtttccaaagaaaaaccaagttgttgtattacttgaccctgaaagacagttcttgcgaagagagggcgaaactccagttgctgatttcttgtggtattctgctgcaagaccctgcagtagaaactgctttgaccgagcagagattgctcgagtaatgaatgcagctggcaggaggcgagatgcccttcctcccgtaagattcatatggttgctttcattattttgacgacatgcacccttgtatctaaaaatctcttatcaatgggtttattatgcagttcaattcttctccccaattttttctttgttgagcttaactttgaatcaagcttgtatattataagttcagaatgatggaaatctattccatgctttccaggatattcaaaatggattagaccttggtctggtgtcacctgaggttctgcagaatctctttgatttggagcagtatcctcttatttctgagcttactcagcggtttcaggtatatccattatgatgattttttttttgagatttttgcatgatatattgttctatatcgatatagcagagcttgcatacagtccatcgtagattacttgttctatatttatatcccagagtttatgatttcttgaacagttagtggaatttcagtta

SEQ ID NO: 146713 - DNA, 937 bp, Arabidopsis thaliana landsberg
ggaaacatcgcataattagagggtttctttacaaaaacaattctaattcaagcaaagtgttcaaatctttttcctcagtgtcgtcgtcttcttcgcaaagcctttcaaaaacccttcactactctttctcagagtctcaagcatcattttcccgagaaaactatgaattcaaacattttcccaccatcgaaacaacaaaacgagcttaataatatacaacaatccttctcaaatctccaatctcaatgctccaatttactcctcaacgtttcacaaacccttaatcctctcttcaacgccaacacgaacaacaacaaacctaatatattctctgctctcaattcgtttcgtgatcaagctaagcaagctttagattctagaatctctcgattcaattctggtaaggcacctgtctgggcgagaatttctgacgacggtggtggtgcgagggctcaggtgacggttccgattcgcggaagcgggaaaggattatctgctgatgctattgaggagagattggcgggagttcctgtttacgcgttgagtaattcgaatgaggagtttgtgttggtttcagggacttcctctgggaaatctctgggtttgttgttttgtaaagaggaagatgcagagactcttcttaaagagatgaagagtatggatcctcgtatgaggaaagaaggttcaaaagttgttgctcttgctcttagcaaggtataaggaggaatcaataactcaattagctcctttagtattcttctgtttagtggttttgatttttgtgtgtgttgtttgttgcaggtgttccagttaaaagttaatggtgtggcatttaggttgattcctgagtctactcaagtgaaaaatgccttgaaggtgagttgattttacgatcgaacatatctttggatactcaaaaccttttcttttgtcacgg

SEQ ID NO: 146714 - DNA, 1466 bp, Arabidopsis thaliana landsberg
  unsure (1)..(1466): unsure at all n locations
atgatagaggaagagggcgaaaggttaaagacgaacatgcgcaagttagtggacacaggcggtacagaaagaagtccagacttactanaaaccccaaatacgccaaacgaataaagcttcttaccgtgcgcctctccacaaaaaacgggtaattattattttttcttaacccctccggtaccggccgatcagataacgacggctaagttatcgttttggagataaaaataccttgtggggtaaacatccatatataccacgtaaaggggcgaatttataaatattgaaagctcatattcgagaaaaccctaatttcaatatacaggattttttacctcgtcgtctctgaaacttcatctctgccgtcttaagaagattttgccagtgcgggaagcggcggagattgagagattagcgacgatggaggaaagcaaacagaactatgacctgacgccactaatagcgcctaacctggacagacacttggtgtttcctatattcgagttccttcaagagcgtcagctttaccctgatgagcagatcctgaagtctaaaatccagcttttgaaccagacgaacatggttgattacgccatggatattcacaagagtctctaccacactgaagacgctcctcaaggtattcttgtgtattcctctctggatatgtctgtgaatttgcgtttttgtgtactggtttgtttgtttgatgatgaatgttgaaatttgtggtgatagaaatggtggagagaagaacagaggttgtcgctaggctcaaatctttggaggaggctgctgcaccactcgtgtcttttcttttgaaccctaacgctgtgcaggagctaagagctgacaagcagtacaatctccaaatgctcaaggaacgctaccaggttgtgatttggatgattaagttgtttaattttgtgaaatgttatccagatttggttttgtttgtgtattgtggaacacaaatcttatatggcttggtgtcttatcagattggtccagaccagattgaggctttgtaccagtacgccaagtttcagtttgaatgtggcaactattctggtgctgctgattatctttaccagtacaggaccctgtgctctaaccttgagaggagtttgagtgccttgtggggaaagctcgcatctgaaatattgatgcaaaactgggatattgctcttgaagagcttaaccgtctcaaagagattattgactcaaaggttagtatttaaaacttcttctagtttgcgacctttgaaatcaatatagatgtgagagtatatatgctaactaccatttgttttttcagagtttttcatcgccgttaaaccaggtgcagaacaggatttggttgatgcattggggtctgtatatcttttttaaccatgaaaatggaaggacacagatcattgatctttttaaccaagacaagtaagcctctacctctctgttatccg

SEQ ID NO: 146715 - DNA, 1488 bp, Arabidopsis thaliana landsberg
  unsure (1)..(1488): unsure at all n locations
atgggtcttggtcttggtttttggggttatgcattgtttctttctctgttcttgaagcattctcattgccaagaaccaaacacagatggtttctttgtctctgaattctataagcaaatgggtttaagctcttctcaagcttataacttctctgctcctttttgttcatggcaaggtttgttctgtgattccaagaatgagcatgtgattatgttnnnnnnnnnnnnnnnnnnnnnatctggtcaaatccctgataacacaattggtaaactcagcaagcttcaatctttggatcttagcaacaacaaaatctctgctttaccatctgatttctggagtttgaacactttgaagaatctcaacctctctttcaacaagatctctgggtctttctctagtaatgttggcaattttgggcagcttgagttacttgatatctcttacaacaatttctctggtgcaatccctgaagctgtggattctcttgttagtttgagagtcttgaagcttgatcataatgggtttcagatgtcgattccacgaggacttcttggttgccaatccctggtttctattgatctctcctctaaccagcttgaagggtctcttcctgatgggtttggctctgcatttccaaagcttgagactttgagccttgcaggaaacaagattcatggcagggacacagattttgctgatatgaaatccatcagttttctcaacatttcaggaaatcagtttgatggttcagtgacaggtgtgttcaaggagactttagaagtggctgatctcagcaaaaaccggtttcaaggtcatatctcatctcaggtagactccaactggtttagtttggtttatcttgacttgtctgagaatgagctcagtggagttatcaagaatctgacactactaaagaagctcaagcacttaaatctagcttggaatagattcaacagaggaatgtttccgaggattgagatgctttctggtttagagtatcttaacttgtcaaacacaaatctttctggtcacatacctagagagatctcaaagctgagtgatttgagtacactcgatgtttctggaaaccatcttgcaggacatatcccgattttgagtatcaagaaccttgtggctatcgatgtgtcgaggaacaatttgacgggagagataccgatgtctatccttgagaagctcccttggatggatatattcaaattctcttgcgccaactgaacattttgttctggaaagttgtcagctgccactatgaccagatccgtctttggttctacagatatgctgcccgatcgatgcaaacccagcactttacaagacaaaaagatcagtcattggaggacttaagctggcttaagcagtgacgctttatacgatgtgtttactcataggagcaaaaattttaaaagcatttggctgcagaaggaaaactaaatccggtgaagccaaagatctctcagtaaaggagga

SEQ ID NO: 146716 - DNA, 2190 bp, Arabidopsis thaliana landsberg
aactctgcatttttcattttctactcttttggtttgttgcaatgttttctagtttttcaacctgagcgttagtgagacactaagacttataaaacagtgagagattatcccaatgtgttgcttttttcgtctgattgttggtagaaacttggagctattgatagcaaaaaaaacctaactttccagattaatttgagttcttcatatgatatcgagacaaaatagttgcttgtgccgttgtgttggacctttggtggacttataccaccgggatgaatcataaaccactgattcgcaattacggctaattctactggtttcaacgtgcagcaaataatcaatcacaactagatcatctttagtggtacgcgtacagtgtatttcacactccaacaaatttttaagagctctacgaatgtgcacaaggctttattgattattgcaacgatgtcgcttagtttacttaataatatgttgaaatccaagatattgaataggtaaatatcccactgatcaataccagccagccctcctcatatagtgaagttttttgtcatatttatatgtaagctagacatagaccaaacgtagccaaaacctcaagaattccaccaagaggtaagggtgagccatctgagatctcattagatagtagtgttgatcgctaaccatctcgtacatgtcggattagtaggcttctcgtatgagattgatacggggtcaatctcatatgacatatcattggaaggtaccttcccttacgagatctcgacaaatatcaaaacaactacaacacttttcttggtaaaggtacaactaggccaataccagaagaagaaaaaaataagctcaccaaagttgctgaaaatgcctaggtaatgagacatgattttagaaatcacttgaaatcttcgctcattttgaataagagtaaagggcataaatgattgattgcatcaaatatatttttacttttcggacaagcttttacaatggattggatatattttcttgtgagaagaatagaaaagggatattctataactgctttatatctcgtgtccgtccacgtcaccacatctgacgactggaataatcctcaggtaccatcggatatactttcctaagcaccggtcttacctcaaatataatgagataaaactttttattaaaccaaatctttatcttcccataaatggtaaaaacaaaacatagaaagctacgaatattccaagctaaattctctacttaagttttagttataaatgtgattctctcaccttttcactaaaattctcatcaatcacactattatagctctcagcaatcatcactcaaaaatctatggcgattttctccagaaccaaacgtgtcactgatccacttgacgacgacgcgaaggctcggatcttgagcagccacagttacatcctagaccaagattctcctcgactctgcgagctcgtacacgggtttcttgaggatggtcctgaagagtcattctacgactctgaccccgacctgtctgagacttcttcagctgaacattctggtgaagctagtgtggagatcgtgagaatggcggtgagtttctacgattccgatccttaccggaatctattgctagctcacgttttgagagccgtggaggtatattccggttttaggtcaaggaacaaaactgttttccgggataaggtagcttcgtttctgcgagagcttggtcacgacgccgcggtttgtgtatcaaaatggacctcttcatccaaactcatcgctgggagttaccatttcattgacgtcgttcacaagccgtcagataatgatcagaaggccgtccgttacttggttgatctagactttgcttcggagttcgagatcgcaaggccaacgcgcgaatacacgcgtgtgctgcagctgctgcctaacgttttcgtaggaaatgaagagaatctaaggacgatcgtgagagagtcatgcgacgcggcgaagcgatcaatgaagagccgtggcttgtctcttccaccgtggcggagaagctcttacttacagcataagtggtttggtccgtacaaaagaaaggtgggatctagtttgggagtgaagccgttgaatagtgacgccgttagttgccgatctttagggtttgatgacggcgccgtcaatactcgtttgttcatcagggcatga

SEQ ID NO: 146717 - DNA, 1285 bp, Arabidopsis thaliana landsberg
atgctgatgtaggtcagtaaatttgatccttctaagaagaagaagaagaagaagcagaagcctctgatacgcgaagacgacatcttcttccagaatggaggacactttacgggtaatgaattagctttcaaagaattgcgttggaagataatcagttaatcgtacccaaatctatgttgtgtctgaagctactgtcctttattgatgttatcgtaacagaggataacttaccggactgtcaatctagccggaaatttgagccagattatggctacaaagaggtacttttcgctaaaattagagttctttagttatgctactggttctcatttgtgatccgagcttttctatgctctgcagctcttgagtatggtgtttgataggcttcgtgaggaagatgtcgaggtttctacagagaggccaagaacagtgatgatgcctcctcagctccttgcagaagggacgataactgtttgtttaaactttgctgatctctgcagaacgtacgaattataactcatctttccttctttaactacttgtagttggtgagccatgtatcacttttaaatatacattgttcaggatgcataggaagccagatcatgtcatgaaattcttacttgcccaaatggagacaaaagtatcgctgaacaaacagcagcggctagagattaagggtttagtgtcttctaaggattttcaagctgtgttccggaaatacattggtgaattccataactagtctccggtgttgatttttttttgtttttctagtggtgggtgtcttgtctgatatgtaaaatcattgtgtcttagatgcgttcgtaatctgcgtctgctgcaaaagtcctgacacagctctcgcggaggagggcaatggtcttttcaatctcagatgtgagacggtaagtagaataatctctgcaaccatctgattgctgcgttcaggtcagggaaaagatgaggataaattcgtctcatttgagtctgttcttgtgcagtgtggtttagtagcaccagtcgatataccaaatctactgtgaagaaactcatgaagatatggaaattcaagagcaacgtgctgggcaaggttccattgtaagatttatagtgatttcttctgactttgttagtcagttgtatcagaagacgttttctctacaactctaaaaaagaagttcccgcgtcctgagagatgttgtaaggctgaactaaaactctcgaaaccgtttgtgagatgtctttagctagtgtatgcctaatggaagttctttaatgatca

SEQ ID NO: 146718 - DNA, 812 bp, Arabidopsis thaliana landsberg
atggcaaacggtggcattgtcgtgtgtgcatgtccgccacggagcatcaaaatgtttcgatcttctcttcttcctaatttgttaatttctattctcactgttgagagagagcagacagcagagagcaatgacgtcgatggagaggatggagagagacgcaatggagacggtggctccatacgctccggtgacttatcaccgccgtgttcgtggtgacttggatgacacacttcctaaaccttgtacttcttcctaaacttctcttatacatattcaaatatattaatgatgcgtgactcatacgttagataacaattcttgattatttagatttgccgagagcactacaagcacctgacatggaacacccacaaggaacaccagatcatagacataatggccttagtgttcttcagcaacatgtcgctttcttcgatttggacaataatggcatcatttatccctttgaaaccttctctggtaaactcttcaatctcttcatatgtatagttatgtacataccggtttatacattttactagtttgtgtatatttacataaacacgaatttgaattccaccagggttccggttactcggtttcaatttactcgcgtcgcttatcttggctgctggtatcaacatagctcttagctatgctactctcccggtaacacagtacatatatttcggtttaacttaatttagttaacgaacctagttatgattggtaagtttatgattgatggaacagggatggttaccgtcaacgttcttccctatatatattcacaacattcacaaggcaaagca

SEQ ID NO: 146719 - DNA, 1957 bp, Arabidopsis thaliana landsberg; identical to SEQ ID NO: 5649

SEQ ID NO: 146720 - DNA, 1141 bp, Arabidopsis thaliana landsberg
caaaaaaaagtgtagaagcagaagaaacccatcatcatcatgatgaactcttctcttctaactccttcttcttcatcttcttcccatatccaaactccatcaacaactttcgaccacgaagacttcctcgatcaaatcttttcctcggccccgtggccctccgtcgtcgatgatgctcatcctcttccctccgatggcttccacggccacgatgtcgactcaaggaatcagccgatcatgatgatgcctttgaatgatggctcctccgtccacgctctttataatggcttctccgtcgccggatctcttcctaactttcaaatccctcaggtataatctctttctcttttctaagtttttctcttcttgaaaacgagacttatggtgaaatatagggatcgggaggaggattgatgaaccaacaaggacaaacgcaaacgcaaacgcaacctcaggcgagcgcgtctacagctactggtggtacggtggcggctccgccgcagagtaggactaaaatccgagctaggagaggtcaagcaactgatcctcatagtatcgccgaaagggttagttgtttttgttttttattttactttgttcgatgcattaatttgtatcagttaccgagaaaggtgtcgaaattgaattttttttagctttttgaagaaaagatttgagtattttctggaaaaaatgtttttatgggacagttacgaagagagagaattgcggaaagaatgaaagctcttcaagaactcgttcctaacggcaataaggtaaatttttattcaattcattttcagtttagtttccaaaaattaagattagttaaaatattaaatggatcattatgaaaataaacttcactttccatcattttattcatcatccactcttgattcgtgcgatccataattccatctaatttacaatttaaactccatcgtctatttctagttctcatcttctagacctaaaattgaaaaaatacaaaataaataatgaaaataagtgtcgaaatgatcaggaactttcttggagctagttgttcaagagatacctttcggctgtcaactagaactttcaggagtaaacaagaaaatttatattttttgttttactcatataattggtggttgtg

SEQ ID NO: 146721 - DNA, 1686 bp, Arabidopsis thaliana landsberg
cggagaagacgaagaaacatgtatcttctctttctcttcttacttttccccaccgtcttctctctcaaccaagacggtttcattcttcaacaagtcaagctctcgttagacgacccagactcatatctctcttcctggaactccagcgatgcttctccttgtcggtggcccggcgtttcctgcgccggtgatttctcctccgtcactttcgtacacctctccagcgctaatctcgccggaccttttccttcagtcatttcgcctgttctctctaatgtggctcatctctctttgtacaataactccatcaactctactcttcctctcaacatcgctgcttgtaagagtcttcaaactctcgatctctctcagaatctactcaccggtgagcttccacaaactcttgccgatattccgactttggttcacttagatttgaccggtaacaacttttccggtgacattccggcgagtttcggcaaattcgaaaacctagaggttctttctcttgtttacaatctcttagacggtacgattcctccgtttctcggcaacatcagcacgttgaagatgctgaatctttcgtataacccctttagtccgagtcggatcccgccggagttcgggaacttgacgaatctcgaggttatgtggctcactgagtgtcatttagtcggacagatccctgactcgctgggtcaactcagtaaactcgttgatttagaccttgcgctcaacgaccttgtaggtcatattcctccttcgctcggtggtttgactaacgtcgttcagattgagctgtacaacaactcgttgaccggagagattccaccggagctcgggaatttgaaatcgttgagacttctcgacgcgtcgatgaatcagttaaccgggaaaataccggacgagctttgccgtgtgccgttggagagtttgaatctctacgagaacaatctagaaggtgagcttccggcgagtatagcgttatctccgaacttgtacgagattagaatattcggaaaccggttaaccggtggattaccaaaagacctcggtctaaactcgccgttgagatggttggatgtttcggaaaacgaattttccggcgacttaccggcggatctgtgtgcgaaaggagagctagaggagttgttgattatacacaattccttctccggcgttataccggagagtctcgccgattgcaggagcttgacacgtatccggttagcttataaccggttttccggttcagttcctacaggtttctggggattgcctcatgttaacttgcttgagctcgtcaacaactcgttctccggtgaaatttcgaagtccatctggaggtgcttcaaatctctcgctggtgattctctccaacaatgaattcaccggatctttgccggagtgaaagtgcgcccttcggacaatcttaatcagttgccggcaagtgggcacaagctcagtggctagtcgcctgatagcttgatgcgttttggagacttaggtcctctagagctcaatgctaatcagttttcaggagagttgacttctggaatcaagtcttggaagaagctcaacgagttaaacttagccgataacgaattcaccggtaaaattccagatgaaatcgggactttgtcagtattgaactatcttgatctgtctggtaacatgttctctggc

SEQ ID NO: 146722 - DNA, 1306 bp, Arabidopsis thaliana landsberg
atcttctttctggccggtatagttttcgtcatattcctgaggacagtgagaagggatttgacaaagtattaggaactggacaaggaagcacaggcacagatgaatgaggagctctctggatggaaacttgttgtcggagatgtgttcagagaaccagaaatgtcaaagcttctatgcattatggtgggagatggggttcgaattacaggaatggctgttgtcactattgttttcgctgcacttggattcatgtcgcctgcctcaagaggaatgctactaaccgggatgattattctctatcttttcttgggtattgttgctgggtacgctggtgttcggctctggagaactgtcaaggggacttcagaaggatggagatcactttcctggtccattgcatgcttcttcccgggtattgcttttgttatactcacagtgttgaacttccttctctggagcagcaacagcactggagccatcccaatctctttgtattttgagctcttggctctctggttctgcatctcggttcctctcaccctatttggaggattcctaggaacacgagcagaagcaatccagttcccagtgagaaccaaccagattccaagggaaatcccagaacggaaatacccgtcatggcttctagtccttggagcaggaacccttccttttggaacgctcttcatagaactgttcttcatcttctccagcatatggttagggagattctactatgtatttgggttcttactcatagttctgcttcttttggtagtcgtgtgtgcagaagtatcagtggtcttgacctacatgcacctctgcgttgaagactggaggtggtggtggaaagccttctatgcatctggttcagtcgcattgtacgttttcgcttactccatcaactatttggtctttgatctacaaagtctgagcggacccgtctcagctatgctttacattggctactctctgcttatggcaattgcaatcatgctcgccactggaaccattggcttcctcacctccttttacttcgtccactatctcttttcctctgtcaaaatcgattgataccttgacgacaaaatctcagccgttgatctctgctttctctaaagcaatttcaggtgttgttatttttttgtcagtactagacttgtagagtccactatattttacatgtttttattttttcctggacctatattctccttatatgttttttttcttacatctccgcctcattatgtttttgttttgaacttttgagtagaaaataaacaaatttgcctttctgctttag

SEQ ID NO: 146723 - DNA, 613 bp, Arabidopsis thaliana landsberg
aggttgatactttggtaaaggaactaatgaagaagcagtatctgaaatctggatctgggacaaggaaggaaaaggacaaggcgaagaggtggttcttggataacggaagcatcttcttaagagaacttgtagctgattgtaacggtaaatccattcctattcgcagtttttctcctgagcagatattgaaagccaccaacaatttcgattctagctgttttgtctcgcaagatgtatactataaatggtatagaggtgaaattgaagatagatcttacatgatcaagagattctcagaggatgagattacaggaaaacgacatagagttaaagaggtttacaacgacattgtcttgtctgctcggatgagtaatcacagtaactttcttcaactttagggatgttgtctcgagtttccttttccggttcttgtgtttgaatttgcagaacatggagctatgaatcagcgagggaggtgttatagttaagggtgaagaatctttattgccgtggagtgtacggttgaagattgtgaaagagattgctaatgcggtgacttatcttcaccggcattccttagatcatcatacttgagatgttaaaccgagcatgt

SEQ ID NO: 146724 - DNA, 802 bp, Arabidopsis thaliana landsberg; identical to SEQ ID NO: 36429

SEQ ID NO: 146725 - DNA, 667 bp, Arabidopsis thaliana landsberg
ggtttagtcacactctcattctcgtttgtgtttttgattggcggagaattggtgatagataagcttcttcttccctcttctcaacttggtggatctgtcatcgatggcctctttgatgctcaacggggccattaccttccccaaaggtttaggttcccctggttccaatttgcatgccagatcgattcctcggccgaccttactctcagttacccgaacctccacacctagactctcggtggctactagatgcagcagcagcagcgtgtcgtcttcccggccatcggcgcaacctaggttcattcagcacaagaaggaggcttactggttctacaggttcttatccatcgtatacgaccatgtcatcaatcctgggcattggaccgaggatatgagagacgacgctcttgagccagcggatctcagccatccggacatgcgagtggtcgatgtcggcggcggaactggtttcactactctgggcatagtcaagacagtgaaggccaagaatgtgaccattctggaccagtcgccacatcagctggccaaagcaaagcaaaaggagccgttgaaagaatgcaagatcgtcgagggagatgctgaggatcttacttttccaaccgatatgctgacagatacgtttctgctggacaggatcctaatcttc

SEQ ID NO: 146726 - DNA, 2019 bp, Arabidopsis thaliana landsberg
  unsure (1)..(2019): unsure at all n locations
ctaataaagataaaaatgggaccaattcaacagcacaaancgatacatagcatagatctacattttcaattcgaatttcaagcgatttaacaataacaacaaactcatcattttgtgaacaaaagcttactaagagtcgattgcgtagcttttagtgttaattgtgtgtctgctttgagtgctgatttaattttatcattttttctcaggtgatttacaatgggacaacagaagaaaaagcgtggaagacaacctaaaaaagctgctgctaagaaatgcaatgatgaggtggagtatgtgggtacaattgagccaacagctgtagaacaaactgttgttccagccgaaaacattgaggaagttgaagacatcgatggagagacagaaaaagaagctgaagacatcaatggagagacagaaaaagaagctgatgaagacatcaatggagagacagaaaacgaagctgaagacattaatggagagacagaaaacgaagctgaagtgcaagcagcagaagaacctgaaggcgagcttgaattatctggagatgaagatgctgttcaacctaagaccaagaggcagcgtggaccaactaggatgaaagatattgctaaggatccaaatgccagagtgagagtggagtacaccatgatgggagagcctattggtaaaggctcagttaagttagcatcatatgcaggcgcattggtccgtgaacacgtccctatcacaattgatcgctggacaaaaataggtgaagaaatcaggacacttctctggaaatctgtccaggtaacacttcactttttattttttttgtaatatttgactatctttccttattacaacaataatcactttttctgtaattgattgaaggcaaggtttgaactagatgaggagtatcaaaaggttgcagtgcttaagcaaatgggatgtttgtggagatcctggaaatcaaggcaagtaactaagtttagagaagcaaagacaaaccagcaaaggatgaatctgagacctaaaaatgtttctccatttgagtggaaaaaatttgtgaagagcaaaactagccctgaatttaaggtatgttgagggagaagattaaactaagtatatttactatgtagaaagttactaattaacaattattgttaggttataagtgatagctacaaggagagaaggcgcaaccagattcctcacacttgtagtcgtagagggatggttagacttgcagaagatatggtaatcttatgtgcctgttaggttatgttttttattgttttgaaattttaaaacacttagcttgctactaatattggcatgttgtgtttttcagaaaactggtagtgcagacccaactgaagtgatgaggctaaaggtttgggttaagtcacggaccaagaaagatggaacaccagtgaatacaaatgcggctgaaaaaattgtgagtatgttatagtttggaagttgtgacaatttggtttgtgatgattgttaatttagtgatggtttgttaaattggataggttagtgatggaacataaattggactggtttgtgatggttttgaaatgaatgtgataggcaataggttagccagtgattgtgtggactggtttgtgattgtgtgtgatggtttgcagaaaaaggcagctgagattgttagcagtggtcctcaatcaaatgggacgaatgaagcacaagattcacttagccaactcttagggcctgacaatcctggtagactaagggtgatgggaagaaatatgaacaagaccaaactagcttgcttccaagtaaaaagcaaatgtatggctgaaatgcaacagaaacaggaccagctccagcagaaggtcaatgagttacaagaagtaattgacaagataaagaaccatgtaaacacttgtctacttatacataaagctaatcaatcggttagtacatatatttgactttgttttttttttggtatagagacaatcagctgaagttggtgaaacctcagctgccgtaggc

SEQ ID NO: 146727 - DNA, 786 bp, Arabidopsis thaliana landsberg
gacttgctgcggatgcgactcagccaggtattaaatatattcctcagagatctcaatcctacttacaatctttttgatctgactgtttttgctgattcgttgttttgatatcagatcttggtcttaccatccttccaaggaaaaggactcggaagctatcttatggaggtagtaaacaacgtggccataacagaaaacgtttacgatttgacagttgaggagccatctgaaaagttccaacacatccgcacttgcatagacataaaccgcttgcgcagtttcgatccaatcaaaccagacattgattcagctgttcagactctcacaaaaggaaagctatcaaagaaagctcagatacctcgattcaccccgcctctgaacgccattgagaaagtccgcgaatctctgaagatcaacaagaaacagttcctcaaatgctgggagattttgatataccttgctcttgatcctattgacaagtacatggaagattacacatcagtcatcacgaaccatgtgagaaccgacattctgggaaaagatatagaaactccaaagaaacaagtcgttgatgttccaagctctttcgagccagaagcatcgtttgtggttttcaagtctgtaaacggagaagaggctaataccaatgttcaagttgatgaaaacaaaccggatcattagcatcagctgaagcaacttgttgaggaaaggattcgtgagatcaagttggttgctgagaaagtctccaagagtggtcaaacgctaaaagtctgattggaatcaaaa

SEQ ID NO: 146728 - DNA, 1298 bp, Arabidopsis thaliana landsberg
gcatgaacattgccatccagcactcattcacagggacttgaaatcatccaacatcttattagatagcaatttctttgctaaggtaaacaaatcagtgattaaagtcataatgtttcaatatcatattcctttgttttttttgtctaaagctctagctttctatgaaatgtaaatttcagattttggtctaactgttgttgatgggccaaagaacaagaaccataaactttccgggacagttggctacgttgcaccagagtatcttctcaacggtaacaccctgaaataacaatctgtcaagtcttactttaaaaaaaaatcatccttaaagaaacttgttgtgtttttatgagaagcatttcttactcatcaccatactgcatgtgtttggttctataggccaattgacagaaaagagcgacgtgtatgcttttggagtagtgttattagagcttttactcgggaaaaaacctgtggagaaactagctcccggtgaatgccaatccatcatcacttgggtacatatataataaactcatacttatgtttctctaaaactcttagacttggaaccaactttgaattgtgtttttttattcttctcaggcaatgccttatctcactgatagaaccaagttaccaagcgtcatagatcctgcgattaaagatacgatggacttgaaacacctttaccaggtacgtttgagaaggatttagttgattgtgcaaagtatatagttggttttgatgagatagtatcaagagttttgatgcgagcatgtgaaatgtgtaggtagcggcagtggcgattttgtgcgtgcagccagaaccgagttatagaccgttgattacagacgtcttgcattctcttatacctttggttccaatggaacttggtggaaccttaaaaaccatcaaatgtgcttcaatggatcactgttaaacaccatagaaaaccggtgtttttttttatagaaattcggtttaatattgaccggtaggtggttttgatgtgtatattgggttagaagttgtaaccggaacattacagtatccttttgaaatgcttacttgcgcactgttgatgaactcttttctcatgtgatttctatttacgaaaaaaaatgaaaattattataagttgtaaatggtgacattagtagtaggtgtggacaagacacataactaactgcgtctccaagatgatctaaccctggttgcatagtaagttgaactataaaaaaacatgaaactttgtagataaactgacacatagtaaaaacgaagaactgagcaaa

SEQ ID NO: 146729 - DNA, 1337 bp, Arabidopsis thaliana landsberg
tcgtcttcttcttccggcttctctcgaaacccttacctaaaaccctaatccgccacatccgtgttttagcctcacgacgaatcacgatgcaacgcagactcgtaaggttaaaaaaagagtatatctacaggaaaagcttggaaggtgatgagcgtaaggtctatgagcagaagcggctgataagagaagcccttcaaggtctagtgatgattttttttttcagtatctgttgaaacaatcattgattcgatgtgtatttttcgtttttctgattttggtttatatggtttaacagaaggaaagccgattcctactgagctccgaaacgtcgaagccaagcttcgacaagaaattgatcttgaagaccaaaacacagctggtaagaatttggaagctagatttttccaattggtttgaacctgtgatatgaatggtttgtggcatcagctaatggttatcatctaatcatgttgttactagttccgcggagtcatatcgatgatgaatatgcaaatgctacggaagcagatccaaagattttgttgacaacttctaggaatccaagtgctccgctcatccgattcactaaggtattgttttgtttagtttccgtcgttgaatagatgctgacgttataatgttcctgattccttttcattgatggtgtggtttctgttgcaggaattgaagtttgtgtttcctaactctcagagaataaatcgtggtagtcaagtatgtgtgttgttctggcttctgcacttaaagtcatttggaaatatctaattctctttttttctgtaatctggttttgttttgcaattgatcattgcttgtggtttcttcatctatgttgttaaattgattgccaatggtattagctcccttttgtttcctgggtataactattgcatgtgcatagacttgtatcagattattgttgaatttatgcgcaacactggtcatatcaatgaattgcatattagatcaagctttataatttaaaaagtagttgagtctgtccaattctgcagaatctagatttcaaataaaagcaagactaatataaacgatcatttaagctggagttgtactgacacttatattcaacacaaaacctctctatgtaagtgtaacatggaaactatgttgcattcgaatcgtaatctaagtttctttcccactctgttaatttgcaggtcatttctgagatcattgaaactgctcgttcccatgattttactgatgttatattggttcatgagcaccgcggtgtgcctgatggtctcattatctctcatctcccatatggaccaactgcatactttggattacttaat

SEQ ID NO: 146730 - DNA, 727 bp, Arabidopsis thaliana landsberg
gcagcatgtgaagtgtatgcaagacacgctgaaggcttatcgtccaatctcttggaactgatttcgttaagcttaggcgtgccaaaagagcgttttcatgactacttcaaagaacaaatgagttttttcaggataaatcgttatccaccatgtccaagacctgacctagctttaggtgttggtcaccacaaagatgccaacgttattagtctattggctcaagatgatgttggaggattacaagttagtcgtagatcggacggtgtttggtttccgattagacccgtccctaatgctcttgtcatcaatataggcaattgtatggaggtaataatatccttgaacttatgtcatattcttttgttatacataacattaaaagattctttcataattaatgagtattactatatcataaatatgataatgtagatatggacgaatgacaagtattggagtgctgaacatagagtggtggtgaacacaacaagagagagatactcgataccattcttcttgttgccttcacacgatgtggaagtgaagccattagaagaacttgtgagtcctgaaaaccctccaaaatacaaaggctataaatggggtaagttctacgtcagtaggaatagaagcgattttcgaaaactggaaatcgaaaacatacaaatcgatgacttcaaaggtaaaacttaatattctatgtatcggccttttttttgtttaccaa

SEQ ID NO: 146731 - DNA, 842 bp, Arabidopsis thaliana landsberg
caagaaacatcaaaatgtcgatctttctctgtttcctcttgctcttacctctctttcttgttttttacaaaagacttttaccgtcgaaagggaagcttcctccgggacctataggtcttccgatcatcggaaacttgcaccaacttggaaaatcccttcatagatcttttcataaactctcccaagagtatggacccgtgatgtttcttcgtttcggtgtggtccctgtggttgtggtctccacaaaagaagcagctgaagaagttctcaagactcatgatctcgagacttgtacccgaccaaagctaacagcgaccaaattgtttacatacaactacaaagacattggcttcgctcaatacggtgatgactggagagagatgaggaagcttgcgatgctcgagctttttagctcgaaaaagctcaaggctttcaggtatattagagaagaagagagtgaagtcctagtcaataaactctcgaaatctgctgagacacgaactatggtagacttgagaaaagctcttttctcttataccgctagtatcgtatgtagactcgcttttggacagaacttccatgagtgcgatttcgtcgatatggataaagttgaagatcttgtgctcgaatctgagaccaatcttggctcattcgcgttcactgacttcttccccgcagggcttgggtgggttatagaccggatctctggccaacattcggagttacacaaagcctttgccagacttagtaatttctttcacatgtgatcgatgatcacttgaagcctgtgcaatctcaagatcattcagacatcattggtgtcatgttagatatgatcaata

SEQ ID NO: 146732 - DNA, 3329 bp, Arabidopsis thaliana landsberg
agataagaaagaggaggaagaaatgaactagtctgaaacacaatgatgaaccacttttagcaacacacatcaaaaacgacgaaaacagagtaaaagaagaagaaaaaaacggaggaggaacagttagcgccgtccatggcgggtcttcagagatccaccatctctttccgtcgacagggctcttcgggtatagtctgggacgatcgtctcatcgccgagctaagccaacaagcggccaacgaccggaaaggcgagactctacaacaggacgaacaggccaagctgattacgtcggaagtacaggatcagacaaccaaacctatcgccggagaaggactcaaacctatcagaactgacggaggtatggagaggagtcgatccaacggaggaggagccatccgccaccatcgaaacacagggagagtgtctccggcggtggacccgccgtcgccgagactgtcggcgtttgggtgctgctctgccttcgggaagaaacagccggggaagaaggttaatcagaggaaaaggccagcgaagcgtagatccagataggcatgaactaaagtctaaagtaaagaagaagaacacacacaaagatgagaaaacaaaacaaaacaaaaagagagtatatatacttatactgcttcttatgaatctttttctttctgtttttgtttgtgtttttttgtttgtgctttaatgttaaaactgtttaaactcagagactatatatatgtttatatttgttttgttttcgttgcagactgatcttagattttcatgtatattcttgttttattctatctctctttctttcccgagagaattccaaatatttccaagtaagattaaagcagaggatcaacaatcttcttcgtctcctatgattaatccatcgagtaattaaatttgataatcttaatgaattcaaaactgggcagctgactgcggcggctaaagtggacctgagcctgacattctgacaaattagttgcaacaacatcagattcttcattcctaggataaaggaccaatgccattttctcatctctaatttctgattacatatattttaatttttcatcagccgatacaaatccctcacggactcgcttctgtgttatgtccaaatcaagcatggcaccacagttcccacccatccactgctatttttttttccaaaaagttggagcctttgcaaaaaaaaaagtgaaaaataaaactatacaaatattttgcaaccaataataaacacttaatttatttgtttgatacgtaaataactactagtttgcgtgaggtgtgagatatagatatagtgatcatataccagtatgagaatgtttcttgaaagttggaaggtttacatagtccatccattgtaaaagttttattgggcgtaatcatatgggcttagtttagtgcaacatataataccctgattatctgggctttagcccataaccatcaaactttttttttatttctaaattagtgataaaagggtttatcacatacatttatttatttttttttttttttttttggtcaaaacacatacatttatttcatcttgcaattttctgtttgattatatgattgatcacctacattaatcaatcaataatgtatggaaaattttcaaagaatgtcattactaaatcccctgaaaactagaaactatcttgccatttttctttgtggctaaacataacgtcatttcaccataatcactacaatcaagaaaactaaatctcactctcaaggtagagaggagggaatctagatctgttgtaattctgattataaatagactctatctatattcatttgtttattctaaaatcatacataagcctaattatagtatcttgagtttaatgtctataaatccattcggttcctaaaaattaaaaatctaaattatgagttattcacgcggcggtactcttgtcactcttttgttactactactcgtagcctcctcactcgctttgaccgcaaacgcgaattcgttcgaatcgctcctccagctcccgcggagacagtcgcgctcgacccgacccagatccgaacggctcctccacgtcggcaattttggtgccaaaggcaatggcgtcaccgacgacactaaagtaacgattcgctaaaccctcgagaaacctcttttcactgtgaaatcttgaatctatgggtaggatttaggaaatcagacagcaacggtagatacttatataatttgtgtcgggtgataatggaacgcaggcgtttgcagatgcttggaagacagcttgttcttccaaagtcaaaaccagaatcttggtgcctgaaaattacacttgtctccttcggcctattgatctttctggaccttgtaaagcaagactcacactgcaggttaaaccttcccttccacaggggtatttagaatctttgtggatattttcagattgttgtctttgttctgttgtcttcattgctttctgctctcttttttggccattagatctctggtacaatcattgctcccaatgatccagatgtttgggaaggtcttaaccgccgaaaatggctatatttccatggtttgagccgcttaactgttgaaggaggcggcactgttaacgggatggggcaagaatggtgggaaagatcttgcaaacacaatcattccaacgttagttgcctcttttttctttctcaacatgttatcttcagagagtaaaagggaattctcacttttctttcaaccatttcttttgcagccttgtcgaggtgctccaacggtaagcatccaattgatttcctttattggtggtgtggttactctctattaaagtaagactatgttggttttgtaggccttaacattccacaagtgcaagaatatgagagttgaaaacctcaatgtgattgatagtcaacaaatgcacattgccttaaccagctgtcgccgtgtgaccatctctggtttaaaggtcatagctcctgctactagtcccaatactgatggaattcacataagcgtctctcgtggtatcgttatagacaacactactgtcagcacaggtcagtgtacttaaccagaacttgaatctaatatttgctctttgctgattaatcggatctgtttttcttgtataggagatgactgcatttcgatagttaaaaactctacacagatctccatcagcaacattatatgtggtcctggccatggcataaggtaaccaaagccaagacagataagaaacagactaagcataatctaatataaaataggtggtgtagcattggtagcctaataaaaccaaaacaatggggtgtag

SEQ ID NO: 146733 - DNA, 1107 bp, Arabidopsis thaliana landsberg
ctatagttttattttgatgtagtattcattattgatgtttggaaattggagtgattgcaaagatggggagtgtcgattcattgaccaatttggaagaaattattctagcatcagatggagccatggttgcaagaggagatctgggagctcagatacctcttgagcaagttccagcagctcaacagagaatcgtgcaagtctgcagagcgctgaacaaacccgtcattgtcgcttctcagctacttgagtccatgattgagtacccaactccaaccagagcagaagtagccgacgtgtctgaagcagtaagacaaagatcagatgcattgatgctctctggagaatcagctatgggacaattcccagacaaggcgctcacggttctaaggacagtcagtttaagaatcgagagatggtggagagaagagaaacgtcatgagtctgtgccgcttcaagccataggctcttcattttcagacaaaatctcagaagagatctgtaactcagctgctaaaatgggtaaatttaggttctttgttttccatagaaggcaatatgtctttagtgtctcattttactatccaaaaacttgcagctaacaatcttggagtggacgcggttttcgtttacacaacgagcggacacatggcatcgctggtctcccgatgtcgcccggactgcccgatctttgctttcacaaccacaacctcagtgagaagacgcttaaacctacaatggggacttatcccattccgtctcagcttctcagacgacatggaaagcaacttgaacaaaacattctcgttactgaaatcaagaggtatgatcaaatctggtgacctcgtgatcgcagtctcggacatgctgcaatcaatccaggtaatgaacgtcccgtaattctctctctttatacaatttcgcaatcccgcaaaagagtgttttgtttcctacttttgttactgtttttagactactcttacattagattccagaggcatcatcatcttcggtttgttaacaacagtaatgtgtaagctttgtttgtagtgagtacctgttgtttttggttttcaataatatcagtaatcttattcaaatattcgattc

SEQ ID NO: 146734 - DNA, 1072 bp, Arabidopsis thaliana landsberg
tttgtgtttcatagtatctggtgctttagtctaattcagatctgatctgagaatgatgaatcttgtttgctcctgtcaattcttctttaactgttttgcaatttgatgagctaataactgactatatctcatttccttcccatcgcagaattttttgaggtgtacaaagcattgcctatttgacgaaccaggaaatggttaaaaggtgcttatcttgttcaaatgcatatgtctttagattcttccaagtggttcgaaagttcttacattttattgttatttaacaggcatggagagttttgatttacaagatatatcatgtcgcagtgcatagacggtttcaagcatgtatgctcctcttttttccggtgttttgatatcgatatttacaaacaatctggaggccttggtgaccctgaacttcttgcgagagagacagtttgtatgctctcaacttcttttccatcttattttaacttccatgcactttttttttccagttatatgtatgattcaaaggcttgccattactctagttgatgctctctgttaagaggaatgcaaatctttctttctgtattttgatcattgactcgttcgggtgcagttagcgtgagtgaaatagaggctctctatgagctgtttaagaaaatcagcagtgctgtgattgatgatgggctaataaacaaggtatgtaggaagggcatcattatatgtcttttatgccactcacttatactcctcacgaatcatgcatattgctacgtcttttggacatccttttctgattttccttgacctgtcttgtcgttcaggaagaatttcagttagccttgttcaagacaaataaaaaagagagcttgtttgcagaccgggtatgttcttcttttttaatcaaaagactttgttatccatttgccaagatcctttttgaaagataacttgacagtaccaatcacaggtattcgatttgtttgacacaaagcataatggaatactgtggtttgaggagtttgcgcgcgctctctctggcttttattcatatgctcccattgatgacatgattgactgt

SEQ ID NO: 146735 - DNA, 1159 bp, Arabidopsis thaliana landsberg
cataagcgaatataatcttttaatgtgcaggttgatcttcttagtcgattacaatgcccatatttggtggaattacgtggatattgtgcagatcaaaaccataggatcctgatatatgaatttatgcctaatggtactgtggaacatcatctccacgatcataattttaagaatctaaaggatcgacctcaaccattagattggggaactcggcttaggatcgcccttgattgcgccagagccctagagtttcttcatgagaatacaatctctactgttatccaccggaacttgaagtgtaccaacattttgttggatcaaaataatcgagctaaagtttcagatttcggattagccaaaaccggatccgataaactaaacggtgagatttcaacaagggttattggcaccacaggatatcttgctccagagtaagtaacacttcacataattgtttcatatttttgcaaaacaatttcttttacaaaatattagcaaagtgtgttgatccattagtggttgttgactatcaatagtgtgtcacttttgaatttaaaagatggattatgatcagtcaattgctcttaacataaccatttaaaaacttattgggattgagataggtatgcctctactggaaagcttactacaaaatcagatgtttatagttatggtattgtgttactacaactcttaacgggtcgcacaccgatcgattcaagacgtccacggggacaagatgtccttgtctcttgggtaagtataccgtaatttattttcagtaacatattatcaatttgaactactcaataaacctccacgagaacatgtgcacttgtctacacttgtttagaagtacttatatagctagtaattaattgtcaaactgtggtataaattttcaggctcttccaagactaaccaatagagagaaaattagtgaaatggtggatccaaccatgaaaggtcaatactcacaaaaagatcttattcaggtctgacttcattacttctttctatctttcctttgcaatgtggagtgttgggttttcccttagtacattcctatatgacaaagaaagaagcgtttaatgtggttaacttggaaacatagtggatgtggcttcgcaaccatagactatctacctttgtgtttgat

SEQ ID NO: 146736 - DNA, 813 bp, Arabidopsis thaliana landsberg
aggatgtttttgggaattataacaaagccagagaagcaatgggactatcatattcatcaaacccaacacagttagataacgaccagaagaaaccttctcctgcaactgcagcggctgcgacaaggccacagcctccggagctagctctgaggtgtccacgttgcgactcaacaaacacaaagttttgttactacaacaactacagtctcactcagcctcgctacttctgcaaatcatgccggagatattggactaaaggtggaactctaaggaacatccccgtgggtggaggctgccggaaaaacaaacgatccacatcttcggctgcaagaagcctcagaaccactccagaaccggcgtcccacgacgggaaagtcttctcggcggcaggttttaatgggtatagtaacaatgaacatattgatctgagcttagcctttgccttgctgaacaaacaacatccggggagttcttcacagctagggtttcattcagaactcggtagctctcatcagtctgacatggaaggtatgtttgggacaagccaacaaaaagagaacgctacttatgcgtttggtaacgggagcagcggtttgggtgatccaagcagagtcttatggggatttccatggcagatgaatggagagagctttggaatgatgaacataggaggaggtggtggtcatgtagatcagattgattcagggagagagatgtggaccaatatgaactacattaactctggcgctttaatgtagttcaaaattaaaaacacaaaattatttgggttttgatttagggtttgaatttcat

SEQ ID NO: 146737 - DNA, 575 bp, Arabidopsis thaliana landsberg
  unsure (1)..(575): unsure at all n locations
ttgatcattggatctttgatgatnantgtgtgttgcaagttcccagaanctttagattatgaaagagctagaaagaggtgagaaaggaattgnagatgggacagtgagttatggaatggatgatgctgatgatattttgatgcaatcttggactggtaccattcttggtcctcataatgttagttttcttcttctcaatctatctcttcatcttttgtttaacttaaatgataatatctatggtagatttgaataaagatgcattttttaatgctaaagcaagaacctttccaaatgtttaacttaaaagatgcaattttttgctacttgtttgtcactataattcgagggtttaatttaacttcaaatgatccttagctgagtttagtaaccttatgtagcattttaaaaccaattttggtgaatgagaagagacaaaaagggaaatgaattgaagtatttgtttccacttttggtatttgagaaccaagacccatgtttttgttatcagactgcgtatgaaaggaaaatctttcagctgaagctattctgtgaaaggattatccggagagtcc

SEQ ID NO: 146738 - DNA, 379 bp, Arabidopsis thaliana landsberg; identical to SEQ ID NO: 61420

SEQ ID NO: 146739 - DNA, 860 bp, Arabidopsis thaliana landsberg
cctttgttcttcttcatctttattacacattttcttcaaggtaacaaataatctttttaagtcacttttatactctttaaatcttagattgatatatgaatgcatgttaatatttcaagatttataggtctaccaaacgatgtcggttttcgaatcggagacttcaaacttccacgtctacaacaaccacgaaatccaaacgcaaccgcaaatgcaaacgtttctgtcggaggaggaaccggtagggagacagaactcgattttgtcactaactcttgacgaaattcagatgaaaagcggtaagagctttggagcgatgaacatggacgagttcctagcgaacttgtggacaaccgttgaagaaaacgacaacgaaggaggtggggctcacaacgacggagagaagccggcggtgctgccacgtcaagggtcgttgtccctccctgtgcctttatgcaagaaaacggtcgacgaggtttggctcgagatacaaaacggtgtacaacaacatccaccgtcgtcgaattccggtcaaaactccgacgaaaatattcgccggcaacaaacccttggtgagatcactctcgaggattttcttgttaaggctggtgttgtacaagaaccgttgaagacaacgatgaggatgtcgagttctgattttggttataaccccgagtttggagttggtttacattgtcagaaccaaaacaattatggtgataatcggtcggtttatagtgaaaaccgaccgttttactcggttttgggagaatcttcaagctgtatgaccgggaatgggaggagtaatcagtatctgaccggtttagatgcttttcggatcaagaaacggataattgatg

SEQ ID NO: 146740 - DNA, 2228 bp, Arabidopsis thaliana landsberg
tcttacttagcgacagatacgtttagcttgatcaatgaatcaactccagagtattacaaagcagcccgtctcgcttcacaatcactcaagtactatggactatgcatgagaagaggaagttacaaagttcagctctattttgcagagataatgttctcaaatgatcagacttatagtagcttagggcggcgactattcgacatttatgttcaagtgagttttgcagaacaaacaagaaagtttcggttttcctatatcactaagtaaatttgattttggattctctcgtgcaggggattttgttggagagggactttaacatagcacagagagcaggtggagttggtaaaccgttcctaaggcaagttgatgaagttcaagtgaatggaagtacgttggagattcatttgaagtggacaggaaaaggcacaaacgtaataccaacaagaggtgtttacgggcctctcatatccgctataaccgtcacaccgagtgagttttccgtccaatctttctcaactgttcaaaataattttggactgagtggatgaatgaatgatctttattgcctgctgttatagatttcaaggttgataccggaaaaccattgtccaatggagtagttgcaggcattgtaatcgcagcgtgtgtagctttcgggttgctggtacttgtaatcctcaggctaacaggttacttaggtggaaaagaagtggatgaaaatggtaacaaagaaaacatcattctcttgttcaaaaatgctctttgtcattttcaagacctgattgtttcttactttcttgtttgatcagaagagcttcggggactcgatttgcagacaggatcgttcacattgaagcaaatcaaacgtgctactaacaactttgatccagaaaacaagattggagaaggaggatttggaccggtttataaggtgatgattgctttggctttacaccttcataagttctgtaagattggattataagtattgatgtgtttttgttattagggtgttctcgctgatgggatgaccatagcggtgaagttgttttcatcgaaatctaagcaaggaaaccgagaatttgtgactgagatcggtatgatatctgcgttgcaacaccctaatcttgtgaaactttatggttgttgcatcgaagggaaagagcttttgcttgtgtatgaatacttagagaacaacagtctcgctcgcgcactctttggttagttttttctatccatctaagataggcaggccgaagttcttgatcttcaagctaaagtctcttggatttaacaggcacagagaaacaaagacttcacttggattggtcaacaagaaacaagatttgcatagggattgcgaaaggattggcctatctacacgaagaaatcaaggctgaagattgttcatagagacataaaagcgacaaatgtgcttcttgatctgtctctaaacgctaagatctctgattttggtctagctaaactcaacgatgacgagaatacacatatcagcacaaggattgcaggaacaatgtgagtgttccttacttatcttttctaaaattcttagcgagcggttaacacttatcgacttgataaatcattgatgcagaggttacatggctcctgagtatgcaatgagaggttacttgacagacaaggcagatgtttacagctttggtgttgtctgtttagagattgttagtggaaagagcaacacaaattacagaccaaaagaagagtttatttaccttcttgactgggcatatgtcttgcaagaacaagggagtcttctagaactcgtggatccagatctcggtacaagcttttcgaagaaagaagcaatgaggatgttgaacatagctttactctgtacaaacccatcttcaacattgagaccaccgatgtcatctgttgtaagtatgctacaaggaaaaatcaaagtccaaccaccactggtgaaacgtgaagctgatccaagtggttcagccgcaatgaggtttaaggccttagagcatttgtcacaagacagcgagtcacaagtctcaacctatacaagaaacaaagaacacaaaagctcctcctcgatggacggtccttgggtcgattcttccttctctgatccgagcaaagatgttagcctattacagcaagaagaaggaaattcatcatcttcgtcgaggagactgttagatgatcttactgatgtggagattgagtaa

SEQ ID NO: 146741 - DNA, 867 bp, Arabidopsis thaliana landsberg
aggtacctgacactagatgaggcagataggttggttgatttgggtttcgaagatgacataagggaagtctttgaccactttaagtctcaacgtcaaacactattgttctctgccacaatgcccacaaagattcaaatctttgccagaagtgctctggtgaaacctgtgacagttaatgtaggaagagctggagctgcgaatctggatgtgatccaggaggtagaatacgtcaaacaagaagcaaagattgtttacctcctcgagtgtctacagaaaacctctccgccggttttgatattctgtgagaacaaagctgatgttgatgatattcacgagtacttgttactgaaaggagtggaagcagtggccatccatggaggaaaagatcaagaagacagagagtacgcaatctcttcgtttaaagatgggaaaaaagatgtgttggttgcgactgatgttgcttcaaagggtctagatttccctgatatacaacacgtaatcaactacgacatgccagcagagattgagaactatgtgcataggataggacgaacaggtcggtgtggtaaaactgggatagcaacgacgtttataaacaagaatcaaagcgaaaccactctgctggatttgaaacacttgttgcaagaagctaaacagaggattccacctgtccttgctgagctgaatgatccaatggaagaagcagagaccattgctaatgcaagtggtgtcaagggttgtgcctattgtggtggtcttggacatcgtatccgagactgtccaaaacttgagcaccagaagagtgtcgccatttctaactcaagaaaagattattttggctcgggtggctacagaggagacatataa

SEQ ID NO: 146742 - DNA, 885 bp, Arabidopsis thaliana landsberg; identical to SEQ ID NO: 11420

SEQ ID NO: 146743 - DNA, 1197 bp, Arabidopsis thaliana landsberg
acttctaactggagcggtcctaatgtttgtaactactcaggtttgttttgtgcaccggctctagatagcccttatgtcttaaccgtcgctggtatagacttgaaccatgctaatatcgccggttatctccctttagagcttggtctcttaaccgatcttgccttgttccatatcaattccaaccgttttcaaggtcaacttcccaaaactctaaaatgtctccatcttctccatgagcttgacgtcagcaacaataaactctccggcgagtttccttccgtaatcttctctttgccttccttgaagtttctcgacattaggttcaatgagttccaaggtgatgttcctagccaactctttgacctaaacctcgacgctctcttcattaacgacaacaaattccagtttaggttaccgagaaacatcggaaactctccggtttctgttcttgtcttggccaacaacgatctccaaggatcttgtgtacctccaagtttctacaaaatggggaaaacattacacgaaatcattatcacgaactcacaactaaccggttgtttaaaccgggaaatcggtttgcttaaccagttgacggttttcgacgtgagttacaacaacttggtgggttcgttgccggagactataggtgatatgaagagtttagagcagttaaacattgcgcataacaaattctccggctacattccggagagtatctgccgattaccacggctcgagaacttcacttactcgtataacttcttctccggtgagccaccggcttgtttgaggcttcaagagtttgatgatcgtagaaattgtttaccttcaaggccaatgcaacggtctctcgctgaatgcaaatccttttcttcttatcctattgattgtgcatcctttggctgctctccacctagtccaccgcctcctcctcctcctcctccacctccacctccacctccacctccacctccacctccacctccacctccaccaccgccaccatatgtgtatccttcgccgccgccaccacctccatcacctccaccatacgtgtatccaccgccaccaccaccatatgtgtatcctccaccgccatcaccaccatatgtgtatcctccgccaccaccatcaccgcaaccatatatgtatccttcacctccttgtaacgatcttccaacgccggtgcattactaa

SEQ ID NO: 146744 - DNA, 2090 bp, Arabidopsis thaliana landsberg
gaaagttttgagtaaaattcctgattttgttttattcgcagcatccttttgttatgggaaaacacaaggagtctgcttctactgatcttggttctgtcctggtgggtggatgttaaccgtcttatgaatatcatataactttttcttgaagccatcttgataaaattatttttgttattttccagaacaatcttagcactccactaccgttacagataaataacaccaagagcacgtaagttctgaatatctggctgaaaccaaaatttctaagattattttgtgggtttatgaaagattttgatggtttattgtctgtttcctttgtttcagtccagattctacttgcgacgatgtaggtgacatgtgtaactttggcagtttgaattattcacttgtagatcctgtgaaatcaatccaaaacaaaaatttatggcaacaaaatgataatggaggtgatgaagacgatatgtgtttgatagatgatgagaatttcttgacatttgacggagaaatgagttctacccttgaaaaagattgtcatctgaagaaggtagcatacatatgatttctcatttagaattccaatggctgatcaagtctcaactcttgtttggatcatgtttcaatttgttttgtcagcattacttatctaatctatgtgaacagaggtgtgatcacatcagtgagatgtccaatgctttgaagtccagattttacgaaagtcctggtaatggagagataagagtcgacaatgagcatggagtgtgccctaccttcatacccagagcatcatgatgagctgaccgagtcaaaaattaaagctttcttagatgagaaggtccctcatgcacattatactacattattcattgtcctcactgcattttctacgtaaatcactaacatggcagtgaatatgtatttgtctcatgctgcagatctaaagaagttacagactcctctctatgaagaattctacaatagtttgatcacattctctcccagttgtatggagagtaatttaagtaacagtaaaagagaggacactgctcgtggtttcctgaaactgcctccaaaaagcaggtcaccgagtcggggccctcttggtggttcaccttcaagagcaacagacgcaactagttgttccaagagcccaggaagtggaggtagtcgtgaattgaatattaacaatggaggtgatgaagcttcacaggatggtgtatcagcacgggtcacagactggaggggtctcgttgttgacactgagcaggaattaagccagtggttagtggctgcgataattgggatttaagttttaaggatttagacatttccttaatttcctcttttagaaactcggtaggaatcaagaagacagaaataagtcccattcatgcttatcttaagctatgatcacccaactccaaacgtgtagagtttaaattcagcctagctattgaccagcaacgatttaaatctgtcacttagtctaggcttcttgtttcattcctgaatctgcttgaattggctggttttggctttgcagtgttgctttgtcagagatagagaagaagtggaaggaagagcttgatcaagaactggaaagaaagcgacaaggtatgtcactcttattaatctagcaaaaaaatgtcaaagattctctttaagttttacatatttagaatttagaattcggcgctttgcattgaccaactgtaacatgcaatcatgtaatgttgagaaacatgacattgtagcatccactttttgtaagcttggtaagttgacttgtggtttatgttattgcagaaataatgcgcccagcagggttgggatcattcccaagagacaaaggcatgagccgacaaagagagaagtcgaggtttgcatcaaccaggaaaatgacttgcacagaaaggctccggctttttgatttttgattgctcaactagtatatatatctgtaactcttatcttgctgtgatgaaaagtagacacgaggtttggtctgaatatatgattctgaactggttgttgaaggtattagatgtgtgtaatgtgagtgtcgggtgcatatttaagtgcgc

SEQ ID NO: 146745 - DNA, 578 bp, Arabidopsis thaliana landsberg
  unsure (1)..(578): unsure at all n locations
tatagttacataatgtggatcacntgtggcaagnaggatagtggagaacagaaaatgtattttatgaggctaccttctgttcctttggcatcaacaccaccagaaaaccttgaaacaaggccaaatatcaaaggccccgttgagaagaagactgttgatttaaaagccttgccagaaggttacatgggcaaactgttagtctacaaaagtggtgctgtcaagatgaaacttggggaagtgctttatgatgtgagtgattctttttccgtttactaagtattctatgaccatagatcctgcaatatggtttttaccgggcataatactagctaatatctagtaggggtgttcaatccatgtttttggttttacgggtttggttcggatacagaaaaagtgaaaccattttaatcgtagtaaaagtctaactcggatttgtgatgggatgttgtaggtaagcccagggttgaagagcgagtttgcacaagatgtgatggtggttaacacagagcagaagaactgttgtcaggttgaagatgtgtacaagcatgcagttttgactcctgatattgattcaa

SEQ ID NO: 146746 - DNA, 2114 bp, Arabidopsis thaliana landsberg
  unsure (1)..(2114): unsure at all n locations
atgttcgagaaaaagctacaagtcatcatcgagaaggtaatcaataattatcaaggagattactaaaggctattgagaatgtcattacttgtcgagaatctttgtaggattgacaaagaagtaataagtactaacgttaatatcttttttttttatataattttgagaaataaggagagtatatcaagataaaacagaccatctgtttttagcttaaattagatgaattaggactaagcaaaaaacctgggatcgattatccgaactgaaacagatccaaaaaattagaccgaaaaccaaacctgaactcgaagattttttttatttgatcctaaattcctctatccgaaaaacccgaatccaaacatgatccgaacctgaatctaaatatccaaatattttatttaaaatctaaattttacgtaaaaccccaaattttacccaaaaaatcgggtatcaatcccaaaaaagggcttaaaaattcatacccaaaccgatattttggatttattctattaaatcctaaattttcctacctaaaaaatttatacttgattgagtttaccgaacccgaacccgacccgcttctctgaatgaccacctttaatattttgatgaacttattttgctttataaaaaaaacaggaaaaaaagagtacgtcaaaacctcaaagaagagaaaatgacgaatctttttcttaaaggatgaggcaattgtatcaagatacgaggacgaggttggtttgtttaacattatcccaaacaaagtttactgcctaacccgtcactgccacgtgtcatccggatctccttttggcttcgtctgaagacgttcgatgctcaccggtcgcgtctttatcctctcatcatcatcctcgaaacgtgcaacacacaaaaaattgactataaaagattgcaaatttctctctaaatatctgattcaaacgcatttggtaggctgagagaaagaaagaaaaagataaagatggatcacgcagcagatgctcaccgtacggatttgatgaccattacaagattcgtgttgaatgaacaatcaaagtatccagaatctcgtggtgatttcaccattttgcttagtcacatcgttttgggttgcanattcgtttcaagtgctgttaataaggtaaaaagtttcgatctttagatgattttttgggtcagtgctttaaaaaaagatgtcgctttcgatntatgttgggtaaaaggtttgatttttatgggttgttgatgaatgatgatctggaaattctctttttctagatatgtggagttgtctcaatcgtctttagtgttatttaggatggcccattgagaaagttgtaatctttatggttgtttgttgcaggctggtttggctaagttaattggacttgcaggggaaacaaacattcaggcaagttttgtgtgtttcttcttcttgttattttggtgtctctgagattccattttttgtggtattagggtgaagagcaaaagaaacttgatgtgctctctaatgatgtctttgtcaacgctttggttagcagtggtagaactgtaagtgtttatgaagttgaaatgatatagggatgttttcattttgtgtctcctcactgtttttggctattgaaactttgtggtagtctgttcttgtctcggaggaagatgaggaagctacgtttgtggagccatccaagcgtggaaagtaagtttagaagtgatctctcattgatttagcttatgaaaatgttattgtttagcgtaatctgattattttttgttacctataggtactgtgttgtttttgatccgcttgatggatcttcaaacattgactgtggtgtttccattggcacagtatgtttcattatctaacccaagttttccttttttttaacattgaaagagggcttggatagtgaatcatgtgaaaaagtttgtcgttttgtgtttggtttcattgtgtgtagatttttggaatttacacgttggaccacactgatgagccaaccactgcagatgttctgaaacctgggaatgaaccggtgcctgcaggttattgtatgtacggaagaacctgaatggtactgaaaatgagattcccaaaggcaaca

SEQ ID NO: 146747 - DNA, 610 bp, Arabidopsis thaliana landsberg
atgacgacaatttccgatctatcagatgattttgtaggtgatattctttctagggttccatttacatctctaatctcagtgcgatctacttgtaaaaagtggaatgctttatcgaaaaatcagatctttggtagaaaaacagcagcaaggaatcagtttctagagttcatgattctagattctagagtttgttccttgagattagatcttcaaggaatccgtaacgaagacaaagaagacttcgttgatccatctatgaagctaataagtatacctagtaatgatgatcaagtcgagatatctcaagtctatcattgcgatggcttattgttatgcatcgccaaagagaactcgagtgtctttgtgtggaatccgtatttggggcaaacgaaatggattcgaccaagaaacacattccacagatatgacaggtttgctcttggatacgacaacaaccgtaaccacaaaatcttgaggtttctctatgatgaagagagcaacgaaagcagtcgaagaactcacattgatgtatacgattttagctctaattcatggagggttcttgatgtcaatcctgactgtgatacaccgttttatcagaacggagtgt

SEQ ID NO: 146748 - DNA, 2084 bp, Arabidopsis thaliana landsberg
  unsure (1)..(2084): unsure at all n locations
caggcaatgcatgcacggtccatgcttcacctcctagaggaaacacttgaaaatgttcacctcaactcctccgccagtccgccaccgttcacggcggttgatcttggctgatcatccggcgcaaatactgtccacataatcgatttcatagtcaaacatatctctaagaggtttgatgctgccggaatcgaccctccggagttcacagctttcttctccgatctcccaagcaacgacttcaacacgcttttccagcttcttccaccacttgtctctaacacttgcatggaggagtgtcttgctgccgacgggaaccgctcctacttcgtcgctggtgttcccggatcgttttaccggcgactttttccagcgagaaccattgactttttccactctgccttctccttgcattggctctctcaggtacacactctctacgtaacgttgtaaagtatgcttggtcactttattacacgtgtcaagtgtcatggtgcttggtttttctgcttcaaagcaacatttatttttatactttgtgaactcgtaatttttttttaagctttaaattttttaaatttcatttttaaaccaaaataaacaacttgtaatattttttttcaaactagtattaaccaaaatatcaagtaaccaatatgcactgtgatgatatatatattaataagtggaaaatgtggtaggtgccggaaagtgtgacggataggagatcggcggcgtacaatagagggagnnnnnnnnnnnnnnnnnnnnnnnagaagacaacaacggcatacaaacggcagtttcaggccgacttagcggagtttttaagggcaagagcggcggaggtgaagagaggtggggccatgttcctggtttgtctcggtcgtacctctctggatcccaccgaccagggtggtgccggtctactcttcggcacccattttcaggacgcttgggacgaccttgtccgcgaggtacaaccttaattaattttactcgttattcgtcccctaagtaattaattaatcttataactctaaatcattaaccttgagctctaaatttatactactattaacccttgcccttttcgcttttatgaattaactgctagaaatgaggaaatataacttatttataactctaggatagatatctacatttgacccaaattggaaatgtcgctaaccttttagctttctctaagaaaataaaccattttctaagaaaactacagcataaaccagaatatacaaacttttactcgtaaagtcatcaaacctagtaggctagtacacttttacattgacactcgtattcaatgtaatccacaatttcttgaaattaagcttttcttaacaagactctatatatttttagaaatcaaacctatagtaacaacaggcccggctcttgggaggtgttgagtgtgctagtgcaccgggtcccacttctttattcagttttttctttatattttagagtcaaaattttcaaataattgcaaaatagggtctagtgtttaaatatttagagttttaggtaaagaaatttggagcataacacaaggtccaataatttattgggccggccctgtttgtatcgctctcgtttcactctctaattttcatgtatgtcaaatagtttacatttttttccattataaatcatcattagttaccaatattctatgtagttttaaaatcctttattctcttgttatatacatgcaatattttcaaagctgacaaaccattgacaaatcctataacatgaagaaagacaggaaaacaacaatgcaaaacaattgaaaatcattttatctgtacagacgatcaagagttaataatctataccatcgaaggctgttggaggaactgtctcacaacctaattaaccaaacacctcctttccaaagatttaagaaatttggagagcaattatagtatataccaaaattttccattataatataaatagtaagtattcatgtgacctcaataaaaaaaaaaaaaaaaaatctgcctacattaaattataccatagtatacaaattctcaagagcacattaaattataccatag

SEQ ID NO: 146749 - DNA, 446 bp, Arabidopsis thaliana landsberg
tgcatggagtgctactggaatgccacggcggcgggaacgagacgagcggcagcggcgggggagatgggtacacgagggacatgaacttcgacgcaaacatggtgatcatacttgcggctcttctctgcgcgctgatactagcgcttgggctgaattcgattctccggtgcgcgatgcgatgcggtttcgggttatcatcctctgcggcggcggggacggtggccgacagagctggattaaagaagagagaactgaagaagtttccagtagctgagtacgggtcgggggaagtgaagatagcggcgacggagtgcgcaatctgtctgggggaattcgcggacggcgagagagtgcgagtactgccgccgtgtaatcacagtttccacatgtcatgcatcgacacgtggcttgtctctcactcttcatgtcccaattgtcggcattca

SEQ ID NO: 146750 - DNA, 1366 bp, Arabidopsis thaliana landsberg
  unsure (1)..(1366): unsure at all n locations
gttttcttttcctgcaatggaacaattaaaggttttacctttgctctttctttcatgggttatgttcttacaaagcactcatcaactgccgaactctcagactcaggtcctgtatcagctcaggaagcatctggaattccctaaagctctggaatcttggggaaattactatggagacttatgtcaaatccctgcaactgctcacatgagcatcacctgtcaaggtaattccatcacggagcttaaagtcatgggggacaagctttttaaaccatttggtatgtttgatgggtcttcacttccaaatcacactctgtctgaagcattcataattgattcttttgttaccacattgacaaggcttacaagcttgagggttcttagcttagtgtctctaggtatctatggtgagttcccagggaaaatccatcggttgaattctcttgagtacttggatttgagttcaaattttctgtttggctctgtccctcctgatatttccagattggttatgcttcaaagtctgatgcttgatggaaattacttcaacggtagtgttccagacacgttggattccttgaccaatcttactgttcttagtttaaagaacaatcggttcaaaggtccatttccttcttcaatttgcagaattggaagactgacaaatcttgctctatcacacaatgagatttctggtaaaatgcctgatctcagcangttaagtcatctgcatatgctggatctgagagaataccactgggatttctgactacctgtcatgcctataagattagttactgttctcctgagcaagaactccttctcaggcgaaattccaagacgttttggcggtttgtctcagcttcagcatcttgacttgtcgttcaatcatctgactggaactccatctcggttcttgttctctttgccaaacattagttacttggatttggcatctaacaagctcagtgggaagctacctcttaatctgacctgtggaggcaaactcggatttgtggatttgtcgaataacagattgattgggactcctccccgttgcttggcaggagcttccggcgagcgagttgttaaacttggtggaaactgcttgtccataattggcagtcatgatcagcatcaagaattcttatgcgaagaggctgaaactgagggaaaacagttccaaggaagaaaggttgggattttgattgctgtcattggtggagctgttcttgttcttgtgttttttgtattagtcatcctcctcctgttatgcacaaaccgctgctctagctgttgttcaagagaaaagtcagtgccgcaaactcggcttaaggttgtgacagataactcacacaccagtcta

SEQ ID NO: 146751 - DNA, 590 bp, Arabidopsis thaliana landsberg
ctcaggggtttaacttttgaggggtttttttatcccatttccgcaatcatggaagtctttgggaaagctaacaggtacatcaccagccatttcacctttccttcactaacacctcttcttcaacattccccaaaaacctcttcaaatcctcaattcaaccaatttcatctctcaaatccgcttcaattaaagcttcgtcctccaaatttcaaaactctatcacccctctcccaaagtccacacctttccgtctcttcaaatccacatgcatcactctaacaaccgccgcggctctgcttttggcgaatctccatctcaaatcgccggcgattgcagctcccatcgcgcctccgccgtcagttgaaagcaaagaaaacgttaccttggaagaagaagagagagcgcttgatgagcatttgattactcacccttctgatgtcgacgctcttcgttcattgatggaggtaaagatcaaatctcgaaagcttacagaagcagtagaagtgatcgatcgtttgataaaattggaacctgaagaaaaagaatggccagttttgaaagctaacatctttacctacagtggagatcta

SEQ ID NO: 146752 - DNA, 925 bp, Arabidopsis thaliana landsberg
gtaactgttcttgatcttttgttggattcatgaccaaaagttaccagttaaaaacatagtgtttctcgaaaactcggaatccttttttatctgtgtggttgaatgtttcctagattatgacatcctcctctttttctgtgttggttttcttatgaacagtatgggagcttttctgcttagtgctggaaccaaaggtagtctcttaatcctttcaatcattagtaaaaatcttttagtgaagtcttatgaatttcatttttctgatgtgagtcatgctttattcgtaaaactgtaggaaaaagatacagtctaccaaactcaaggataatgatccatcagccgcttggtggagctcaaggtggccaaaccgacattgacattcaggtcattcatcctcgcctttatatttcggtttttaatcccagtcatcttcttaagttcttggagcgactagattgatttgaatatcagatgattttgaaacctaaccacacaagttcatggtctgaaaccaggcaaatgaaatgctgcatcacaaggcaaacctaaacggttacctcgcataccacactggtcaaagcctggagaagataaaccaggacacagaccgtgatttcttcatgagtgccaaagaagcaaaagagtatggacttatcgacggtgttatcatgaaccctcttaaagctctccagccacttgcagcagcttaatcgcctaaaggtagtggttcagctttagcacttgttcttttttgggcctttgatgaactgagattttccatgaaatatgtttctattctacaaggaaaatcagatttgtttgggatcaaactctgtagttgatacatacatgaagaccaaagtaaagtttcttactgtgctgtttgattgaacaacctatgatcttttaatttgttttactgaat

SEQ ID NO: 146753 - DNA, 1504 bp, Arabidopsis thaliana landsberg
gtcataacagagtaagagtttgtatgtaacaaatttcaacaaaaagaagagaaaaacaatgggagagaaagcgaaagcaaatgtgttagtcttctcatttccgatacaaggtcacataaaccctctcctccaattctcaaaacgcctactctctaaaaacgtcaacgtcacattcctcaccacttcctccacccacaactccatcctccgccgtgccatcaccggcggggccactgctcttcctctctcttttgtccccattgacgatggattcgaggaagatcacccatctacggacacatctcccgactacttcgcaaagttccaagaaaacgtatctcgaagcctctcagagcttatctcctcgatggacccaaaaccaaacgccgtcgtttacgactcgtgcctgccttatgtcctcgacgtttgccggaaacatcctggcgttgctgcggcgtcgtttttcactcagtcctccaccgtgaacgcgacctatattcatttcttgcgtggagagtttaaggagtttcaaaatgatgtcgttttgcctgcaatgcctccgctgaagggtaatgacttaccggtgtttctgtacgataacaatctctgccggccgttgtttgagctcattagtagccagttcgtgaatgttgacgacattgacttcttcttggttaactctttcgacgaactcgaagtcgaggtaattctcaactttagagttttgttgtttattgtatttttcttaattatctgcaaaatgcaatccaaataaaaatatttggaggtgatataattgtggatgatatatactactatcttactgaaccaattagtatatgatgtgaaataagtccttattccaatatagttgtagctagacttgtagctttataggttagtggtgaaattttttttaattcgatgttggtacataataatagcaaaaagatattagatagaaaacgcatcattatttcaacggacaaaaagaacatcattcttcttggggcccaaagatatagatatatcgattggggcgaaaatcccaaggtgcagattacttataatatatcttatgcaattggttggggtattaatttaacgtggcaaatatgtagccagaaaacgaatatcgtctcaaatatacatacgtgtcacgcttccattgaaagcatacatactggctaggcatgtggggatgtgtccctgaccaaattgagattttgcacaacaatttgatttattttttaattctagtttcattagtttagttttatcctttattcttttggtttaattcattagtttatttcatatttttattaacgatgtttgcattttcgcaaattactgtataaatgtgacatttgtttttaaaaatacttgctaaattgctttaatgcgtgtattaaagggaatgatactttaaaaaaaaaaatttattacttccactggtccctattcatctaatgttcttgaagtcctttctggagcctgaaat

SEQ ID NO: 146754 - DNA, 1190 bp, Arabidopsis thaliana landsberg
gatattttctttggtgttcccctgcttatctttatgaatcatataggcttctttctgtggttcttcctgattctcaaattcttattgtagttctccctctacagttgcttctgggacaactgagtttgtggagaaaggaacagataatgtagtctttagcacatgtgatgaagaaaaaagtagggttgtttttcagatgggaacttctgatgctgttagggctctaaaggcttctgagattgtgtaagtttagtcatcttttttttaactgaggttgaaaagagtcaacgttacttgtgttttacaaaatttgaaactgaatttctttgtgtcatcgattaggtgtaatgacgttgcaactattgatattaatatgggttgccccaaggcattctctatccaaggtggaatgggtgctgctttgttaagtaaacccgagctaattcatgatgtatgactctgtgaattcttagttatatgtttgtttcttactgatctattttaattgttcacctcatatggtatcttctccatcccagattttggcaacacttaagaggaacttagacgtaccggttacttgcaagattcgtctattaaaatcaccagcagatactgttgaattggctaggagaatcgagaaacttggtgtaccagctcttgctgtacatgggaggtaatatacaccactgttgttagtttgttctcattcctttaagctgttttaatcaaagttggtaattgattcctccttccttaaaatacaggaaaattgcagacaggccaagagatcctgctaaatgggatgagattgcagatgtggtggcagcattatccattcccgtcattgcaaatggcgatgttttagaatatgatgatttttctcgcattaaaaccgcaacaggtacacatgatacacttattgaattcagattcatgagacttgcaaatatagccctacaacattttttatctgccatgtgctaatgtttatacttgattcacctctgatttatataaccctttactgtttgctgttttttttggttcccataaaggcgctgcatcagttatggttgcaagaggagctatgtggaatgcttcaattttctctccaaaaggaaaatcacactgggaagatgtgaaaaagaaataccttagaaaggtaaaaacgaaaacccttttcaaga

SEQ ID NO: 146755 - DNA, 712 bp, Arabidopsis thaliana landsberg; identical to SEQ ID NO: 32273

SEQ ID NO: 146756 - DNA, 743 bp, Arabidopsis thaliana landsberg; identical to SEQ ID NO: 12867

SEQ ID NO: 146757 - DNA, 2500 bp, Arabidopsis thaliana landsberg; identical to SEQ ID NO: 39307

SEQ ID NO: 146758 - DNA, 1287 bp, Arabidopsis thaliana landsberg
atgggcagatcgccatgttgtgataaggccgggttgaagaaagggccttggactccagaagaggatcagaaacttttggcttatattgaagaacatggccatggaagctggcgttctttgcctgagaaagccggtaacttgctcgctcttttctcttcaacaaaaccacacattttcttctagctctatccaaagctttgcttcaaactccttataggtctccaaaggtgtggaaagagttgcagactcagatggactaactacctaagacctgacatcaagagaggcaaattcactgtacaagaagaacaaaccatcattcaactccacgctctcctcggaaacaggtgactcaatcacaatctctgctttcaaaccaaataaccaagtgattgctttgaaagcaaattgatcgtcgtcctttaaatgtcataggtggtcagcgattgcaactcatttaccaaagaggacagacaacgagatcaagaactactggaacacacacttgaagaaacgtctgatcaaaatggggatagatccagtgactcacaagcacaaaaacgagactctttcgtcttccacaggacaatcaaagaacgcagccacgcttagtcatatggctcaatgggagagtgcaagactcgaagctgaagcaaggctagctagagaatcaaagcttctccatttacagcattaccaaaacaataacaaccttaacaaatcagcagctcctcaacaacattgcttcactcaaaaaacatcaacaaactggactaaaccaaaccaaggtaagggacacatcgtcttaaaaaaaactctcaactttgattggttttggtaacgtatcaatggaaaattgtgacaggaaacggagaccaacagcttgaatctccgacatcgacggtgacattctctgagaatcttctgatgcctttaggaatcccgacggatagcagcagaaatagaaacaataacaacaatgagtcctcggcgatgattgaactcgccgtatcttcgtcaacctcctccgatgtgagtctggtcaaagaacacgaacacgactggattaggcaaatcaactgtggtagtggaggaataggagaaggattcacgagtctattgatcggtgattcggtcggccggagtttacccaccgggaaaaacgaagcgacggcgggcgtggggaatgagagtgagtataactactatgaggataacaagaattactggaatagcattctcaacttggttgattcttcaccgtccgattccgcgacgatgttctga

SEQ ID NO: 146759 - DNA, 714 bp, Arabidopsis thaliana landsberg
attttttgctcttcgttgcagcctctctctctttaaggttagtctcttactcacttttgcgtagttcctcactgaaaattgatctgtgttcatgtatgtgattgtcttactttgttcatcttcctccgatttggttgtgtaatttcgatttatgtatttattgagactgatttgcttcatttccttggcagatttggaaaagacctttgcttctcttcgttcgtaaaaccagctcaaagattcaatatgtcagggtaagtttctcttaagatgcagctatattggattcttactccattcttaatatactgaatcaatagttgatacattatggtttagagttttagttttaggtcgatagatgttattactttgattggcttattctatgtgtgcctcaagctccaaactttctagttggccattgattacatgatttaagtttagttctagaattgataaagttttatacttttttcaatttttagtgatgaggctgttgctgctcctgtggttcctcctgttgctgaggcagcagtgatcccagaggacatggatgtgagtactgcattggagttgactgtaaggaaatctcgtgcttatggtggtgttgttcgtggtctccatgaaagcgctaagcttattgagaagcgtaatgctcagctctgtgtcctggctgaagattgcaaccaacctgattatgtcgatgttgtt

SEQ ID NO: 146760 - DNA, 985 bp, Arabidopsis thaliana landsberg; identical to SEQ ID NO: 25294

SEQ ID NO: 146761 - DNA, 1920 bp, Arabidopsis thaliana landsberg
  unsure (1)..(1920): unsure at all n locations
agcttattaagacgattcttggtgtgtgagnngcttgtcattctctgggtgttatgcatagagatctcaaacctgagaatgtcttgtttgatagtcctaaagatgatgctaagcttaaggctaccgattttggtttgtctgtcttctataagccaggtttgattttttctcttttggttgattgattaatcttgcaattggtgttttggtttgattatgattcaaagtttgttgcttaagggaactttgttttgtatcttcattgagtcttgaaactttatgtgttgattggaatgattctgcatttgagcattgtggcttgtatctgtgattctttgaaaccttattgttggtggttcatcgtctaattggtttttgtttactcttcaggacaattatctgtaagatgtagttagggagatgttcttcattgaggagtctctgattgggaataatttgcatttgatcaaatcattcgtttgtttagttacttgatgatttgttttgttgaattcaaagtttgctgcttgagcattgtttcattgtatatataggtgttctttattgcttgatgtgttgattggaataattctgcatttgtgcattgtggcttgtatctgtgactctttgaaacctaattaggtatggctaattggtttttgtttactcttcaggacaatgtctataagatgtagttagggagcttgctttgtatagttgttcttcattgaggagtctcccattggcccttaattgaaaattgaaataagttattggtatgtgtaggtttaatgatatgtttggttggattcaaattttgctgtttgagcattgtttctttgttagagggaacattgttttatagatgttcttcattgaggagtctctgaaacttaatgtgtagatcgaaattattctgcatttgtgtgtctggcttggatctgtgatttctttagatccagatgggtatgctcaatgtcggtttatctgctaattagtttttttggttgctacttcaggacaatatttatatgacgtagttggaagtccgtactatgttgcaccagaggtgctaaagaaatgttatggacccgaaatagatgtgtggagtgctggtgttatcctctacattttactcagcggtgttcctcccttctgggcaggttagtctactaaaaagtagagtattttctatttacaagtttcgcgtttttgtttgaatgatgcattcttttctcttgggcattgcagagagtgagtctggaatctttagacagatattgcaagggaagttagttttcaagtctgacccgtggcctactatctcagaagctgctaaagatttgatctataaaatgctcgaaaggagccccaagaaacgcatttctgcacatgaagccttgtgtatgttcattctatgatgttcattgggagtcagcaactgttttaattgtttttatggtaaataatgagtattgagtttcctctgaatgttataggtcacccatggattgtcgatgaacaagcagcaccagacaagcctcttgatccagcagtcttatctcgtctaaagcagttttctcaaatgaataagattaagaaaatggccttacgggtatgagttcgagtaatctacattgtcttttccttatacccactccattttcttgtttatctgaacacaagtgatattttcccacaggtaattgctgagagactttcagaggaagaaattggaggtctaaaggaattgttcaagatgatagacacagacaacagcggaacgattacttttgaagagctcaaagcgggtttgaagagagtcggatctgaactgatggaatcagaaatcaagaatcttatggatgcggtatgaaagaaccaaaacaaactctctttcctcttttcaaaaacattcgt

SEQ ID NO: 146762 - DNA, 1691 bp, Arabidopsis thaliana landsberg
  unsure (1)..(1691): unsure at all n locations
gtttctcggcaccgtttctttgtatagcacagaagtgaagagcaagcagacgaaaaaaatggcgactctgtcttcctatctgttatcttctcctcctctatgcaaatcccgattctcggcaacaagtctcgtctcaggaattgatttcatctctttctctcctcgaacaactctctcctcgtcatccactgtcttgccggcgattctttctctttccgttaaacataatcgccggagaaactcgcttcaaggttcgaattctaaagttttcctttttcttaatctgaaacaggattggattagcttagcttctcttgattttgattttgatttctgggtttcagtgaaatcagtagctagcccaacggagacgatttcagaattcgatgagatggtctccggcacgaaacgaaagtattacatgctcggtgggaaaggaggagtgggcaaaactagttgtgctgcttctttagctgtgagattcgccaacaatggacacccaactctggttgtatctacagatccagcacattccttgagcgattcttttgctcaggtaaacgaagaaattctataaaaaggtgaagactttgtttttgtttgatgaagatatacatatgattggtgtttctattgtttttgttgattttgtaggacttgactggaggaatgcttgtccctgtagaaggacccgaagctcctttatttgctttagaagtatgtgtttggaattacctttggtgcattttttggtttctgtggtgatgatcttacactcaaattttgagttttaattgatagctttgcaacagataaaccctgagaaggctagggaagagtttcgtagtgcctcgcagatgaatggaggaactggggtgaaagattttatggatggtatgggacttggaatgcttgtagaacaggtttgttgtagcactgtttgtacattttggtggcaattgcagctaaaatgtgtttgaaatcgtgttaatggctaccaatccaaatatatattccgtggtagccatgtgagcttcaatgtttctgatactcaatctagatgtctcaaatggatgtgattgcctctcactgttctgcttatgatactgactctggttttttggttgatgaagttgggggagcttaaacttggagaattgctcgacacaccgcctcctggattggatgaagccatagccatttctaaggaattctgctattctatgtgatccttgtttcttctgtcttgatatgtactgtctcttactgatttgtcaagggtattcacaggtcattcaattcttggaatcaccagagtataacatgttcaccagaatcgtatttgatactgcaccaacggtgagcaagcttgattaaaatttcccttccctttttatattgcaaaatattaaagacagagtttgttactacttacagggtcatacgctaaggctactctctttacctgatttcttggatnnnnnnnnnnnnnnnnnnnnnnnggtaagaaatgttgataaaccatttcctttaaactcttatgtttagtctgtttaccaaagtttcaatctctttctcagagtttgtcttcttaaatacattttcttcatcttcagcttagacagaaaataacctcggctacttcagcgatcaaatcagtttttgggaaagaagaaaaggggcctgatgct

SEQ ID NO: 146763 - DNA, 1591 bp, Arabidopsis thaliana landsberg
agcctttttaagggaggggaatttatcaatataggttgaggtggaagataactttgggggggtttttttcataaggtcctgcaaaccgtaagtggcaaatgattcacttttgtcaacctataatagaccggtctaggcgcctctagggactaacgagtaggattatactggtaatagttttgagtttggtaatctctccttttgggcttgttggttgagcgtttgacgggtacacttggggttgacattgttgttagttataaagaatatttggtgagcggtggcttgttttttctttctttgaagcctctagcacggatgggagcaactgtcacaggagttgatgctgttgataagaatgtcaaaattgctcgtcttcacgctgtaaggtctcttactttaattgcatatcattaaatttttcagataacttatacagtggctgtatggttatgttacatgcaattgtgtgctccatatggtgaagtagttttcttgaatacctatttatttgaactgtacacttcagtcctgtcaaggttggcaactttcagaatgcttgagcagttatgaacatgttttcacattatggcataggactaaagttcatgaaaccccttctctatctgacttctattctttcttttatgtcaataaaatgtctctgcaggatatggatccagtgacttcaacgattgaatacttatgtactacagcaggtattattttttaatcgtagatgatgatcaatgaaagtgacatggaatcttcttctacagaagctgattgtctgttacctctcctttgcataaatatgaactaaaattttcttgtgcagaaaagctagcggatgaaggcaggaagtttgatgctgttctttctttagaggtacctttttctggtccatctatacttcagcaagtcccttcgtctttgtcaaacttcctgatatttatactattccatgtctcttttctaatatatatggcaaattttctgatttttaataatgaaggtcatcgagcatgtagcaaaccctgcagagttctgtaagtcgttgtcagcattgactatccccaacggggctacagtactttctacaatcaatcgcactatgcgagcatatgcatcaaccattgttggagcagagtacattctacgttgggtaatctttagtttcacactttatttatcttctgttaacacttaaacatcatttttacttcatgtgttcttggttactcattttgttgtttgtataataaatcaccttgcagcttcctaaaggcacacaccagtggtcaagttttgtaactcctgaagaaatgagtatgatattacaacgtgcttcagtcgatgtaagctaatccctccccattcaataacacttatgtcaatttcaataagtaatcttaagccgactgaaacaatacaaaagtacgcatgcctcgatgtgtgcaagtggtaatatggcgaaaagaatgtttgttcatatgatagattttgctggaggtgataaatagaaaactatggatttgcaggtgaaagagatagctggatttgtgtcaacccaataacagaaagatggtta

SEQ ID NO: 146764 - DNA, 1283 bp, Arabidopsis thaliana landsberg
gtctgccatgttaattctttttgtgttgtcagccaatccaagaaaaaaatagggaagaaaaccgaatgacccaaaaaaaatgctgctgaaagctgctcaaccaggtttggcttttatgatgctgcatctgatttgctctatcagaaactcaaaattgctaaagtcaggtttcttgcagaaatcatgaacttgaggaatttagaacgtgtcttggcaagggaagaagaagtaaaaaagaaagcgattgtgcataaagcagtctacaagggtcctcagattcggtatcattcaaaagatggtaagctctccagtaaaatagttttccagtctaattggatctttccagaaaagtaagaactatatttgtttaaacttttaactttacatgcaggatgtaactatttagaattctgtaatggtgcgtcattcaattcagagttgtcgacgaagtctgttccctgtaagtaattttgagtggtgtttggagatgaacataaatgtgttcatattgatctatactgatctctgtctttcttttggtttgttttctcttttccagatccagaaaaagctgtatgtgtgattacgggattacctgccaagtaagagtttttctgttcttcttctttattcattggaagaacaagatctctgggatgaacacaagtagactctcttaggtctactaaaaagaagttatcagtttctttgatatatacttctcgaaaagaaatgatgttataacctagaaacctgattatcttttctctgcaattttagaactagttcttagctgttgtgtgtattgctgatacaggtaccgggatccaaaaacgggtcttccttatgcaactagagacaccttcaaagcaatacgtgaaaggtgttgcttgatccaattattgctgcatcgatgttttcacttgtctatagaagtattcatctgttgtttcctctaacggatcaagcaaatgaatgttatcgagtgaaacaggcctttgatatttacattgtctttgttagtgttagaatctgatatttcccagtcttatgtttattgttctgaaggttcatggacgaacatgatggtttgagaaagaaaatggagatgggagatttgtttgatacactagtggcgaaaggttttgcagcaaaacaaaagagaacgaagattccaaagagtaacaaatcattttccctcagaagctcagctcgtttccttagctccgagtctgaagaagagagtgaagaagattcagattaataaacacctccctgatttg

SEQ ID NO: 146765 - DNA, 2215 bp, Arabidopsis thaliana landsberg
taattgtttatatagtacagactgtctctatacacaatcaaaaaatacaattccttgaatcaaaatcatctgttcctcttatacaagtttctattttcccaattgtgtaaaatcatgagaatggtgatcttacctttcctatgatcctatcttctgttgaatatttacagtgaaaagggatcgacagacactcttgcatcagtttggaaaccatcttcagaagattggtttactctgaaggagaaatatattaacggaaaggtatgagatttagttcttaaagttttcgcatacatagacctcagattcatgtcacttgacgcatcatccaaatgagcatattcttgtgaatagaaaaggcttatgatactaaagctgataatgtttatgcctagctagtacctggagaaagcactagttgtcaaagatgaaagagaagtaaattctactgcctcaagtagaatatgggaagcggttcaaagcaggaacataagagacatctaccgactcattgtaaaagcagatgcaaatatcatcaataccaagttcgatgatattactgaccttgatgtatatcaccaccaccatgttgatgcaccagatgaagtaaagaaaaggcacgatccaaatgcgtgtcagagaatcaagaattcgaacgaagcaagaaactgtcttcaaggctgctcattgttgcatgtggcgtgtcaaagcggtgacccaatcttgcttgaactgctgttgcagttcggggctgacataaacatgagagattaccacggacgaactccattacaccattgcatcgcatcagggaacaacgcatttgcaaaggttttgctgagaaggtaacacactaactaataaatctcatgaggggcactttgagtagatacttagtgtctctcttctttgaatttgacagaggtgctcgtccatcaatagaggatggtggaggattaagtgtgttggaaagggcaatggagatgggagccataaccgatgaagagctcttccttctattagcagagtgtcagtaaattaccaatataccatttgctgattgattgctacgcaaaggaatgtaacttgtaactgttgtagtatttggtcatgacttgctcatcgcattgatgctccaatatttacctaattcccgaaggagatagaactctaggaaatgtcaagattccgacctactgtattagcctttgtaatgttatacataagatgatctcaaagattctaagcctgcacctcaaagtttttttttcttcttctgtatttgatatccgagatacaaatatgtgttttgtagccggaaactttattatagacaacattctcattgcccaacaaaaatttgatgaagtaagtgtcgtgttttcttctattattttgctctaaattaagtagtgctattgccacattcttagatactaacgtagaagagtcccatcgacattttttttttgaccaatattaattagagttcaaaaaagcctatcattcacagtagatgccaaaaacaaaaggagtcattcctagaattgttgtttacatatgtttttagtttatattcttagcttaaccaatatgctgcgaattgattgcagaaaagttttttttttttttaaaattaaacaattcaccgaaaaagaataaattcttattattgtttttttatataaaacaaaatcatgagcaaaagaaagtattcatcttgtggaataaatttttattttttaaagtaatggctttatttttagtgttaaacagtattcttttgaaatgtaaaaaaagaagaagtattcttttgaaatgaattttttattgtttcttttggtaataatgcgttttaattcgaaccggaaagagttaagggattaaataaaaccggcggctttttcaaaacccttcaccgtttgttcttcatctcctcgccgccgcctcctactctctctttctctctaaattgctcaattctctcggccacaggtaagcttcttcgacttcactctttgacccaatactactttcctcaccccctgtggtttcctttgttaaacccttcaattctctttctcaatttgataaaccctagttctgctatagacctagacaaggatggtgactaaagcagaaaaacaattagccaaaaatttcaacatagacgatctccctgacgtccctgccgggcttcctccacatatcaaag

SEQ ID NO: 146766 - DNA, 1679 bp, Arabidopsis thaliana landsberg
  unsure (1)..(1679): unsure at all n locations
tagagattctcaagctgagtaattctgatggtaatccgcggggcttaatccaattcctcaactaagtccaccaccgcaatctatacgccactaaaagaaaaggcaagtcatcacatgtttgccaataataattgcagtggttggttctgcagttgcgctagcgttttttgttcttgatgttgtcctcgttgttatgaagagaaagaagaagagcaacgagtctagtgtagataccacgaacaagccttatacgaactcgtcatggggtcctcttctgcacgggacaggctctacaaatacaaaatctgcctcatctcttccatcagatctctgccgtcgattctccatctacgaaatcaaatccgccacaaatgatttcgaggaaaaactaatcataggagtaggcgggtttggttctgtctacaaaggacaaatagacggtggagccacacttgttgcggttaaacggctggaaattacatcgaaccaaggtgctaaagagttcgatacagagctcgagatgctttcaaagcttcgacatgtacatctcgtctctctaatcggctactgcgacgaggacaacgagatggtactagtctatgagtatatgccacatggtacacttaaagatcatcttttcaggagagacaaaacctctgatcctccattgtcatggaaacgaaggctagagatttgcattggagcagctcgtggattacagtatcttcatactggagccaagtacacgatcatacatagagacatcaaaaccacaaacatacttctcgatgagaacttcgtcgctaaagtatctgactttggtttatcaagagttggtcctactagtgcttctcaaacgcatgtctccaccgtcgttaaaggaacgtttggttacttggatcccgagtactatcgccgtcaaatcttgaccgaaaaatccgacgtgtactcttttggagttgttctgttggaggttttgtgctgtagaccgatcagaatgcaaagtgttccaccggaacaagcagatttgatccgatgggtgaagtcaaatnnnnnnnnnnnnnnnnnnnnnnnnntcattgactcagatttaaccgctgatatcacttcgacctcgatggagaagttttgtgagatagccattagatgtgttcaagaccgtggtatggaacggccaccgatgaacgacgttgtttgggcgcttgagtttgctcttcagcttcacgagactgctaagaagaagaatgacaacgtggagtctctggatctaatgccaagtggtgaggttggtacgaccacggacggagaagatgacttgtttagtaggactacaggacacgtggggaaatcgaccacgaccgatgactctgttctagttgttggtgatgagaggagtggttcgagttggggagtattttcggagatcaatgaacctaaagcacggtagatgatggcttggtaaacaagtattacattcttgctagggttaatatatttgtgtatgtataattgtggaattaaaaaattaatgtatatatatatatattattatgagttacatgcgtagcaggttaagttaatcaaaaaacaaaaatctttgtaattattatgtctctctcttccttgactcatgtgataagatattatcttatcaaggttccagttatcatgagtcatga

SEQ ID NO: 146767 - DNA, 608 bp, Arabidopsis thaliana landsberg
cacttcctcttccccaccattttagagctcagagaaaagaaagaagaaaaaaagcttcgtgtccttcaccttcccaaatcggaaacaatgcacgccaaaaccgattccgaggtaacaagcctcgcagcatcatcaccagccagatctccacgtagaccagtctactacgtccaatcaccatcacgcgactctcacgacggagaaaaaacagcaacatcgtttcactcaactccagtactaagtccgatgggatctccaccgcattctcactcatctatgggtcgtcactcacgtgaatcatcttctagtcgattctctggctctttaaagcctggatctagaaaagtcaaccctaacgatggttctaaacggaaaggtcacggcggtgagaaacagtggaaagaatgtgcggttattgaagaagaaggtttgttagatgatggtgatagagacggtggtgttcctcgtcgttgctatgttttggcttttatcgttggattctttattctctttggtttcttctctttgattctctatggtgctgctaaacctatgaaacctaagatcactgtcaaggttagattcaaattcttccttcaattttagta

SEQ ID NO: 146768 - DNA, 959 bp, Arabidopsis thaliana landsberg
ttcttaaatctggatcttaatttgggaaaatttattttattggtgtgaggcttgatgattgggtggtatgtagattcaacaagaagaacaacgcaagtgtccatgttgataacgataaggatcatgatatgatcgattacattttcaggaagattcctccatctttatcaagggcggatgcttctacaggacttcaccatcatcatcataatgtctcaagatcaatgaatttcttccctggcaaattctccggtggtggttacgggattttctctgacggtggtaacacgagtatatacggcggcggtggcatgatcaccaatattggtactgactcagtggatcacgacaataacgcagacgtcgttggtttaaatcatgcttcgtcgtctggtcctatgatgatggcgaatttgaagcgagctctcccggtgccgtattggcctgtagcagaggaggagcaagatgcatctccgagcaaacggtttcacggtgtaggaggaggaggaggagattgttcgaacatgtcttcttcgatgatggaagagacacctccactaatgcaacaacaaggtggtgtattaggagatggattattcagaacgacatcgtaccaattacccggtttaaattggtactcttcttaatcaaatgtgtttcgccgccggtgtgaagaattttccggtgacagtgaagattttttccgattggtggggtcatttgcatgcattatataatttgagatttgtgtatatgttttgggttaattaattggtcataggggttaggggaagaagattatttagagagcggagaagatcagaagtgaggcaacatatagaaaacataggtttaaaaaatattactgtttgttaagtttaatgattaaatgtataaatcttatacttagatgtttatatatagtttgtatagatgcatatagtttctctcaatgctat

SEQ ID NO: 146769 - DNA, 474 bp, Arabidopsis thaliana landsberg
cttctgttacctgaccaatctgcagtttggcttatttctctgtctggctgggcttacttttctacagggatacaagctcgccactgggggaaaaaagagtacttactcttgctcttcagctcttgctcttcttccattgcctagaggcttcgggttccttcccttatacatagttttttttgcagacgcctgtggagagtacacaatgagtttcattgtcaccaggaagaccttttatggagagacctctcattctcatgcactttgttttcccttttatcagattgtgactggtcttgtgtttcattttgaaaataatttgcatcacttttgagatctgatgatgtctgcaatggataaattcttgacagttttgtgtttcataatatcctatgtttgaaacagacaggatttaagcaaatcattgtctcactacgtatgttgatatatgctttcgagctatttccttccatt

SEQ ID NO: 146770 - DNA, 1257 bp, Arabidopsis thaliana landsberg
tagtgaagggatcatccacggctgtcaagcatgcagagcaacaccaaaatctactgtcctagaagtaccggtcaggatcctcctcttgtcaatggaaatggctcacatcatcttcatcggggtgcggcggaaaagtttcaagtggtggctagtgaagggatctacaacaccaagcaagcacgcagaagtagagggaccgagcaataccattctcaaggagagaccttgcagaatggcgccagctatccacattcccttgagcggtcacgcacgcttcccacatcaatggaatctcatggtaggaactaccaagagggcaatatgaatattccccaagttgctatgaacagaagtaaagattcgtctcaagttgatggatcgggtttctctgcaccaaatgcctatccttactatatgcatggggtcatgaaccaagttatgatgcaatcagcagccatgatgcctcaatatggtcatcaaattcctcattgccaaccaaatcatccgaatggaatgacgggatatccttactaccaccacccaatgaacacatctttgcagcatagtcagatgtctttacagaatggtcagatgtctatggttcatcattcttggtcaccggcaggaaatccgccttctaatgaggtgagggtaaataaacttgacagaagagaggaagctctgctgaaattcagacgtaaaaggaaccaacgttgttttgataagaagattaggtatgtgaataggaaacgccttgctgagaggagaccccgcgttaagggtcagtttgttaggaagatgaacggcgtgaatgttgatttaaatggacagcctgactctgctgactatgatgacgaggaagaggaggaagaagaagaagaagaggagaaccgggattcatctcctcaggatgatgctttgggaacttgaagatacaccaagaactgaaaaccgttgtgttatacgtatttgcttgcatcttatcaaacaacagaagatgttgatcgactgacacgaaaaagatgatactgctacagccaaaaaaacatcgaatatcgagttgtctctaaggcaatgttggctcttgcggctcaactttttgacagagcattgaaaagctctcattgggtttagcttagttcgttgataaacatataatgtattttatcatgttcactcacattctctcagtaagtactcagatgtattaacctttcttctccttccagtatcatttacttgaatcttgtttttccc

SEQ ID NO: 146771 - DNA, 1642 bp, Arabidopsis thaliana landsberg
tcctggtctcacaacatgacacacccatcaaaagtcttgcaaacattaaaacactttagttataaaccaaaccttttcctattctggttcacatgattctctgtcctttccttttctcacacacaaaaagctctccttttctctttctctctctctctctctctctctctctctcacatctctcttcttcatctttcgtttcacgatcattgattatcaaattggcatgcaacagcaaggagagatgatgaggaactcgccgtcatatacctctgcaacgcactctcgtaatttcgacaccattttgtctccactcgtcaaaaccggcaccggtgcttctaaccgatcctacgccttcttctccatctttctcttcctcctcctcggcgcgtttctctccacgcgcctcctcctcgatccctccgtacgaacatcttactataaatagattcttgtgttctcttctaattacatcaaaacgacagtcccgtttgtcgtttgccacgtcgtatacggtattagtggcgctaaaactcgttcgcgcctaatttgtcgtgtcaccattacttttttgtcaaacaagtttcctacgcttgacacgtgtctacacgggagctttaataatcacgtgattgtttttagtcattaactaactaccggtttttgctaaacgacttcgttttcgtctataggttttgatagagaaagaagcggtgtccgtgactgagagagaaaccactcaatccccagaataccctcagtcgactaagctaattacggaaaaaccaaaagagtttacgctaaactgcgctgctttctccggcaacgacactggaacttgcccaaaggacaattatccgacgagtttccgatctagcgccggagaaggagaatctgaccgttctccatccgccacgtgcccagattacttccgatggattcacgaggatctacggccatgggagaagaccgggatcacgagggaagccttggagcgagccaatgcgacggcgattttccgcctggcgattatcaacgggagaatctacgtcgagaaatttcgtgaggcttttcagacaagagatgtgttcacgatctggggattcgtacagctcctacggagatatccgggaaagattccggatctcgagctcatgtttgactgcgttgactggccggtagtgaaggcggctgaattcgccggagttgatcaacctccaccgccgccattgttccgttattgcgcgaacgacgagacgctcgacattgtatttcccgattggtcctattggggatggtaattgcttcttcttcaagcacccataacttatagggttttgcaatttcaccactgaagttttagatttgacaaatgaaaccgcacagaccatagtaaatttacttggtagcttaaggaatatagctgcgagagttgcttagagaatgtcaaatgcaaataggtcagtgttgaggattgcattggttttgtagggctgaggtgaatataaagccatgggaaagtcctgtgaaagaactaagagaaggaaaccagaggactaaatggatagatagagagccttatgcttactggaaagggaatccaacggctgctgagacgagacttgatctcatgaaatgtaat

SEQ ID NO: 146772 - DNA, 1940 bp, Arabidopsis thaliana landsberg
ctcgctacaccctcgcaaaaattacgacgaacacttccctcgcaaatttgcgagacgattgcgaggaaactgcagggaaagcatcattcctcgcaaaaacgttgcaaatttgcaagggagttacaggtaacttgtctcccccgcaaattgtgacgaatttgctacgctcatttattctgtcgcaactattgcgacggagtagcgagtcttggttggttaggtgagcacgttttaaattatcccaatggtctggttggtaggtgggcttcactcgcaaatttctagcaaaatcctagcaaatcccttgcaaatctcccgcaaatgccttgcaaatccctcacaatagtttttgggacatctataaatagccaatgtaatgtctaagaaatcataactcaaatcacaacatttacttacaaacaaaaaaaaatattttcgaaataaaacttattacaaaaataagaatgtcttggggcggagagcatgagatttacacattacgaagttggatgtataatcatagagatcaaacgaccggggaggtgacgagagagtattacgacggactgcgcggtttcatgtatcaagcgacaaacgaaccatttgctcgtgagaacggtacaatattctgttcatgtcgtaagtgtctcaatgagaaatatttggaatttaatgcagtcaagaagcatctttataataaaggatttatgccaaactactatgtctggttacgtcatggagagggttgtagagatagcgcaggaactagtaatacaaattatggtgtcgagcaacctagtaattttaataatgatgcgaattatggtcagcaagtacctgatcaatttggttatgtgcataaccaagaaaatagatttcatgatatggttacggatgcatttcatgaaactattgcttcatttcctgaaaatattagtgaagaaccaaacgtagatgctcaacacttttacgatatgttagatgctgcaaatcaaccaatctacgagggatgtagagaaggacattctaagttatctttggcatctaggatgatgactattaaagctgataataacttaagtggaaactgtatggattcatgggcagaattaatttaggaatatttgccaccggataatatatctgctgagagttatgatgaaatacagaagttggttttgagtcttggattaccatcagaaatgattgatgtatgcattgactactgcatgattttatggggagatgatgtaaatctgtaggaatgttggttttgcgggaagccaagataccagactactggcggaaggacgcgagtgccatataaacggatgtggtacttgtcaataactgatagattgaaacgcttatatcaatcgaaaagaactgcggcgaaaatgagatggcatgctcaacatacaactgcagacggagaataacgcacccatcagatgcaaaggcatggaaacactttcaaactgtatattctgactttgctaacgagtgcagaaatgtgtatcttagcttaaacacagatggatttagtccatttggtttgtctgggcgacaatattctctttggcctgttatcttgacgccatacaatcttcctccggatatgtgtatgtaaagcgaatttctattcttaagtattctagtgcgtggtccaaagcatccgaaacgagcgcttgatgtcttcttgcaaccgctgattcatgaactcaagaagttgtggtatgaaggtgtacacacgtttgattactcgagcaaacaaaatttcaatatgcgggcagtgctaatgtggacgattagtgacttcccggcatattgaatgttatcgggatggacaacgcatggaagattatcttgtccctactgtatgggtcgtaccgatgcgtttcagctaaagaaaggcagaaatcatgttggtttgattgtca

SEQ ID NO: 146773 - DNA, 1069 bp, Arabidopsis thaliana landsberg
aaaggcaataaagcttaagaagaaggatcttctgggtggatcagatccttatgtgaaattaacactctctggagacaaggttcctggtaagaagacagttgttaaacacagtaatctgaatcctgaatggaacgaagaattcgatttggttgttaaagaaccagagagccaagaactacagctcattgtttatgactgggaacaggtaaaaccagtttgtgaattggcttgtttcaataattgctggagataatttgccttatgtacacttgatatatttcaggttggaaaacatgataagataggaatgaatgtgattcaactcaaagaccttacaccagaggagccaaaactcatgacacttgagctcttaaatcacatggaaccaaaagagccagttagcgagaaatcgcgtggacagctcgtggttgaagtcgaatataaaccttttaaggatgatgatattccagagaacattgatgatccaaatgcagtagagaaagcaccagaaggcacaccttctactggtggcttgcttgtggtgatagttcacgaagctgaagatctagaaggcaaatatcacactaatccttctgttcgtttgctattcagaggagaagagcgtaagacaaaggtatatataaaacttctcttaaaactcaaaatggaaacatatgagaggacatcaaattttacacattttggtttgattttgtagcgtgtgaagaaaaacagagaaccgagatgggatgaagattttcagttcccattagatgagcctcccataaacgataagctacacgttgaagtcataagttcttcttcaagactaattcatcccaaggtagaaacaaaatcagatctctctttaaagattgcatcaaaatcgtatctctgagaaagcaaaaactaacattttgatatatgatttgatcaggaaactcttggttacgtggtgataaatcttggggatgttgtgagtaatcggagaatcaacgataagtatcatctgattgattccaagaatggtcgtattcagattgagcttcagtggagaaattcttcttga

SEQ ID NO: 146774 - DNA, 2577 bp, Arabidopsis thaliana landsberg
tggtgctattggttctggtgttgatgaattggcggaggaagcttctgctcagaagaaacgtgttgctcttcagagacaagctgctgttactgtcgaagctgctgaggattatgctcggaggtttgaatctggtgtcaatgacgtgagtttttttttttatgaagatgatattaaattttttctgtattgacttcgctttgattgagttttttgttgttgtttgtttgttgtacagcttagctcaaacgatcatgctggtgaagaattaggccactccggcatgaatataatgtgcagaatgtgcttcctaggagaaggtgaaggaagtgatagagcaaggaggatgctttcttgtaaagactgtggaaagaagtaccacaagaattgtttaaagtcttgggctcaacatagaggtactttacattctatttgctgctgtccttttcttcgcttgctaaagtctgtgttttgggtctaattgatgtaagttgcagatttatttcattggagttcatggagttgtccctcttgccgggtttgtgaggtagtttctttctagtttctcattttcttctttgtgatatctgttgcatctgagcactgccaatttttcgaaaagtgattgataaaacatatgtttttttttaaactaacgaaacaagttgtcttaagtaatgaaacatatataaaagtgttagcctaactgttatatagagtgtccttagatctttgaacctgcctcaccgagtcttttaccctccttaggtctgccgtagaacaggagatcctaacaagttcatgttctgcaaaaggtgtgatgctgcttaccattgttattgccaacatcctccacacaaggtacctgacagatagcctcttcatgtgactatcttttaaagtaaagtgaattggcttatttattttatcctgaccgtacagaatgttagttctgggccatatctctgcccaaagcatacaagatgccacagctgtgattctactgtccctggaaatggcctgagtgtcaggtatacattcttagtctcttgcggggtaggttggtcttacaagtgagcagaacaattatactttgttttgctagttaagaatttgcagatagattgccctattaaaagtctgttgatcacttttgttctttcttgttttctactgtaacaggtggtttttatcatatacttgctgtgatgcttgtggcagattgtttgttaagggaaattattgccctgtatgcttgaaggtatattaagcaaaataagtcttagcaatagcattatcatggcctttattttttaatgcttgatccccgtagcaaaacataacgcctctttagtgttgcattaaccaggttttgcttatcttgtataggtgtatagggattcggaatcaaccccaatggtatgctgcgatatttgtcaacgctgggtgcattgccattgtgatggaataaggttcgtcctcattattttgttgtaaacatagttatctctgttgcatctgccatctgatatatactaccaattagattgagtcatattttaagtatgcatcgcataatgtatttgagttatagtaaatctgaaattgtttgcctctttaaactgtcatgcagtgatgacaaatatatgcagtttcaagttgatggaaagctacaatataaatgtgccacatgccgtggggagtgttatcaggtatgcctgttcctgttaccctgttattagtaccctcgcttctcagtcactcagatcattcttcttggttcttattgtcatatacgtattgctcgtcgagcagggggttttcctttggaatggaaagagggttcaatagtacaatttgctagtgtgttgatcatataagttttcctggttctcaaattctatctttggcttctcaggtgaaggatcttcaggatgcagttcaagaactttggaagaaaaaagatgtggtggacaaagagttgattgctagtttaagggctgctgctggtttgccaacagaggaggaaatattttcgatatttccattttcagatgatgaagaaaatggacccgtatctgggcgctcactgaagttttcgattaaaggtttggtggaaaaatccccaaagaaaagcaaggagtatgggaaacactcttcaagtaaaaagcatgctagtaaaaaaggtagtcacactaagttggagcctgaagttcatcaggagattggatctgagagacgccgactaggtggtgttagaattgataatgtgggttttcagataaacgaacaatcggacgttaattcttctgtagctggaatttgctcaacacatgaacctaagattgtaaaacacaagagggttgatgatgttatggtgactgatgaagaaaagccgtcaaggatagtgagaataaagtgtagcaagccttatgattctgatagcgaggattaccctaaggaatgcaggggaggaaaaatttgtaaaggcaaagaagttggttattaatctgggtgctaggaaaataaatgtcagtggttcttcgaagtccaatgttgtttcttatttatcgagagaca

SEQ ID NO: 146775 - DNA, 1913 bp, Arabidopsis thaliana landsberg
  unsure (1)..(1913): unsure at all n locations
tcaagcttcagatgcatatgaggcaagaaactagaccaaaagaaacnatcattctctgaagaaatcttgggaactaatcagtgtttttactttcgaatgcagttctttgcacaagctgggtttccatgtcctgcgttaaggaacccttctgatcatttcctgagatgcataaactcagactttgacaaagttagagccactttgaaaggttctatgaagctaagggtactggaaaaccttcccttttaactgatatcatttctctgcaagtttcattttgttgatggacttgttattctacttcccagtttgaagcaagcgatgatccgttggaaaagattaccacagctgaagctatcagactattggttgactattaccacacttctgattactactacacagcaaaggctaaggttgaggagatatcccaatttgtaagtactctttgttcctttctcgagcttttgttaggacgagtcacttgcatcttttaaccagtctccgctcgtctctgttaacagaaagggacaattcttgactccggaggcagccaggctagtttccttctgcagacctacactttaacaaagcgatccttcatcaacatgtcaagggactttggttattactggctcagacttctaatttacatcttggtcacagtctgcattggaaccatctatctgaacgttgggactagctacagcgccattctggtattgctaatatcatttattggagagcaactcacactcgaaattgtattgaagttttattaatcttacctctttcggtttgtgaattcaggcacggggctcatgtgcgtctttcgtctttggctttgtaacattcatgtcaattggtggatttccttcgttcgttgaagacatgaaggttagtaccttctgcagtttttttttcttgcgcaaccagatgatccaaactattttgttaatctgaaaatgattgcaggtcttccaaagagagagactaaacgggcactatggagtagctgcgtttgtgatagccaacacattatctgcaacaccattcctcatcatgataactttcatctccgggacaatctgttacttcatggtgggtctgcatccaggattcactcactacctcttctttgttctctgcctttatgcaagtgtcaccgttgtggagagcttaatgatggcaatagctagtattgttcccaacttcctcatgggtatcatcattggagctggaatccaggtgatatccccaccactctcattattgacttctctgtgttcttccaccttgtaaaaggacaagaaaagctcttcctaaatctgttcatctgtacttttgcttcaggggatcttcatgctggtttctggattcttcaggcttccaaatgacatcccaaaacctttctggcgttatccaatgtcatacatcagcttccacttctgggctctacaagtacatattgttgaaacaagaaaatgtttcatatcagctcatcatcatgtgattaaaatatagcagagagctaatattgttatgttttgtttgttctccagggtcagtaccagaatgatctgagaggcttgacgtttgacagccaagggagtgctttcaagattccaggtgaatacgttcttgagaacgtcttccagatcgacttgcaccgatcaaaatggattaacctcagtgtgattcttagcatgattatcatctaccgcatcatcttcttcatcatgattaagaccaacgaggatgttactccttgggtcagaggttacatagcacgcagaaggatgaagcagaagaatggaactcagaacaccacagttgcaccagatggtcttacccagtctccttctctgagaaattacattgctacacgaacagatggagctcgcagatggtag

SEQ ID NO: 146776 - DNA, 2098 bp, Arabidopsis thaliana landsberg
aaaccatgctttacttgtcttaacagtctgagagcaaatgtgccctagtgtttggacaaatgaatgagcccccgggtgctcgtgcccgtgttggactgactggtttgactgtggctgagtatttccgtgatgctgaaggccaagatgtcttgcttttcattgacaacattttccgtttcactcaggtaagccttgttatgtattgtgtatatcactcagtacctgtgggccctatattgtaatcttaactctgtagttttgtaatctaaacttatatactttcttgtgtaggccaactctgaagtgtctgctttgctcggtcgtattccgtctgctgtgggttaccagccaactctggcttctgatcttggtgctctgcaggagcgaatcacaaccaccaagaaagggtctatcacctcagtccaagccatctatgtccctgctgatgatttgacggatcctgctcctgccacaacttttgctcacttggacgccacaaccgtgctgtcaagacaggtgggaacatgtctcctgatatttcctttttaaaaatatgtctgtgtaatgctcatagagctgatatctttatgctcgtctctttcccttatgtagatttctgagctcggtatctatcctgctgtggatcctttggattcgacatcccgtatgctctccccccacattctgggtgaggagcactacaacgctgctcgtggtgtgcagaaagtgttgcagaactacaaaaatttgcaagatattattgccattttgggaatggatgagctaagtgaagatgacaagctgactgttgcccgtgcccgtaagatccagagattcttgagtcagccattccatgttgctgagatcttcacgggtgcccctggaaaatacgttgatcttaaggaaaacatcaacagtttccaggtatgtttgcattcatgagaagcttttctttcttagtgcgccatgattgtttgctaagagcgtatatgaattataattgttgcagggtctactcgacggtaagtacgatgatctttccgaacaatcgttttacatggttggaggtatcgatgaggtggttgcaaaggcagagaagatcgctaaagagtcagcagcttaaggaattgattcatctctttcatatgcataatacttctcttcttcttttgttgacaataacgaaaaaacaacaagaccaatgctttaggttgtctgctgaggcattgtgatcattgtgagtgtgagagatagtacggagaaaacagattcattcgttgaagttttgacttggaataatggagacaggtgttgatgttttcaatctctccacatttgtattcaagcttttgtattaaggaaagtatcgtgtttttacaggattcgatgttagaaatgaatttgcacttttattagtcttcttcttctgtattatattatactttctttcattcttacaaatccagatcaacaaggttctttctgtagagttgaaccgctgtacaattagtcttgggcttaaaaccgaaccggaatttcggttcggttcgtatatatgtataggcataaaaccgaatggttattgatttaaataaccgtggatagtgaatcggttacccgaaattgtccaagcccagaatttatagttttattataaaacgtttatacccatgagtgatgagtccattacccaatccaaaatttaagaattttcattaatgtacttactagcccaagcccactcattctctaacctaagtataataaagtcaaaaattcagacgactccatagtctattgataaactttgattagtgtctcttcttcgccatgaagatttctgagactaaccaaatcgatcccttcttccaactatgttttttttatggattcgaaagtgaaaggatctagctttgttgaggaagaagatgataaaaagagtcattggcttgatcgtaaggagaagagagagattggtggttatggtaaaggtaaaggtcgtcgaggtggtgaaagggctaactctccgacgagaggtggtgctgcggcggcggggacggccaagtttccatggagcaacatgagatttgttggtaag

SEQ ID NO: 146777 - DNA, 993 bp, Arabidopsis thaliana landsberg
  unsure (1)..(993): unsure at all n locations
gtttttttttgaaccaatggggattcaattcaagaggtacaatttttgggaatttcatcgattgatgatttttttccgtatttgattttttttttttgttttggtgatgatgaatgaagattattgagaaacaagttcaaacggtagcgaaagctatgaaggataagatagacgacgagatagcgtctctggaaaagcttgatgaagatgatttggaagttttgagagagaggagattgaagcagatgaagaaaatggcggagaagaagaaatggtggatgagtattggacatggtgaatactctgagattcattctgagaaagatttcttctccgttgttaaatctagtgaacgcgtcgtttgtcacttctaccgtgagaattggccctgtaaagtaagtttgtggattcttcgtccatgtgatctttgagtttctttagagcttgtgagggattagtaagtaacaatgcttgagttttttgctgctgggcttcgaaaagtttgtcacttgttggtttgatccacaaggtcttcttctccatagctactagacatgttttagcttaagattcaagtttatatatgccttgtggattaatcattgcctgattcttccgtgtcatctctgagtttatttagagcttggaagtggtgtagtaataactaacaatactcttgataagttgtagcaatgctcttgattagtggatgtaatatgatgttgataagatatatgaggcacagaaccaaaagtggtgcttccactagacccgtttttagcctaaggttcaagtttataccttgtagatgtttctgtattgtctgattcttccctgtgatatttgaatttcttagagctttggaagtgatataggaacaatgctcttgtgtgtttgtctctatgaagattatcgctgtcgtgtttcattcgagtgtgcgggatnttttgctgctgggtttagcctttctcanaaaagtatacttgtagttta

SEQ ID NO: 146778 - DNA, 711 bp, Arabidopsis thaliana landsberg
aaaaaatcagattacgaaaccctagttctctctccggcgaaaaccatggtggcgcaaaacagtcggcgggagcttctagcagcttccctgatcctaactttagctctaattcgtctaacggaagcaaactccgaaggggacgctcttcacgcgcttcaccggagcttatcaaatccagacaatgttcttcagagttgggatccaactcttgttaatccttgtacttggtttcatgtcacttgtaatcaacaccatcaagtcactcgtctgtaagatcctctcgctgtcacattgttttgatgattcttgaattcgtttcttgtacaagttgttcaatttcaattggaatctatcactgtaatcttgatttcattctttgatatagagaagaacagaaaaatacttcattgttgagaaacttcatatacttatctgattcaacattagtctctgttttgctcttatatttggcttcttagtttcctagtatgttttcttcttggcagggatttggggaattcaaacttatctggacatctagtacctgaacttgggaagcttgaacatttacaatatctgtatggaatcatcactcttttgccttttgattatctgaaaacatttacattatcagtcacacatataacattttgctttgagtcatatagtgaactctacaaaaacgagattcaaggaactataccttctgag

SEQ ID NO: 146779 - DNA, 1343 bp, Arabidopsis thaliana landsberg
  unsure (1)..(1343): unsure at all n locations
caaaatttcgtagattttctcgtcctggnnnnncacattcggnggcnatatatataaggataaaaagagtctcatnnngacatnnaatgacaaaggctagcgggtgnnnnnngcccgnccgngggannatctctgattcaaaaatcgatcagtattttttaatcagatatgatgttgaccgagttatttatttatcttctgcagaagaacagtcaaaaacattcccaaatatgcagcagcccaattttatattgacaatgttttacctcggataaaggagaagaagataatggccttgaagccttttgtcgatcgacttgggtataaccaatattcctatagtttagggctcagatatttggaaatcatcttataaacaataaatgatttattcttgtgatactggaaattttttcaggtatgacaatgtacctcaagaaatcaacagattacgatgccgtgtaaattaccatgctctcaaatttcttccagatatagagcagatggctgattcacttgtttctagaatgagaaatcgcactggaaatccaaatccatatatgtatgccatatcagagattcgactttgttataacttaggaccatatgcattatatcaacttaaaactatacccatgtctcttgtatagggctcttcatcttagattcgagaaaggaatggttggtctatcgttctgtgattttgtggggacaagggaagagaaagttaaaatggcagaatacagacaaaaggaatggcctcggcgtttcaaggtgacatttataagcagttgtcaacttcttttggtggctaaacaacctcaaccgctaccttaatgaaatttcttgacatatattgcagaatggttcccatctctggcagctcgccttgcagaagcgcaaagaaggtcgatgccctcttgagccaggagaagttgctgtgatcctacgtgcaatgggctatccaaaagaaacacaaatctatgttgcatctggtcaagtctatggcggtcaaaaccgtatggctccactaagaaacatgttcccaaatttggtaagcacaacaccggactcttataattctttgatgaatcagcacaaacttgtctctcacattaactgtcctttgaatcaggtaacaaaggaggatttagcaggcaaagaggaactaacaacctttagaaaacacgttacaagtcttgcggctctagatttcttggtgtgcttgaaatcacctgtatttgtgatgacacacggtggaaactaagcaaaactgatcatcggagcgcgtagatatatggggcatcgccagaaatcaatcaaaccggataaagggttgatgt

SEQ ID NO: 146780 - DNA, 2228 bp, Arabidopsis thaliana landsberg; identical to SEQ ID NO: 28763
  unsure (1)..(2228): unsure at all n locations

SEQ ID NO: 146781 - DNA, 5978 bp, Arabidopsis thaliana landsberg
agtcgattatgcgaagtaacttgcaatacgctgctatgagtgcactgagaagactccctcttgatccaggaaatccactttttctgcaccgtgcagctcaggggtaagactttttttttggttctttctactatctttttaagtatagagtattggatttaagtatagtgatgtaggtttcacaagagcaattgaatttttggtctattcctaattatgcagtatattggacagttattctcgtattcacacttttatgttgcagtgttttctttgctgatcctgttgcggtgaggcattcactggaaattctatctgagttagccacaagagacccctatacagtagcaatgacattaggtaaataatttgttctattcccccttatattgttttttttcattctatttctgtgtgtagagacataactgtttttcattcaaaacttgatatgtgtctcttgatctttttgctgcagaaaagcttgcgtctccaacaggtatgctcaccaggccttttatctcttgacgttaatctttttgctggttatttcgtgtttatttgtgctaattataaagaagtgtttggaacacgatctgggttagctgatatacctttcttctgtacaccaaattaggggctttgcaagatatcctgcatatgaatgatgttcttgctagagtttctctggctaggttgtgccactcaatatctagagctcgggcattagatggtaagtactatcaacctctttctgctgcccgttctcgctctgtttttttttttcttatctggctatatgggagagatcttttgagaacttacatgttgctagtttcctttcaatcttcctacagagaggcctgatattaggtctcagttcaactcaattctctatcagctactcctagatccaagcgaaagggtatgctatgaggcgattttgtgcattctgggaaaacacgataacactgagaggcatgagttctatgactttgatttctcttagttcattctttgtaaggtattgaataaccaaaatgtactgcatcatttaggatggatgagcgtgctgctgggtggtatcgcttgacgagagagatcctgaagctgccagaagcaccatccttgtcctccaaggataaatctaataaaaccaagcgtccacagccccttattaagcttgtaatgaggaggtactcctagcttggtggaagactgtgtttagaattgcagatcttatggattccctttcctcactagaatgttgctttggattgtaatgatcgttatggttgtgtttcttgttaaagaactttcgcaaattgatcctgttctttcaggttagagagctcatttcgcagtttctcaagaccagtacttcatgcagcagcaagggttgtgcaagagatgggaaagagtagagcatcagcgtttgctatgggattacaggacattgatgaatccgttcatgtaaatgcattttctgatgctctagatgatgctgagaccaatgaaagttctcatccagaaggtacattgtcagtatcctcttaatatgaattacaatcttttttatttattttgttagatgtctgacagatgcacaaatatatttctaatttcgtatggagcataaaattgtatgcaagcttttggtctataagagttttgttcaattttgttgtattattatttattatacgttgaaaggtcaccaactacaaatgtgagttaagtcattgcatctatgctctgatggcgcatcaatatgctagaatcgttacaaaactacaaatgtgagtaaactcaatgctctgatgtccttacaaaaatagtataatattatcagtcttctcttcagacgtaaacaaaggaacatgtttttctgtcctattgctttgattttctttaccgaattatctaaatatgtagggtatccttatatctttcgagttttaacatgttccaaatcactttttaccttctttcccactctttgagttacttgtttacccttatttttagcaggaattctatatatgttctaacatgttcctactttgtatatgttcgacttttgcaggaattcggagaacatcatccatatctgcagggcctggtcgcagtgatacaattgcaagtttgctagctgcattaatggaggtggttcggacaacagtagcatgcgagtgcgtgtatgtccgggcaatggttatcaaagcattgatatggatgcaaagtccagatgaatcattggatgagttaaaatcaatcattgcctcggagctttcagatcctggttggcccgcagctctagtcaatgatgttttgcttactttgcatgcccgctttaaggtaagtatgatgttttcttggcttttttgattttgcagtgtagttgcgaactgtttcaaagttaagcagctctgttgtttgtccacaatcctataagtatttagtagttctctgatgtacggaatctctttaatttcttagattttgtaacaagagttatctggcagaaacatgttacatcatggaccccatcaatttttttatccattgcgttgaaactgaagaaaaacttgaacagatttattgaggagtaatgttaactgttttcttctgactagttaactctttttaatttttctttcacaggcaactccagatatggctgttattcttctcgaaattgccagaatatttgccaccaaagttccagggaaaattgacgctgatgtcttacagctgctctggaaggtattctcttcttgcggatataattctaaagctattataatgtacttacatatgttgtatatttcgtcctgtttcaaatttttattgtgtttaggacatttttagatctttaagtttgtacgcttgtttatttaatcttttaaagctatataattggacaaaaatcatatttgtaaagtatatttgcaaggcttaaattattgtgggatattttactgaatttttgctacctcagatagtattttttaacacaatttatcatctgattaacttctagacatgtcttgttggagctggtcctgacgggaaacacacagctctggaagcagtcacgatagtactcgatctaccacctccacaaccggggtccatggctggactgacatcaattgatagggtctctgcatcagatcctaagtcagctctggcactgcagaaattggtgcaagcagcagtaagacttcctcataaggttttacatgaatttggtaatgttttcaacacatgatcttaaaaggaatactgtggcaggtatggttccttggagaaaatgcaaactacgccgcatcagaatatgcatgggaatctgcaactccaccaggcacagcacttatgatgttggatgcagataaaatggttgctgctgctagttctcgcaatcctactctagctggtgcattaactcgcctccagaggtgtgcatttagtggaagctgggaggtataccactatattttgctggtcgtatatttgatttggtttttattgtttttaattggacaatttgtgatagaagtagggcacaaagcaatcccacaaagtaggtagaactcactataaagctagcgtaaaggtcttagtgccctttggtctgtcttataagactttgatttatacccctcctgtacaatgtatgtaggacattttcatacccatattcttatcaatttgtagatggcttgccttgcaatggtcactgatcctaacccatgtctaggaacattttggtttgtagctgatttgattcatcatttgagtactctagatttaagaccatgtttgagaccctttttttataagtgagaacgaataggatgtctagttaggtagcttttaatgggttttttttaaccatgaaacagaatgtgaaacctgtagtaattgtgcctgaccagaaactataagaacaaagtagtgcaagttgactatagtaatcatgtttggtctctctttctatcaatctttattactatctgtttagatatcttaatatagaaaatagctgattataatttgtgatgcttaattacatcatgtatatgattttcttccgagcgttttagttggattcttgtgaagcataggcacaataatgccagaatagtctactaagatgagtgttacttctagtgtttcccgcctaaatgtttatgttttgtggatacacaggtcagaattgttgcaattcaagctcttactacaatagccattagatctggtgaacctttcaggctgcagatatacgagtttttgtacaccttagcagagggtggtgtacagtctcaactttctgaaatgcacctgagtaatggggaagaccaaggagctagtggtacaggtcttggagttttaataacaccgatgttaaaagttcttgatgaaatgtatgttggacaagacgaattaatcaagtaagaaagaaatttatgccttcttttctttttttttcatgtgatgcgtgcatgtaacctctatatgatattatggttgacatatgaatttttccttgataacaagggatatacgccatcacgataatgcaaacaaagaatggaaggacgaggagctgaaaaaactctacgaaaaccatgagaggctgctggattttgtttcattgttttgctttattcctagagccaagtatttaccactgggcccgataaggtagtattctgaacttattatatcagtcaaagacagcctaacttctaatacataatacttacttacaatactaatcttgcatagggaagatgggatttatagtttccaaaagactttctgcttttttttgttgatgcttatctaggtcaacagagtttattgtgttgcatgtaattatccttattcattaggacaaataaaagtataaattttatcccagattctgacaaaacccaagaacgattatacactatagttaactatttatgaacattttaatcaaaagaagtccagaatgtacagttcatctttggtgatcttgctgctgacctttgttgtgtaaattgcatgcttacttccccgttttctttattttattaggtgctattgtctatctttaggtttcatatgataatacttattttgtttcctcgtaacatatgaagcgcgaagctcattgacacataccgtacaaagcacaatatcactgcatctactgggtccaccgatccagctgttgttgctactgggatctcggacttaatctatgagtccactcagcctgcccccgctgcctcaaactccagtggtctggatgatgatttggtgaatgcttgggctgcaaaccttggtgatgatggtcttcttggaaacaatgccccagcaatgagtagggtcagttgctatttttatctgactttttaagataaacggattagtatgtgtgcagtttagtgcatgcgtgtctatttagatattcttcttattaagatcaaggaaatggcataattaaatatttctgataaggaatcagaaagtaagagtagttgtgtggattgcccgttagagtaccttgttttcaaagaagacatagtaaacgttcgactggtctgaatggggtaaagaatgaatgctttgggactacacttgtgatgaaaagtttgggtattaccgtttctgattataagtaggtagcaaatctagtaaggcataattaaattttctgatcaggtttcagtagtagttaaaccattcatctgatctactgtatttattcgtacataatttgattataaatgctaccaattgttttatgtctgcaagtgaaactcagacctatataatacttgtcaggtcaatgaattcattgccggagtcggaacagatgcaccagatgttgaggaggagaatgtcttctctagacctttggttgggtatgatgacatgtgggctaaaactcttttagaaacttcagaattggaggtata

SEQ ID NO: 146782 - DNA, 1353 bp, Arabidopsis thaliana landsberg
atgagaaaagccaggttcgttataaatggtcaaattttgatatttttttttttcggagttgcgaaaaatttcgcaattttaatttcttgatgatgttatatttagatttacacggtgcatttgggtgagaggcaacatgatgatcctaatgttgtaactgaatcacatcatgatattctcggaccacttcttggaaggtaatgaatgatgagcattggtaaatgctttcctaagataatcgatgttgcgggaaaaagttggtttacaaatttgtatgttttgactgataatgcagcaaaaaagcttcccatgagtctatgatttatagttacagacatggtttctcaggctttgcagcgaaactcacatcatctcaagcaagggaactttcaggtaaatttgaaacatttgttgacaagacttgttgaacaagaattaggtcaaactcagagaacaaaaacactaattaatagtcaacttctatttttggatttgtaatagggcatccggatgttgttcgcgtaacgagaagtaagaatatgaaactgaaaacaacaagggttagtgattacttgggactcacttcagctgctccaaccggtctcctccatgaaaccgatatgggaagtgaagcaattgttggaatcctggactcaggaatatggccagattccaagtcattcaacgacaacggtcttggaccaatcccggcacgttggaaaggaaaatgtgtttcagcagaagcgttcaacgcatcgagctgtaacagaaagttgattggagctatgtactactcaaagggtcttgagagtaagtacaacggatcgtttaatgcggcagagaaaggtgaggttatgtcccctctagacaaaattggacacggaacccactgtgcatcgacagccgtgggttcttttgtcccagacgcaaacgtcctcggtctagctcaaggaaccgcgagaggaagtgccccgcgggcccatatagcctcttacaaagtgtgttggaacaacgaggagtgtttcacaccggatattgtaaaagccattgaccatgccatccgtgatggtgtcgatgtactatcgctctcgctcggatctgaagtacctgttgattttgaggttgatagagatgatttcgctattgctgctttccacgctgttatgaagggaattcccgtggtatgtgctggagggaacgatggtcctgaaaaagaaaccatctctaatgttgctccgtggctcataactgtcgcggctacgaccatggacagagaatacttcacgcccatcactcttggaaacaatataaccttactggtacgtatttggttgcttgtatcacaagaatctg

SEQ ID NO: 146783 - DNA, 628 bp, Arabidopsis thaliana landsberg
  unsure (1)..(628): unsure at all n locations
ttcattggatccaacttgataatattcattgttatgaactaatggaaagaagcctaaaaaccatatatatgtttgaattttagggagcttttgcgttatgtcgcgtagttaagaagaatgaactgaagaaaaattcgaaaagtttgaaaaataaaaacgaacaagacattggttcttgttactctagcctcgcgacctctccttgtcgcgatgaagcgtcgcagattcaatcgttcaagccttcttctactacaaacgactcttcaagcatttggatttctcctgatttcatccttgattcgtcaaaggtacctacatctattatctaaaccaaaatagtttttgtatagacaatagtggtctgatatgtgtttttggttttgtgattgtaaatataggattatcctcagattaaggatgttgcttccgagtactttcccaactacaatttccggtcaccacggcaaaccaccacgtggaatttccggtgagctcttgttattttaatgtggaccaggacattgatcagtcgatgnnnnnnnnnnnnnnnnnnnnnnnnnnnnnnnnnnnnnnnnnnnnnnntgactactcaaaccttttttagctacaagaaatgttggttctttct

SEQ ID NO: 146784 - DNA, 872 bp, Arabidopsis thaliana landsberg; identical to SEQ ID NO: 23929

SEQ ID NO: 146785 - DNA, 1381 bp, Arabidopsis thaliana landsberg; identical to SEQ ID NO: 24754

SEQ ID NO: 146786 - DNA, 920 bp, Arabidopsis thaliana landsberg
gtgcagctcttgatgggttaaagcttcaatctttccctgagtataaagtgagagtcaggttgcaaaatgtttgtcttagtgtttatggctttgtgtggtttattgtttggctaaagtttgtttctttttcgatagatatgcgacggaacatcggtgtggtgttgttgttaaagggccaagacttagtgggaatatatctggcactgatccgttgaaagataatcgtttgcttcttgaagctaaacctttagatgaatcagaagaagctactcacactgctaaagttgttaacgaattatcaagagagatatcgcgtattcttgtttctcacccggttaacgcagagagagctgcacaaggcaagaatattgcaaatctcgttcttttacgtggttgtggtattcgaatcgaggtgtgtgtttgactattttacttgcgttcgtagaaatgatgttaattaatgtaattgcttcatgtacgggttttgtgtatttaggtacctccttttcatgagaagcatggcttgtggccatgtatggtagcaccaacaaagattatagctggacttggtatgtcgctcggtattgacattttagaagctccgggagctactggagattaccggacgcttctgacatcgaaagcaactgctatagctaatgctctctcagctcctttgaatccctgccctaatgtctttgtaccgggagaggacgggcataaaccaggaaggtcagatggttatgatttcgggttccttcacattaaggtgaaaacatgtctctgtcttttaacacaacataaaaaatttcattctgattctaaattattcgtgcaggctatagatgatgcaggtcatgacaaggctacattgttcaaagttcgaggcttggaagctgtggataaagcgatacgtcagc

SEQ ID NO: 146787 - DNA, 876 bp, Arabidopsis thaliana landsberg
ggacgagttgaacctaatggtacaagggatagcacattggagattcttgtgggagacaatggatgggttaatcaccgtgaaaatgggatcttgtactctttcgatgctacgaagtgtatgctctcatggggtaatctctcagaaaagcttcgtatgggtaacatggcctgtgaaaatgaagttgtcgtggacctgtttgctggaattggatattttgttctcccatttcttgtgaggtatatgccattattgaataaaccagaagagaaagtggttttatacaatcaaaagtcaatactttattagatcgcatgcaactacaatgcattcttcattaacatttacagggccaaagcaaagctagtatatgcttgtgagtggaatccccatgctattgaagctcttgggcgtaatgttgaagcaaattctgtttctgagcgttgtatcattcttgaaggggataaccggatcaccgcaccaaaagtacggttgatgatattccaatcggctcaccgtctatttaattctatgcaaatggttctttttataactgttggatcgagtaaatcgctgaagtaatagattttgcgtttcaaatcttttgattctcagggagtagctgacagagtcaatcttggtctcatcccgagtagcgaaggaagctgggtcacagctattcaggcattaaggtgattttactttccttaaaacttattcttaactacaagaaccaggagcataaaatctggaacaagttttaaggttcagtctctccaaaagatataatctttaagacgattcccactaagagacccgaaaatcttaagccacaaagctcttggaaaatctgaatatgatccaaaaatgtaatcatta

SEQ ID NO: 146788 - DNA, 1627 bp, Arabidopsis thaliana landsberg
atgtcttcttcgagttctacaggtggaaaatgcacacagcaggcagaacttagtggagagaatataaacatcacctacaaacctgacgggacacatgtagctgttggtaatagggtattgtctcgagccccatatctttacactttcattgttcttactgtctatggattacttgatagatcccttttcatagtcgttgtcctttctcttactggccaatgtaggatgatgagcttacaattctggatgtccgtaagtttaaacctctacacaggcgcaaattcaattatgaggtaacgtaagctcagactcatgttaatctttattaatggctttttttttataaggctcttccgtatctcctgtttcaagctcatgcggttatatgtcacctaagttccttgttcatgtaataatcgtcaagtaattttctggtgccgtatggaatgttctcttatcttttgtcttcttgtaacaggttaatgagattgcttggaacatgcctggagattttttcttcttgactactggacttggtgaggattttaaattctgtactttcctgcacacgattccctaccaaagatttctttgtttttgaacttgagaaaatgatcttactgaaagttactttgtatgttgtcctgctcaggcactgttgaagttctttcatatccatctcttaaaccacttgacactctcacagcccacacagccgggtgttattgtattgcaattgatcctaaagggaggtaatatatatttacatttgtgggctggccgtctgagacacgaatgataatctttttgcttttgcatctaattcttcctctttaccttaacagatattttgctgtcgggagtgcggattccttagtaagcctttgggatatctcagacatgctttgtttgagaacatttaccaaacttgagtgagtatcaacatgaattttccatagagtagaaaaaggtttaatttctgttacatgttagtaaattaacatctatttctcataggtggcccgtgagaacaataagcttcaactattcgggagagtatattgcttcagccagtgaggatttattcattgatattgtaagtgattgcccagacttaaacactgctaatttcaatgtagtttcctcaatatgagattagttcctcgtatctgaccactaactaccaaacaggctaatgtccaaaccgggcggacggtgcatcagattccatgtcgggcagccatgaacagtgttgagtggaatcccaaatacaatttacttgcatatgcaggtgatgacaagaatcccaagtataatactgatgaaggtactaccgcgtattagtacttcattgttagcaacaactcaaaactctaatattggtagcagaaaatgaacaatgacaacaacttggatctctttgcaggtgttttccggatatttggttttgagagctcgtaggaacagagcactgaatcgggaaacatgatacacaactccacttgattgttccttgttgagttagaaaaagtttatgtgcctagtgtacctaaatatgtattgtcagtatatcaagttggaataatcttacagtatcactaaatacattgaaagtttgcagttctga

SEQ ID NO: 146789 - DNA, 2124 bp, Arabidopsis thaliana landsberg
atgatatcttgttcagaagaaggtagtaacaagatccttgtggcgatctcgttggaccgtgacgagagccaaaatgttctatcttgggccatcaatgttcttgctaaaccaagtgacaccgttgtggctcttcatcttcttggttagtctatatacctaatttcctctgttttttccttccgaccatttgaatagtttttttttttggttgggaaataaaattgttagtgtcgttgcagttggtgaagaaccgagaaaattgccaatgaagaagaagaagagaactcagattcgacatgccaaagctcatgttatctccatgcttggagagttcgcttacacttgctgccacaaccaggtacaaccactttcgttttgaaaaaaaaaagaattggcgtaagagaaaatttaaaccggaataaaccggagatctcaaaaatcaattattggtgcatgttttatagccattgatttgggcaatattgccccatacgattacttttcgggtcgaatcaactttttgttcgagattttataccatgttaaatttcataaattaataaatttgtttatatatttctctaagtatcatttcacttgatctaaactaaaatatgatatacactacgtgtctaatttgtctaatcgaattttcgttaaaagcccattaagcccaagcaaacacgtttccatacgcgcgtgatatcagcccagacacaaacaaacatataattatttccttaattacgaatccaccccgcattaatactgttattacatatttggtaagattcaaatttcttttttcaacttcatacttaatacaggtgaatttggaagccaaggtagggtttagctcaaacattggaagaggactaatcgatgaagtcaaatccatttctgctcattatcttgttctttctcgaccaacaacccacgagtttaggtaataaaccggatattttccggttcggtttagaaatcatccaattcaaaattcttgtaataactcgtttgtattttcctctccatttaggatatggaatgacatcaaaagatatgtctccgactttgctccatcaagttgctctgttgttttagtcggaaaccaaagaaaaccgcataaagattgttactctgactccgcgatttctctaggtttgatcatactaatataccctttaagtttagttatacgatttgcttagttgattccaagactaacaaaatatgtttttcttagacataaatagtgagaagtattcaccacgtagtgtactaaacactttatcaagagattcacttagctcttcaggcgatgatgcttcaagcttcaatggttcactggtctcttctagcttcgcttcgccttcagacaaaccgaagcataagtcaatctctccttacaaattcatatcttctcttatcatgaattctcctctgaggaaatggagaggaagtgagactaagaacaagcccaaacctcagcctctaattcaatgcttcacttacaacgagatttcaaaggccacaaatgattttcaccaaggtaaaacattagagagaccaaaattttaaaactttggaaaacaaaacaagacaaaaagattgaaacttttgattcttgcagggaatatagtaggcataggaggctactctgaagtgtacagaggagatttatgggatggaagaagaatagcagtgaagagattagccaaggagagtggtgacatgaacaaggagaaagagtttcttacggaacttggcatcataagtcatgtctctcatcccaacactgctcttctcttaggttgttgtgttgagaaaggtctttatcttgtcttcagattctccgagaatggaaccttgtactctgcgctgcacggtaacctaacttcatattactttgatgttgtgattatagtacttctacagttctagaaagaatataaacattggattgattatgtcattttataccgcgaaaaattaaaacagagaatgagaatgggtcgttagattggcctgtacggtacaaaattgcggttggagttgctcgaggacttcattatcttcacaaacgctgcaaccaccggatcattcaccgcggcattaaatcttcca

SEQ ID NO: 146790 - DNA, 1331 bp, Arabidopsis thaliana landsberg
gatcagccctgcaaagtaggttgccgtgttaaacttaatgctgactcctccaagaatttcaaggaaaagattgatgatgaatacagggctaatatgtaagtagcagttatagcacgcttgctctttgtatctgtgtcatatagatttactatattttctagatatagttgaccttaacgcgaattgttgtacaggattcttgataatcttccagtagctgtgcttagacaaagaagagatggaagtcaatctgcgacttatgaacacggttttcgtgttggctttaaagggagttatgaaggggtatatctctaatatatagtgcttcagtctttgctattaccttttatataccaactaatagttgcttggctttcgtagagcaaagaggagaaatactttatacataatcacttaagcttccgagtcatgtaccacacagaccaagagtctgattctgctcgaattgttggatttgaggttactcctagcaggtaggttacctactggatttttgaggagtacttgtctaattgtataagctaataggtctttatctttttgatagtatcttgcatgaatacaaggagtgggatgaaaaaaatcctcagttaacaacatgtaataaggacacgaagaatctaatccaaggcaacactgtccctcaagaagttgagcaaggaaaagaaatagtgtttacatatgatgtctcgtttaaggtacatgacttacacttagccttcttttgctttactttttgggttgctaaacattttccggaatttgatgatccaggagagtgaaatcaaatgggcttctcggtgggacacgtaccttctcatgaacgatgatcaaatccactggttttccatcataaattcacttatgattgtccttttcctttctggaatggtagccatgatcatgatgagaactttatacaaggatatctcaaactacaatcagctcgagacccaagatgaggcccaggaagagactggatggaagcttgtacacggagatgtcttcaggccaccggtgaactctggtttattgtgtgtttatgttggtacaggtgttcagatcttcggaatgtcacttgttacaatgatgtttgcgttgcttggcttcttatctccatccaacagaggagggcttatgactgccatggttctcttgtgggttttcatgggcatattcgctggttactcctcgtctcgccttcacaaaatgttcaaaggaaacaagtggaagagaatgaccttgaagactgcattcatgtttcccggtatccttgttgctatcttctttggtctgaatgcccttatttg

SEQ ID NO: 146791 - DNA, 2491 bp, Arabidopsis thaliana landsberg
atggtgtcttacatgtctgtgtataagaatgagagctttgtggtgacgggacaccaaagcggagtcatcttgttgcatagactccgagagggctcgatcggggaagatttgaattccgctgtgatggaaaatgttggcaagtttgatggcacggaggatggtttgcaagtgactctattggaagtgcatcatgtgggtcgggttaggtatatattggcgacagatcttagcggaaagcttacggttttcactgagaacagaacggtttatggctctgttagcccaacgagtagaccgcttgtgttcttgaagcagaggcttttgtttctcactgagactggtgctggttcattggacttaagaagcatgaagatcagggaatctgagtgtgaaggtcttaaccattctctagcaagaagttatgtttttgatgcgtccgaacgggctaaagcttatggattcacatccgaaggcgaaatcattcacgtgttgcttctcggagacattatgaacttcaaatgtagagtgagatcaaagaagaaggtacaaatggaggagcctgtagcgttacaagccatcaaaggctatctacttatagtcaaccaagagaaagtctttgtatacaatgtatcgactcaacactacgtccgaaccacgggtcctcggcttctttttccggctgcattagaagatatcaggtcaacgttcttgagccatcgagaatcaactaaaaccacagatcaccagaagctagaaaaggtaactcctttaatagcaagcgaccgcgaaaagctgcttgtgatgggtttaggagacggatacgtagctacatacaaatcaaagcttccaatctccaaagcagaattcaacacaatgctttggagcagtcctgtcttcttcttcatacttttcttattcggcgcttggcattttttctctaagaagaaagaatctctcacagcttggggacctgacgatcctttctcctccacgacaatgtcttcttcttctacaacaactgcacaaaatagttccgcattctctgaatcaactaggagaaacgacgaccacatggatcttcggagaagatacgtttcgccatctcggtatcctcctggagcagcaacaggtgcttaccgttcagtagggtctaacgacccgagctcaagagctccagtggaaactactaactacagaacaaccgcacaggagatgaagtatcgtggtgggtcaggtcttgattctggcggatttggtaaaagaagagagagtttgtttggtaataacaaagctttagacgacgaaagttagttcctttttttttcatagttcgttatgttctttttttaccggtcaacgcttgaaaattttctaatgtgtaaaactccggcgaagaaataaaatttttaccggttgctttgtttcttctccggtcactttttgttagtttaatgcttcttaactgtagttttcacaatctcaagattaagaacagattaaaaaaaattcaagatcaaataaatgaaactgaaccagagagagacttgaggttaacacgtcaagatatggcagtgttcttcatcttggtcttggtctttttcttccttgtcttcagattcatctacagtaatatatgggttccgtggagaatccaatctcacttcaagaagcagagcgtgacgggtcctagttaccggatattcagtggaaactccggcgaggttagccgactaacggcggaggcgaagtcaaagccgattccttccgggagaaatcctcatgagttcgtccaccgtgtggcgcctcactaccacgaatggtcacgtgtctacgggaagacgttcctctactggttcgggtcgaaacctgtggtggctacgtcggatccaagactaatccgggaagctttgacgacgggtgggtcgtttgaccgaattgggcataaccctttgtctaagctgctttatgctcaaggtcttcctggtcttagaggtgatcaatgggctttccatagaagaatcgccaaacaagcttttacaatggagaaactcaaggtaacactaacacacatcaatgtagaagctaagatctgtaattcaggcaacattgtgctatttggtatctcagtctagtttagtttaaaaatgaccaaatccggagtactttataggattgtggctaaagctaagatctttttttcttttatagaggtgggtgccacaaatggtaacaagttctatgatgttgatggagaagtgggaagatatgagaaacggagcagaagagattgagttagaggtacacaaagagatgcacaatttgtctgcagaaatgttatcaagaacagcttttgggaacagcgtggaagaagggaaaggaatctttgaattgcaggagcgtatgatgcgtcttttttatctggttcgatggagcgtttatatcccaggattcaggtaagtcttatgggaaattttcctagttttgagaacaa

SEQ ID NO: 146792 - DNA, 2324 bp, Arabidopsis thaliana landsberg
  unsure (1)..(2324): unsure at all n locations
ctatttcttgaagaaggtaatccatttactgttatactagtagaattgtaactttttcgttctaacattctttttgttgcagataacaaaccagtcgaagttctcccatccagcgagccaccaagaggcttactgtcactacttcaaggtgcagataaattgcaaacatttgacacaaaagcaaatcccgacctttcaacggattttccttttcaaggccatgccactaaaagaactgatcagttaagcagcacttccacaactaaatcagtaacagctgttccacctgttctcacttgtgaagaccttgagcagtctattctgtcagaagtcggtgacagctatcatccacctccaccgccagttgaccaagacacgagtgttccttcagtaaaaatgaccaaacaacggaaaacatctgttgatgaccaggcttcgcagcaccttctttctttattacagagaagtgcagacccaaaaagtcaagatacgcaacttctttcagcttcagagaggagaccaccaccaccatctatgaaaacaactacaccaccaccatctgtgaaatcaactacagctggagaagcagatccagggaagtctttgactcttgagaatatatctgggagtgccttcatgaacgaactggagtcgattggagaacctgtctctggaagagctatggtttctgatgctccaggggtcccgcttggatcagaaaggtcaatnggagaactgagccaaagaaaccaaatcagacctgacggtccccccggaggggtactagccccttccagaagatggtaacttacttgcagttggcggtgcatgcaaacccatcaaaatacatgtcttttccaggatctcataatcaagagcctgaagtagctttcaacatctctgacaagttagctgccttgaactctggtccaaggaacgaaagaccaacaatgggtggtcaagatggtctttttctccaccaacatccccaacaatacgtgaccaacccctcgtctcacttgaatggttcaggcccagtattccatccgttcgattcacaacatgctcatgtaaaaccttagctcgatttcatgggaccaggaagcactatgtctcaacatcatgaccctccaccaaatcaccggtttccaccaaacatgattcaccgtccacctttccatcatacaccaaccagtggacatcccgagtttgatcgtcttcctccacatatgatgcagaagatgcatatgcaagacaacctgcaacatcatcatctaatgcaaggattccccggtagtggtccacaaccccatcactctcctcatgtaaacaaccagatgccgggtctcattcctgagttaaacccgtcacaaggctttccctttgcccatcgccagcccaactacggtatgccaccaccaggtataacataactgaacatatgactttcactcattttgggcctcagatcaagatcttgtttggacttgagtcggctgctctagggagccaggtattaatatcggctaatgtagggactagttgattctgagtttgctctttgttttctttggctttttaaggttctcaagtcaacagaggagagcatccagcttcactgcagacactcttggggattcagcagaggatggacccagccaaacagataccggcagtgggtcaagccggtggtcctaatcgtcaaggctctgtgggtcatgaactcgaccttgggtttggctacaggtaactttgctctggccacaatcctttttaacaccctaagaggtgtgtctacctaacagtgagttgctttgtgatgtgcaagtaatcaaaattaccatttgtgatattttttttaagatcaaaaaaaaaaagaaaaaaaaaatatatactttgtctctatggactctcgtttctcttggtgcttgtgatatggggatgcttttaattaacagtagttgattttcttctatgaacgctggagtccctggtatttgcatattctattttaggctttttggttttttgaaaccagagttcaagtctgaaggggtctctgtcgaaaggtaacacagatggcgtgtggtaacaaagttaacaaaatcttgcaattttgcatcggcccataaagcccaacaaatatttagcctaacgtgtcgtcttctttctttaaacgccgggatccgtaaaccctacgttagtccatctgtatcaatgaaaagcaagagaaagccgacgaagaagaagaagacgccgacgccgcaatgaacattaattccgtcgcttcctatactgaaaacaccagagctttgcaagttcag

SEQ ID NO: 146793 - DNA, 631 bp, Arabidopsis thaliana landsberg
tttcaataacatgtttccgaaaccgctattctccctattgcttctcacggttgcattggttgtgtttcaaaccggaacccttgtcaacgctgaatattccgagccttcgagttcaacgagaaagcctctggtgaagattgtgaaaggtaaaaaattatgcgacaaaggatgggaatgcaaaggatggtccgagtattgttgcaaccatacaatctccgatttttttgagacatatcaattcgagaatctattctctaagcgtaacagtccagtggctcacgccgtcggcttttgggattaccgatcattcattactgcggctgccgagtaccagcctcttggtttcggtactgctggtgagaaacttcaagggatgaaggaagtcgctgcgtttcttggccacgttgggagcaaaacctcatgtaagtttaattttagagcgatccaaaccggtttatttattattaaccgggaattgaaatcactaataaccgttacgattattcggtttaaaggcgggtacgggggttgcaacgggcggaccattagcttggggattgtgttacaacaaggagatgagtcctgatcagctttattgcgatgattactacaaattgacatatccttgtac

SEQ ID NO: 146794 - DNA, 577 bp, Arabidopsis thaliana landsberg; identical to SEQ ID NO: 67236

SEQ ID NO: 146795 - DNA, 2148 bp, Arabidopsis thaliana landsberg
ccccaaagaacttcttcaacttctctcctcaacttttaagtatttttcactttcaaacacacacacacttgacttttctcatataatttcgacagctcgtgaaggacaaagacatggagccttctcggaggagaatgaccagagacatgttgcttctaatcgtaacgatggcatggctcgtaaccggagacgaaggaggcataaagcaagaggagcgactgtttaatcttgggaagcttgagatgttcgttgacaagcttcctcatataccaacacttcatggctaccacttcgtcaatggcttcctcaaacccaaatctcttcacataggcatgttcttcaagaaatgggtatttaattctttccttcttctcattttccttatattctaatttttgtttccttgttttctaatttctttcctctattatatattttccccttgttttctctgttttcttgaagttatatttggtatgttattaaattaaatttccagtctatagtcgttcgtgaaaacagatcatcttccatttctgtcatgaggttataaatggccaaaatatttagatagaaaattcaaataaccatcatttagtgatttacacctgtattacatgcaaaaaaatagactcattaactttcttgaccaacttaagccgactaactaatgttgacattatctccttaatgaaaaacattaacattaaattcgatatcgtataagattagtgaagttaatttgctttttacttggctacggctcttcttaggttgtaaagtgattagaatagattcgtgttgtgttcacactattgtcccctcacttgtttgtcgtctttgagaaaaagtattaataattgtatactttttatcactcgtcatgttgaatattatttgcccttcaccgaatgaatactcaaattcctctttgttcataaactaatctaaactcattaatgacaaaaattaacattaaatattcgaaatcgtatagatcagtgaaaacttaagtgctttttagttggctacggctctttgttggtaaagtgatttggaattgattcatcttgtgtactccactcttatcctctcacttatttgtcctcttgagaaaaatatctattggtttatagtactgacgaatcagtgctctttctcaaatttaatattattttgctctcctaccgaatgaatacacatttttttttatagtttctataagctctttaagttttgttctgataaattatactaagaacatcatcaaatctaatgattaattgatagaaagttattacccactaactatataattatgattgcttttctaccactttggcctagctaattgtgctctgtttctttaaactattttattactctgctaatgattcgaatgatttaagtttttaaatattctctaacactgtcacacactgatatgagttaaatcattgtgaagtacagaaattccacagagacttgcctgccacgccagtgttcgcatatggtacatcaaagcgttcagcaacagttccctgacccaccaatagaagctgtttatggcgtcgacacctacgtgacgtggcgaaatcacctccctttacatcatatcctcccttgggacccaacaatctctccggcaatccctaaacacggcggcattcccacggtggttcacttgcacggaggtatccacgaaccaactagcgatggaaatgcagattcatggttcaccgctggtttcaaagaaactggttccaaatggaccaaaaagactacacattacgtcaataagcaacaacctggaaacatgtggtaccatgaccacgcggcagggttgaccagagtcaaccttctcgccggtttgttaggctcttacattctccgccatagctcagtcgaatcgcctcttcggttacctaccggacgcgaatttgatcgttctttggtcatctttgaccgatcttttcgtaaagatggctccatttacatgaacgctacaggaaacaacccaacgattcatccacaatggcagccagagtatttcggcgacgccatcattgtgaacggtaaagcatggccgagattaaccgtccgtcgccggaaatatagatttcgaatcacaaacgctagtaacgcaag

SEQ ID NO: 146796 - DNA, 1489 bp, Arabidopsis thaliana landsberg
tttgttatatccaacttctgagatatggcaagcagcaccattgatgttaccaagtatggtcacagtcctgttcatcacgctgttgtcacaagggattatgccggtctcaagaaactattatccgctcttccgaagatgcgtgacccgtctgaggttcaaaacgaagcagcttctgtagctgaagagacaaaagcggattcaatcgcagctgttatagacaggcgtgatgtggttaatcgagacacggcacttcatttagctgtaaagctcggtgatgagacctccgcggagatgcttatggctgctggtgctgattggagcttgcagaatgagcatggatggagcgctctacaagaagctatttgtggtagagaagagaggatcgctatgattatcgttaggcattatcagcctctggcttgggctaaatggtgcaggaggctgcctcggcttgtggctacgatgcatagaatgagagatttctacatggagatcactttccatttcgagagttctgttatacctttcatttctagagtggcgccttcggatacttataagatttggaagaggggtgcgaatcttagagcggatatgacactggctgggtttgatggtttcaggattcaaagatcggatcagactatactttttcttggagatgggtcagaggatggtaaagttccttccggttctcttcttatgatatcacataaggataaggagatcatgaatgctctagacggtgctggagctgccgcatcagaagaagaagttcgtcaagaagtggctgcaatgtccaaaacaagcattttcagacccgggatcgatgttactcaggctgttctcttcccgcaattaacatggaggcgtcaagagaagacagaaatggttgggcaatggaaagcaaaagtgtatgatatgcacaatgtagttgttagcataaaatcaagaagagtaccgggtgcaatgactgatgaggagcttttctcaaacactaatcaagaaaacgacacagaaagcgaggatcttggagatatcttgacggaagacgagaagaggcagctggagttagcactcaagttggactcaccggaagaatcttctaacggcgagagctctaggatttctcaaaagcagaatagttgttctttcgaggatcgagaaattccagtaacggatgggaacgggtattgcaaacaggagaagaaaggatggttcagtggttggaggaaacgagaggaagggcacagacgaagtagtgttcctacaagaaactcgctttgtgttgatgagaaagtaagtgatcttcttggggacgatgatgctgcatctcgtggaggaagacagataaaaccgggaagacactcaacggatgagacagttgtgaggaacgaaaacagggggctaagagattcatcataagcttcaacatcagaaggcaccggaagcagcgaacgaagagcatgaaacatagagattgagtgca

SEQ ID NO: 146797 - DNA, 839 bp, Arabidopsis thaliana landsberg
  unsure (1)..(839): unsure at all n locations
tcaaggctcgaatcatctctggagtagatgacgatcaaatcgccngaatgcgagccccaactaactatttgtcagaggatgatgttgttcgccgatttggcaatgtggtgaagctcatgaagggcatacaaaatgttcagcaacttcacttgcattctgatacactcgaggttagttttccattttcttctttctggtctagttgtaatgtattgattgcaagatgattttagctgcgttttgtttcttgtttcaggtgctttcaatgtgctgtgaatcgatgccggtgttcaacaacgtcaaaacgttaggcattaagagtgactacgacagaggatggcaagcagtgcctgctcttctaaggaattgtccacatctagaaaccctgacctttgaggtggaactataaaccatgaaactaactacttggacaaaacatgcagttcattcttatagtaaccttattgtctcgtttctgctttcagggtctcgtgcaccatgtgacagataaatgtggagatgcttgtgactgcattttccggaaggataaaggccgttcgctcaaatcttgtccagtaaaagtggtagagattaaagagtataaagtaacaatgaaagagatgcacctgatagagcatttcttgggctattttctgtgtctgaaggcgatgaacatctatgttgaagagaatgatcctacagagctcagattccctaaagtgtctaaatgtatcatgcagatgatggaagaatacaacaagttatcgagttgcaacgtcgaactccttgtgactgattacttctctgagaagtggactgcaaaaggaagaattctctga

SEQ ID NO: 146798 - DNA, 606 bp, Arabidopsis thaliana landsberg
agttttactccgctaacgtttatgtgtgttgatctaacatgtatataccataatgaattacgttgtgattagttgaaagagatggtagtagcgcttcttcacgaatcaaaactagttctttccgaagatatgattgaagtaatggtggataaggtaatcactcccacaccgatgcacatttgtttactagatattaattccaatactgaagatgatatgataaagaatttataaggaaatggtggtatatatttgcaggctttcgtgcaagcagaccgcaaaaacgacggaaaaatcgatatagatgaatggaaagactttgtatccttgaatccatcgctcatcaagaacatgactttgccatatctaaagtgagttcataatttacaccgtgactaactttgatccaaaccaactgctttgattgttgcattgaatcaaattgactaatcagaagattcttggtaaatgtagggacataaataggacgtttccaagtttcgtttcatcttgccaagaggaagaaatggaattgcaaaacgtatcttcctaatataagccatgcaaggaaagataaatatacataaagcgaatggttttgacaag

SEQ ID NO: 146799 - DNA, 3455 bp, Arabidopsis thaliana landsberg
taacgataatgttttcttgtggaccatggaatggtaggcacagttatcattgcctttgtttatgttctcatgtcctacccacccttaaaaggatatatagagtcctatttcttagcagtaggttgttcctaatgcattcgctgcttattttgcagaccactcttctggactatatcagaaaaagcaaggtatggatgagattagctattaatttgccttttgttatttaagaaatttcattgtggcctcttcagtttcttatcatttctaaagcatgtctactggcaattaatgtttgttcatttgcttattgtcaagattagtgctaagtagcgttgtcagctaatctcccttcgctggatacatgcaggttgctgcgtcagaagcaggaggaattacacaaggaattggtgcatataaggtgtcagtgcctgttgatggaaagttgcagtcctgcgttttccttgatactcctggacatgaggtagattctttttcttgcaattgaatcttcgcatgttcatttctgatgctgaagtatcattaattatacttcatgagctttcttacatgtagcatgtttattgactatctcacatctattgctaggcataccatagttttactcatcttacttttatgtcctcatctaggcatttggtgcaatgagagctcgcggagcacgagtcactgacattgcaatcattgtggttgctgctgatgatggaattcgtcctcaaacaaatgaagcaatagctcacgcaaaggctgctgctgtaccaatagttatagctataaataaggtattttgttattcttctttaccttgtgtatatttaagtttctcccagtcttattcatttcatgttccagatagataaagaaggagctagtccagatagagtgaggcaagagctttcttcaattggtttgatgcctgaagattggggtggtgatgttccaatggttcaggttggaatacatactttcatcacgtatatgtttcagggtccaaatgttccatgggttctcatatcatgctctatatttgcctttgacagatcagtgctttgaaaggggaaaatgtcgatgatctgttggaaactgtcatgcttgttgcagaggttagtttgttattcatcccatgataacagggttgcttgatttttccgtttctgttttcggtagatgcataatgaagctcaattttgttctcttcatgtaagcactacatagtggctacgaaatgacttacataattgctccaaagtcggcccaaaatcttgttttatggagggctaaagactaataacgcttacataaattcattttttttttctcccactttctgcttttgcttctcaattagcttttgcttgtgggctgactgtattttgctgtttcagcttcaagagttgaaagcaaatccacacagaaatgccaagggcattgtaatcgaggctggacttgataaagcaaaaggaccatttgcgacgttcattgttcagaaggggactttgaaaagaggggatgttgttgtttgcggagaagctttcggaaaggtctatcccaaatttgggttttcctcaagtcacattgcgcagatgatatataaacgctaaaaacttacctactttggtcttgctctgtttctgtgtttaggtacgagctttatttgatcacagtggggaacgagttgatgaagctggaccctccatacctgtacaggtttgtagtttcataatctaccctaagttaaacgtcattgcacacagactaatagaaatactctatgcaggtcatgtttattttcttggtgacaggattttgatactatgttctcatgtatagatgatttagatatctaatttgaggatctaaaatacatttgcaggtgattggtttaaataatgtccccattgctggtgatgaatttgagatcgtctcttcccttgatgtggcgcgggagatggcagaggcacgtgcggtatcactacgagatgaaggaatatctgcaaaggctggggatggaaaggtcacgctttcctccttagcttctgctgtatcagcgaaaaagatgtcaggcttagatttgcatcagcttaatatcatcttgaaggtcgatgtacaggtaaatagtcactttggattcatccactcatcgccttaaacattttggtttcctctgtctcttcttatttatgctgatgcaaatcatcaatgtgactactagggatccattgaagctgtaagacaagcccttcaagtcctccctcaggagaatgtcaccttgaaattcttgctacaagcgacaggggatgtgagcaacagtgatgttgatctagcatcagcgagtgaagctatcgtttttggatttaatgtcaaagcgtctggttctgttaagaaagctgcagaaaacaaaggtgttgaaatccgactatatagagttatatatgagcttattgacgatgtgcgaaacgcaatggaaggacttcttgagtctgttgaggttagcattgatttctttagcaatttgaagcgttttgttattgcctaatctgatcagcatttctctttagagttacacatgatgagatctttgttttgtcttctttccacatgagttggcataacaactgtttttattgttgggttgaataattgaattgcctgaaaaggaaacctctgtatcatgtcatagattatcataaaagcataggttttagtctcacttcatgagcctttttggagttttgaaactgaagattcatgtggctgttgatatttgataggaacaaatcccaattggctcagcagaagttcgagctactttcagcagtggaagtggtcgagtgacaggatgcatggtgaatgaaggaaaatttgtcaaagattgtggcatcagggtggtccggaagggtaaaactgtccatgtcggtgttcttgattctcttaaacgggttaaagaaaacgtgaaagaggtaaactatcaacttccatcttacatgcatagaacatggaaggagaaagtagagtcatcctaaactatcgacttctatttcacacgctgaaacatgtccaaatctaaaccaaattttgacttatcaaccttttcaactttcttacttggtaggtgagtgctggattagaatgtggtattggtatggatgactacgatgattggatagaaggagacatcatcgaggcctttaacgcagttcaaaagaggcgaacgctagaagaagcatcagcttcaatgtctgctgcgattgaagaggctggagtttaattgtgatccaggttttgcttctaaagtcatcaaagaaactcaagcgaacaacaaaatcagactctcagggtaagatttttggtcacacaacagttggttggtacattgtttgtaatggtctcattttgtacatggcaaatgttcctacatttggctgattgatgta

SEQ ID NO: 146800 - DNA, 1368 bp, Arabidopsis thaliana landsberg; identical to SEQ ID NO: 30541
  unsure (1)..(1368): unsure at all n locations

SEQ ID NO: 146801 - DNA, 1380 bp, Arabidopsis thaliana landsberg
  unsure (1)..(1380): unsure at all n locations
agtttttaattttcancggcgcagatgttcttggagctccaaggcaatggtggtttggtggtggcactgatttcactcctgcttacatctttgaagaagatgtcaagcatttccattcggtactgagccttattccttgttctaaagatatgagctttgtgatcatggagttgcttttatataaactgctctttgttgttgtagattcaaaagcaagcctgtgacaaatttgacccttccttctatccccgattcaagaagtggtgtgatgactacttttacatcaaggtaagttttgtgagatcctgaagcattttctggaactgagggccttattctttgagttgtgtttagggatgttatagtcaaatctgagagggtagaaactgcttagagagacgttcagaagcctattgttagtgtgagggctttgaaaacttttcttagaaatctttgattttgcttgcagcaccgtgatgagagacgaggacttggagggatattttttgatgatcttaatgactatgatcaggaaatgcttctgtcatttgccactggtaagggactgattgtcctcaatctacaacaaacgatttattttaattggtctagtttcttggtagactaatttagcaattggtgtttacagaatgcgcaaactcagtggtgaaagcttatatacctatagtagagaaaaggaaagacatggaatttacagagcagcacaaggcatggcaacagttgcgacgagggcgatatgtcgaattcaacttggtactatgaccaaaacattagtctttttctctgttctcactctcatctctccaatctttcgttatgaaccttgttcactaatgtatttgtaatgatggatggaaaggtatatgatcggggaacgacatttggtctgaagacaggaggacgaatagagagcattctcgtctctcttccgctttcagcaagatgggaatatgaccatgtaagttctttcctcatttgtgaagaaacttggtctaaattcaattgaatatggcaatgtagtaatggtgtttgtgagtgcagaaaccggaagaggggaccgaagagtggaagctattggatgcttgcatcaacccgaaggagtggatctagcctgtgtttcccattgttgtgagaagagtgagtttatttccattgtttcatgtaagttttgagcagctttagaggattaaataactggagagatgcaaaaatagagtgtgtaaggtcaggtcaaaatctagtcttgtgatgtgcatgataacatcatctcctttctctctttgcgatggcaatgaagacaaactaagagcagtgttgttaaaagtcaaaacttaccaatgcaaacagttggtttcttgc

SEQ ID NO: 146802 - DNA, 1468 bp, Arabidopsis thaliana landsberg
agaataaacaaggatcacaacaccagacactcgatgccaaacttacttaactcttaatttaacaaggagagaagagaaacgaaccagggatcagattcaggaaagcaagtaactaagcaagctcttttggagaagaaaagaaagacaaggacaagtttctcggttttgggattttacgttttaactttacaaaacaggattaaaccgaaattgaaccgtacaaaacctgtgcttaataccgtcatctcaaatattgaacggtaataaatcgacaacaatataaaattgattttggttcactaagaggaccagacttttctctcggacttgagacactggagagactgaatacgaccatgtcctcttcgctccattgctcgggtaaacttttaacaagggttcgaaatcgaatacacgaatatctcggtttgttcaattactgaaaccaatcgaattttttaatctgtttcgattttctagttttagcatttccggtttagttcgatttaaattattcggttaccgtttttgtttagaatcacagaaaaaggtgagattaaggaggagcgaaacatgacgaatccacttaattccaccgccgctaatcgctctaaccaggtatgttttgccggccagaactcatcgtcagttttgatttcggtttcgattagtgaaatttcgttctgattatccatttttctcagccgtctgatggaatgaacgatgtacttggcggcggcggtcagatccctaacgcggaaactaaatcacttaatacgaagtaaccgatttcatctcttttcatgcgaattgatttctatgttgattctaggttttgttaaatttatcggattaatattgattctggagaagcaattttactggtgaatttagtcaatgttaaactcgatttgcttgatttagggttttgtttgatgaattagggtttaatctgcttctgaatgtaccaagtctcttttcagtgtttcgcataggaagaactgttctgggcataagctaaaagaaatgactggtagtgacatattctctgatgatggtaaatatgatccaaatcaccagacaagaatccattaccatcaggatcaggtacttgtctcatccatttttacttttgttaggagttagttgatgataatggtatcttatgtaatggttactggttctgcagctgagccagatatcattcagcggcgaagagaatgcaacaactcccatgaatggcaaagatgatccaaatcaccagacaagaatccattaccatcaagatcaggtacttgtttcatcctccattgtactcttttcaaggattcagttgatggtaatggtattctaagtaatggttattggatttgtagagaagccagatatctttcagcggtgaaaagaaaatgactccaaagaaaccaaccactttaacgaggctgctaagcaaaaggagtatagcaga

SEQ ID NO: 146803 - DNA, 1118 bp, Arabidopsis thaliana landsberg
taaaccagtggtgttgaagaaagaattttgaatgtatcatctgtagctcatatttatacttaccaagaaggaatccaattcgacagcatcaatgacatttgcaggtaaaaattctacagtttttttacttgtttcaaaactaaataaatcttgatcttgtaaccatcttctttctttctttcagttactcggataagcgagcttacggacaatcgaaactagccaatatattgcatgctaatgagctctcccgtcagcttcaggtcgccttcacacacactgacacacacaaacacatatatgatatttcaaagtgttagtactatctcaaattcataaacacttgagaaaataaaaactcaaaatctttttggggacattgtttggtaggaagaaggagtaaacataacagcaaattcagttcaccctggtcttattctcaccaatctcttccaacacactgctctattaatgagtaagatttcacatcattttcttagtttctctgtttctcttcaaatcattccttttaattccgtttttggcagggttcttgaagttcttcagcttctacttgtggaaaaatatacctcaggtactatactagtagaaagaatcctaagactaagccaaattcaagatcttactctatgactatgttactaaataaagacaaatctaagaacaatattttgatgcttcttgtgatgttgtcagggagcagcaacaacatgttatgttgctctgcatccaagtgtgaagggagtaacaggaaagtactttgctgattgcaacgaagtcactccaagcaaacttgctagagatgagactttggcacagaaactctgggatttcagtgttaagttcattaactcggtttctaaaaagaactacctcggtttcgatgacaccacttgaatctctacggtgttcttgttgaatgttacctaaagagtgaaaaaaaagtaagaacaagtagagattgtgatgtttctttccacattatcgtatggtaactcatgagatgcattgttgtatgcttaaatattttatcgagtgaatatgtaaccgcgtcaatcttttcatagtatggacaataaaaagaagggttgttcatc

SEQ ID NO: 146804 - DNA, 2275 bp, Arabidopsis thaliana landsberg
gtaatagtagccgtcatcattctttgaatgttcttggtttaaccacaggactagacctcggcagccatagccagcgagcaggccaagacgaaactggaacggcgagtcaagaaccacctccaaaagtatcactcacccgaatcgcggctctaaacaaacccgagatcccggttcttcttctaggaaccgtagcagcagcaataaacggcgctattttcccgctttttgggattctgatctctagagtcatcgaagcgttcttcaaaccagctcatgagttaaagagagattcaagattttgggcgatcatatttgtagctcttggagtaacttcgttgatcgtctcaccgactcaaatgtatctgtttgcagtagctggaggaaaactgattcgacgaattcggtcaatgtgctttgagaaagcggttcacatggaagttgcctggttcgatgagccacagaattcgagtggtacaatgggagcaaggctctcggctgatgcaactttgattagggctctagttggagatgcattgtctttagccgttcaaaatgttgcatatgctgcgtctggattgattatcgcgatcactgcgagttgggaactagctcttataatcttagtgatgcttcctcttattggtatcaatggttttgttcaagtcaagttcatgaaaggattcagcgccgacgcaaaggttcgtacatcaaccggtttggttccattttttttaggctctgcaaaaatcctttgttttttttcttgtgaatcgaggaacttactctggttttggattactatgcagtcaaagtacgaggaggcaagtcaggtagcgaatgatgcggtagggagtataagaacagttgcgtctttctgcgcagaggaaaaagtgatgcagatgtataagaagcaatgcgaaggtccgataaaagatggaataaagcaaggtttcatcagcggattagggtttggattctccttcttcattctgttttgtgtctacgcgacaagcttctacgcaggggctagattggttgaagatggcaagactactttcaataatgtcttccaggtgaataactgtcttaatcactgctcaagtactgttgaaaatctctgtgacctagtaatgaagaagaatggatcttgcaggtgttctttgcgttaacaatggcagcgattggaatttctcagtcaagtactttcgctccagattcgagcaaagcgaaggtcgcagctgcttcaatcttcgcgatcatcgatagaaaatcaaagatagactcgagcgatgagacagggacagtgttggagaacgttaagggagatattgagctgcgtcacttaagcttcacttatccagcaagaccagacattcagatctttcgtgatctttgcttaaccattcgcgcaggaaaggtaaacaaactcttaaaccaagctgtatcttaggaatttttaatcttcgattagactattaaacaaactctttttgtttttctcttagactgttgctctggtaggagaaagcgggtcggggaaatcaacggtgatctcgctgttacaaagattttacgatccagattccggtcatataactttagatggagttgagctcaagaagctgcagttgaaatggttgagacaacaaatgggactagtgggacaagaacctgtcttgttcaacgacacgattcgagccaacattgcttatggcaaaggaagcgaagaggccgctaccgagtctgaaatcatagccgctgcagaacttgccaatgcacacaaattcatctctagcatacaacaggtaatggaaaaaaaaaacagaacaaatttgtaagaactctgtttttcaaagtttcttacaatgcaagcaatacaatttttagggttatgacacagtggtgggagagagagggatccagttatccggaggacagaaacagcgggtggctatagcacgagccatcgtgaaagagccgaagatattgcttttggacgaagcaacaagcgctcttgatgcggaatcagagcgagtggttcaggatgcgcttgacagagtgatggtaaaccgaaccacgatagtggtggctcaccggttatctaccattaaaaacgctgacgtcattgccgtagttaagaacggtgtgatcgctgagaaagggactcacgagacgttgatcaaaatcgaaggtggggtttatgcttcgcttgttcagcttcacatgactgcttctaattgataatgatataatgttttgtttacgatagcaaaaa

SEQ ID NO: 146805 - DNA, 1143 bp, Arabidopsis thaliana landsberg
  unsure (1)..(1143): unsure at all n locations
tggtgttagtgaagcaggtttgagcttactccgtgatcaatgaacaatgatgcaatgtttctagtttcttgactgatatgaaattttcatcaggacgtggtgctaaggaggcaaatctttactctgagatagctgaaggcatttcttcttatggtgtcacccgtcatcgccatggtatgtcacaaactaattatcacaatgagttaaaattttgccatgatttgaattcaatatctcttttgttttgcagttcctgaaattgaacagggattatctgatgttgcacagtcaaaagtaacagtcagttttacgccacatctcatgccaatggtacaaataatcttagcatgatttctataatttttaaccttaaacccattaactgatcctcagttgtttgggtagatccgtggaatgcaatcgactatatatgtggaaatggctcccggggttagaaccgaagatttacaccagcaattgaagacgtcttatgaggtgatgattactcttatgttgtaagccaattactacttttgttacttattatgtttcaaaaatgttttgtaggatgaagaatttgtcaaagtgttggatgaaggagttgttcctcggacacacaacgttagaggatccaactattgtcatatgagtgtctttcctgatcgaattcctggaagagctatcataatctcagtggtaattaagcataaccatcctctgttataaactcatctttagctttcgacaatattgctttgtgtataaaaagctctctggtgttgcagattgataatcttgtgaaaggagcttcgggacaagcgttgcagaatcttaacataatgttgggatatcccgaaacaacggggctcctacaccagccgcttttcccttaaaaatcccacctttaaatcggtaaaatagcattcttctctcttgttggctctgtatcttgaagatatttctgtcattagatttgcctgcttaagcgtttgtctttattcctatcttcagatgaccaatctgaagctgttgagacggcaatgttaagcataaagatggttggttatatgattcatatttatagacaataaagcctcttcttttaccattacaaataaatggnnttgttgtttgtttattaag

SEQ ID NO: 146806 - DNA, 883 bp, Arabidopsis thaliana landsberg
cactcccatcactcagtccacgatcctcaaaccgatcacagccgtccacagcctaatcctctgtctcctctccttagtcatggccgtctgtgcactctctcaataacctcatctcacgcgtcttcagatccgatggcgcgtttccttcacgcgatttgctttcccgtcgacgttaaacctaacggaccgcttttcttctgggctcaagtcttctacctctcgaagatcctcgagttcggagacacgatcctcatcatactcggcaaatcaatccaacggctatccttcctccacgtgtaccaccacgcgacggttgtggtcatgtgttatctctggctccgaactcgccaatcgatgtttccgattgcgctcgtgacgaattcgacggtacacgtcatcatgtacggttactacttcctctgcgccgttggatcgaggcccaagtggaagagattggtgacggattgtcagattgttcagtttgttttcagtttcgggttatccggttggatgctccgagagcacttattcgggtcgggttgcaccgggatttggggatggtgtttcaacgctgcatttaatgcttctcttttggctctcttttccaacttccattcaaagaattatgtcaagaagccaacgagagaggatggcaaaaaaagcgattagattggtttcttggacaataagtaaaacctctcattgtgtcttgaattgttgattagtttccacacaaaaggattaattgtcttgaattgttgtttattttgaaatttttgtctgtgttgtacttgcaaatgttgagatacttttgtacttgtatgaatataagatgacagaaaatttcaaatttcacaaaagtcatgacatggactcatcatct

SEQ ID NO: 146807 - DNA, 1394 bp, Arabidopsis thaliana landsberg
cgaacacaatctgcttcaagaattagggttttgatcagacacaaaaaagtatctctctccgtagttttgtgtcaaggttatgcaagaagcggcgctaggtatgatgggagccaccgtaggcggagatggagacgccgcggtcgtggcggagcagaatagacagttgaaaggtgagatagcgacacatccgatgtatgagcaattattagccgcacacgtggcatgtctaagagtagctactccaatagatcaacttccgatcattgaagctcagctttctcaatctcatcatcttctccgttcttacgcttccacggccgttggataccatcatgatcgtcacgagctcgataatttcttggtacgtttgaatataaatttattcgttttattaaaaaaaaaaatcttgtttggttaaattactcacaagttctgtttctatcatttttcttttttgatggtttctagtggactaactttgaatgaagttatgattactaaccaatctttgttgggaaattatgattttcaatgatttttcgtggtttacttttacaagatcgttgggagtttactcgcacattaaagatgtaaaccttttgtcacaatatacaaactatttatataaattttataattactaattactcttgtgggaaattaattatatttcaaacaaattatgttttttttttgcaatgattttaattagtggtatattttacctgatttttgtgaagggttttgttcaactttcatggaaatttatgtatcttcacacaaatgttcaaatgtataacacacacacctagatgtagatattgttttgtgtatagttaggtgctaaattcacatagagtgagtcaatgttaaatgtcattttgtaattaaattgaaattctatttaaactgtgaatatattatcatgttgattgaagtcggcgattgattttctactccgaactaaaatttgcaattgcattaaagttggaattgatattgcaactataattttggaattagcttgtgaaatgttccaaaaaaagattcgggtttctttatatttatttaagttaggtagaaaataggactatataatgatctaaccgctcaaaacacaccacaccagaagcacatatctatatgtgtgtatgcatacatgtggaaaatgttaacatattgactaaattatatgaaatgtgagaggatattaaaaaattaccaattatatttaattggaaacaggcacaatatgtaatggtgttgtgtagcttcaaagaacagctgcaacagcacgtaagggtttcatgccgtcgaagctgttatggcttgccgtgaaattgagaacaaccttcattttcttacaggttctttcttttctactttttttaatg

SEQ ID NO: 146808 - DNA, 1283 bp, Arabidopsis thaliana landsberg
gtcgacgctacttcttcttcttacttctttcttctggatctgattcggatccatcactctctctttctctacatcaatttggtttctcagagcttcatctttttttcgtatacctgtatttgtcgaccttttctctcaatcactaaaccctcaaatcctttttttggattataagattgcttctctgactgcgattgctttgatgtgtatcagttgacttgtgaaaagtctgcgagtgacttcttcctgtttacacatcagctactccataatctctcaggtactaattttctcagagtttgaaaaagtttggattttgatctgatccttgttgaataaactattccctcttgcttatctgatccattaaccaattgggtttgcagtttttttagtttaaagttgggtttttgatatcatttttgctcagccaagtcgagagttttcagattctattaagcttataaaattgttgttttgttcagatccttacttttaattctgttttgaattgcagattcttaaaagcttaaatcttttttcgactttgattgtttctgtgcatcgctttgacggatgtggaggaaaaaggggtgtcttgatgaaatgagggatgttatcaacgttaatgaaactcttgagtgcttgtctgtggccgtcttcttcctcgggcaagtcctctgattcaactggaaaacaagatggattgctttggtacaaagactttggtcagcacctcgttggtgaattctccatggctgttgttcaagccaacaacttgcttgaggatcagagccaagttgagtctgggcctttgagtactcttaactctggtccttatggaacttttattggaatctatgatggccatggcgggcctgagacgtcgcgatttgttaatgatcacctttttcagcatctaaagagtgaggaaactgaatgatatatgcataccaggttacaaaccaaccgtgcggaaactaaaatcttgtttgaattttcaggatttgctgcagagcaggcctctatgtcggtggatgtaattaaaaaggcgtatgaggcgacagaagaaggttttttaggggttgtgacaaagcagtggccaactaagccacagattgcagcggttgggtcttgctgcttggtgggtgttatatgcggagggatgctttacatagctaatgttggggattcccgtgcagttcttggaagggctatgaaggcgacaggtgaggttattgcccttcagctctctgctgaacataatgtgagtatagagtctg

SEQ ID NO: 146809 - DNA, 678 bp, Arabidopsis thaliana landsberg
aaagctcagaaccttaaaacatggagtctctatctcttcccgttctaaatcctatgttagcttctggttctaatcttttaagaaccagcactcgaggatgacctcttcaatggtatcttcacttaaatcccccattggaggcacatcgctctccactgttcgtcgctttgtaagttgattctctattttggttttatggccttatctcgttttctccattcgatttttttgattggaagcgaaagtaaaattttgacactctttgttgttgaatagggagtaggtgttgttaggatgcaagctgttgatgaagatattgatttgaagcaaatgagagacatagctgctgctaaaaagcgttgggatggtttggtaaccatcacttacatcttaaaattggaacattggagtgattatggttcatgtttttattttcattgttattcaactgttctcactattaacaaatgtattgtttgcatagttaagggaaggaaaagtgaagcttcttacaccaagagaagcaggctatgttatttctctttcaaacaaacctctccgtgatgttcgtccctctagcgagcgcatcaaggtacattcgtgttttctaaaacaatagactgcatgtttacttatccatagattatgattgtcttgtctaaattcagccctgtacga

SEQ ID NO: 146810 - DNA, 1570 bp, Arabidopsis thaliana landsberg
ttcttgctcaggccactctagaacccgagctcgacctcgaaggctctaataaaaaattctcaatattcgacatatggaagcaatcctatctaaaaacgtgtgcaacggttgatcaagagcttgaacatcaccgcaagatcgattcttactatagcggcacaacagctctaaccattgtgagacaggaaaaactgaaaatgaatattagtttgctcctattgttagtaaacgttttttgagaatttttctgtgcactgattaatggtttattggcgtatgtagggtgaagttatttatgtagcacatgtaggcgattcaagagcggtactagccatggagtcggatgagggaagcttggttgcggttcagctcaccctcgatttcaaaccgaatctaccacgttagttttcttaatccctcttaaattccataagcatttttaccttactagatctcggaagttttaacttccgtcctcttagaaatcaaagaagcaaacaaaatacaaatcttatatgtatattctagtgaattcttgactcttaatcttgaatttgggttgctttgaaaaacaaaacagaggagaaggagcggataattggctgcaaagggcgggttttctgtctagatgatgagccgggagtccatcgtgtgtggcaaccagacgcagaaacaccggggctcgcaatgtcaagagcattcggagactactgtattaaagagtatggattggtctcagtccctgaagtcactcaaagacacatctcctactaaagaccacttcataatcttggctagtgatggggtaaatacttataaacctttacacaaacaaaatatactcatccacactcttaaaacgttcaaaaagttataaaaggtcaatttgaaaagaaaagaaataaccacatttgaataagagacttggtaataccaaaagaaaagcaaattggaatattgtttatttgatttaggaatttttaatccgaatttaggttttccttggtttgagttttttggtttaatgaaaattactcattggtatataaatctattatgaatcgacttgagtggttttggttcggctttgatgtttaggtagatagatttttaaagttcaaatgtatataaattttggtgtttgtatacattttggttcgatttgaatcgacttggtttatcttggttgtacagtcttaattaaattatttatcggcatctttagtaattaatctttttatttctctttggtttgaatgtaaaagatatgggatgtgatctctaaccaagaggctatagagattgtctcctcaacggctgagcggcctaaggcggctaagcgattagtagagcaagcggttcgggcttggaagaaaaagagacgaggatactccatggacgatatgtcagtcgtctgcctcttcctccattcttcttcatcgtcatctctatcaaaacatcatcatgccatgacgatttcaaagtaaaactttgtgttgtagatagatcagcgataatgttacatttgtaacattccttttgaaatccgaaatgcgtttttttggtcgaa

SEQ ID NO: 146811 - DNA, 736 bp, Arabidopsis thaliana landsberg
gccgccgaagttttgtgcaatggcgacgaaccccacgtttcagctgttttcttcttctcaaggttctggtctaggtttagggttccttgattcaccagagccagctcttcctccacctcctcctcctgttgaagtattatcctccgaggtatcgtcactactacttcctctgcaactccatcttcaatttcttatgtaagtttccctctttttgatttctggtgatttcgtcgcagtaggtgtcttcctccactgatttcgaagtggataaagtgactatcggcgagatcactcttctgaaggtatgtttctgtcgagaacattcaccaaactttgagaaagtaatggagaaattgagttttgttagtttctggtttggttatagggtcgtgtgagcactaaagaggtttttggattgcctaattcagatttggttcctggagtctatgaaggtgaatgatttgttctagttatagtttatgtgatgtgtatgcccctgcattaagcagttttgtaactcttgaattcgattgaatctaggcgggcttaagctttgggaaggatcgattgatcttgttaaagctcttgagaaagaatcacaaaccggaaacttatcattttccggaaagcgggttctcgaggtaggctcttctgccttagttgtcaaacgatgatggatacaacgtgttcttcacatcactaacataagatattgaatctatatactcagcttgga

SEQ ID NO: 146812 - DNA, 1415 bp, Arabidopsis thaliana landsberg
  unsure (1)..(1415): unsure at all n locations
ttcacgccttgacgccttctccttccgtttcttcaacctctcgccgctaattaacgccgtctctggttgctaccaccgcggtaaccctaacggcatttttaatggcgtcgtgtgatgacgatttctctctacttggagacgatcagtcaaaccctaatcaacatcaccaccaccaccaagttcttcatcacacgccctacgctcctagacgattcaacccgaaaccatcgaatcagatccttttaccgcatcaccagaggaacggcgacgaggacgacgagaacgatgtcgttgtagaagcgtcttctgctttccacggtcacggtgttaatcctttcacggcggacgaaaattcgaatccgtatgatgataataacgcagctgtagacgaagacgaagacgaagatctcggtgccaacagatctagaatcggaggtgttcgtgttgagaagaggcagagtcaggaggagctaagtgacggaggaacaacaaatggcggtgagattactccctacggtagcttcaagagaccgaggacttcgtcttcctcagctggtgagtataggaaggatagagaagagtggagtgatgcggcgattgcgtgtttgttagatgcgtattcggataagttcacacagcttaatcgagggaatctccggggaagagattgggaagaggttgcttcatcggtgagtgagaggtgtgaaaagctgagtaagagtgtagaacagtgtaagaacaagattgataatctcaagaagaggtataagcttgaaaggcatagaatgagcagtggtggaacagcagctagtcactggccttggtttaagaagatggaagatattgtgggcaattcattggccttgaaaggcgcgtctgatgaagatagaagcggaagctcaatggggaatactgtgaagccagctagaaggtaatgcagaaacgatcactagcaactcttttgtattttgtgctcttgtgaaagtgaaagtttttggttttgtatttcttgtttcaggtatcctctggtaacatataacccaggagttcagattaataacgtcaaatcaaaggctacatcaaaccctagatggcgaagagtggttctnnnnnnnnnnnnnnnnnnnnnnnnnnnnnnnnntcctaataacattgatccaaaggtttcctccagaatgtgtaatcttttgttgattcatgcattttctctatccgacctcagcatcaaattctcttttgattatttaggtaatcaatctgattgcaagagaagttgcaatggcttgtcgtcttggtgtagaggtaacacttagttctagattgttagcgttttatcctttttcagttaaaagtagttggttcttccaggtagcgatagttgttggagtcggaactttttttgtgacagcacatgg

SEQ ID NO: 146813 - DNA, 3023 bp, Arabidopsis thaliana landsberg
ttgcgtattccctgatcatgttgccaagagtgcagaagtgactaaaggtgtcacaataaattggggactatgaacttcatgatcttgggattctaaggtaagttgaatgcgcccaaccacctctaattgatatcatttctatcggtatgatagctttatattacacgatgcagtgactttagctttggagtaatcctaaaacttgatagtgaagctatccaggtaacttaccaatcatacaaatgcctcttatcatgtcaatgctataatgttattatttatttcaagatttgctgtaactccattttatttcagattcttaaaggggttcctgacagctcagaggtctctattgtcaaagccagcgaaataaaatacaaaatttggaagaaaatcaatgtgcaagaccgttacaaaaatgtcgtcgcggtgaaagatgttgtcagggtcattgacggtcctagcaaagtgagttcctttgcagtctggtcgtttttttgttagcaaactctttaaatatcatttgataagtcttataccgatttatatatttgtgatagggtaaacaaggtccagtggtgcaaatctacaaaggagtgttgtttatacatgaccggcataaccttgaacacactggatttatctgcactagatgctcatcttgtgttcttgctggtggcaatttcaagacaccagccctggttcctccatctccaaggagattccaacgggcagacatgggatataaccgtatgtcagatttcttcgtattattttggttctttattcttgactcgtccagtgcatgttaaagaggggcccccctacgtatgacttgtaaataggtttagtctgaaactgttatgcgtaacttagaatgcattcgtttactgcagctggagctggagggagacatcagggtggacgagggagaaggggtgacgatcatttggtaggtacttatgtcaaaattcgtctggggcctttcaagggatatagtgggcgtttagttgaagtcaaagataagctagtgcgtgtggaacttgaggccaagattgtgacaggcaaggtccactgtaatttcacttctattcacagctggttgctgaatgttgaatgaattctaactctttttgtatgaacagttgagcggaaggcgatatcagatatgactgataatgtagtcgcaaccccgcagtataatatgggaagccaaactcctatgcatccttcccggactccaatgcggcattctggaggtttgtcaccttaatttcgcagtttcaagatccaatcatttgtttgtgtttttgtttctcatttgacaacatgtttgatatgtttatgtaaaaaattcagctacacctatccatgatggaatgaggacacctatgcgtggtagagcttggaatccttacatgcctatgagtcctcctaggtaagtttgtgttgcgtttctattttcaaaagttgatttcctctttaatctcctcttggttctcttaaatgctgttgtaatttttgcatcaatgtgaggttatctgttatgtttacaaacatggctattgtctctcaaattattctcagaaattcttaacacatgtctgagaattgtaaatcttgattgaagaataaacttggatatctctcaaattatggttgttatggcatcagggataactgggaagatggaaatccgggatcttggggaacgagtcctcaatatcaggtaagatttatacatctattgttttgctttcaaccttattattggcttaatgtctctgacatatgtagtcgtgttaattacgcattaaaatcgatggtgttgcacttgtttccagccgggaagtcctccttcacgggcatatgaagcaccaacgcctggctcaggatgggctagtactcctggtggtagttactcggatgcggggacacctagagaccatggttcagcttatggtaagatgcgtgtaatctttttcaaaatgttgacttttctagtctggcccgtctttttcttacataccttgtcatgcagctaatgccccaagtccttacctgccatcaacacctgggcaacccatgacaccaagctcggcttcatacttacctggtactcccggaggacaaccaatgactcctggaactggcctcgatgtcatgtctcctgttataggtattgtctattgtcggggtaatagtcaaaaggataaatgtttagtatagtccgaccttgcatcttccttctctcagtcccccttagttagaagtttccgtttctatggttgttttcttagcttattgtaaatgcaacaggtggggatgctgaagcatggttcatgcccgatattttggttgacatacacaaggctggagaggacaccgatgtgggcgtcatccgagatgtttcggttcgtcttttacctttcaccagttttatttaaataaagagaacttctagtgataaacaaaaccaggagaaaagtcaatgatcaaagttacacatagagaagctcgtagaccttgactgcgagaaatgattctgttcatgttgagtgatagctcctttctaatgctaatattcttcctatgtactacttttgtcaggatggaacgtgtaaagtgtctctcgggtccagcggtgaaggtgacactataatggccctcccaagcgaactggagataattcctccgaggaaatccgatcgtgtcaaaatagttggcggtcagtatcgtgggtctacaggtaagctgatcggaatcgacgggtctgacggtatcgttaagatagatgataatcttgacgtcaagattctggacctggccttattagccaagtttgtgcaaccgtgatactgttctaatgaacgttaacttttatcttgtgagactcgtatattgtaatcttatattcctcaatagtttataaagaaactttgaatcttgtttatcatcggagaaaacatctgaatcttatctccagttttgtgtttttcttgtaatgcctctatcttttctat

SEQ ID NO: 146814 - DNA, 1728 bp, Arabidopsis thaliana landsberg
cccgtcctctctccagtcactgtttccgaagccctaaagttttcaaggtcgccgattaaatcaccaaaggaggcgtttttatactattcccggttcaacacatggcggaggaagaggttatcgctatccccgtgcagctatctgaccacaagcgcaagcttgagaatctcgaatcggagatcctcgagcagcaacacgccggctcgattgataatgacgtttctgtagatgatgacaaaaacgcatctgattattgtcagctgaagcgaccgaagattgacgatgaagctgttgatggtttaggtatgtctgattcctttcaaagtatggattttggtggatgcatatcgaaaagatttcacctttgttcttaatattcgttgttacggcattgtgttgtagggattgggggaactgtagaaaacagtggtgatgttgaatccaaggaggagggaactgagaaacccattgctcagagtgatgagaatcaagatggtaatcctttaattgagaaagttcaggagaccattgatgctgaggaatcggacaataagatggaagataacggtaagcctgaggataaccactagttactctgaggttgtacctctcaggacgtttctgttgaagaaagtaaggaggtgacattagcggtcacagaatgaaggtgaggatgatagtaaggaaacgaatgatgttgttctcagaaagaagttgaaaacggtagcaaagaggtcactgattgtgactctcagaaggaagatgaagcaaatgctggtggcgagagtaaggaagtgaatggcagtgtttctcatgatgagattggtgacgagagtaaagaagtgaatggtggtagtactcataaggaggttgatgatactcagtccacgactcgttgaatagatgtcccgagttcaaaggtgacttgatttggtttcgcttttgactctttagtgagtaagttttgctgagttttggcttcaatatatgtgatcttggcacacttgacaggttggcacgctaattggtaaaggtggggagatggtacggtatcttcaggtcaattctggtgctaaaatccaaatccggagggatgcagaggctgatccaagttcagctttaagaccggtggaaataattggaactgtttcttgtatcgagaaagcagagaagcttatcaatgctgtcattgcagaggtttaaaagttttctttgacattatccttttttaaatcacaatcttttagttgtctatgctaagagttggctacatttttcttcttctgctgcaatcccaggttgaagcaggaggtgtacctgcccttgctgcaaggggggtcccagaacagatggagattaaagttccaagtgataaggtagaccctggtaactgttctgattggccatttttaagtgataactaatccatcttcaactcacaggttggtgtgattattggccgaggtggggagactatcaagaacatgcagacaaagtcgagagcacgcatccaggtgattacttctatttaatcttgaatgtatggagagtacagagaaagattgtgacaatattgcttgttacgggtaacagctgactaaaatagttttcatatagttgataccacaaaatgaaggtgatgcatctaaggaaagaactgttcgtatttctggtgataaaaggcagattgatatagccacagctttgataaaggatgttatgtaccag

SEQ ID NO: 146815 - DNA, 1513 bp, Arabidopsis thaliana landsberg
  unsure (1)..(1513): unsure at all n locations
acaacactgagaagtggaaattcaaataaagatggatgattatgaaacccctcttttgtccaaggactcatcatcatcatcatctgtgattacttcatctttgaaatggatattgaaagttgtaatgtctatgatttttgtgacttgggttgtttttcttatgatgatgtaccctgaacaactcggtgatgatttcctcacatttgtctcctccaagactttcctaggcaccacaggttacattaacgagcagatgctttgctttctacggaaacatgtccaaaaagtgtaactaatttcatcctttaattgtctaaatttgcaggaaccatgttcttgattttcagttgtccgattcttgtcatctctgtcttagcttctctctatctcattatctccggggaagacaaggtcttcactaagtacgtgtaataatatccccaattgcattcttttggttgtatcaatttttgttcttgcataaatgtgtgtgtcatgatgattgtgaaggaagaagatatcgaaattcccgaggtttaggctatggacattccctgttcttgtggatggaccatttggagttgtttctgcagctgagtttcttggaattatggtcttctctgtttttttcctttggtcgatctatgcttataccttgaggaatcatgaccttcttgaacgcttccacgtccatcccaagaatcaaaggttcttaaaactcttcctttttttttcccatctttgtctttttccttctcattccaatcattagttttgtgtgtgtgtattttcagcattcttctgttggaggtaacgggtctgcgtttaggaatgattggattgttgtgtatggtttttttgtttcttccaatctcgagaggttccattcttctccgtcttatcgatatcccttttgaacatgctacaagatatcatgtttggcttggtcatatcaccatggctttcttctccttacatggcctctgttatgttgttggatggatcattcaaggtcaacttttagagcttgtaagatcctacaacatcattgaatcttgacataatagtatagcctagtttatctactatagtatagtgtcgatcatcggttcaagataggtctatactctataagtcacaattttatcttcttattttctattgtaaagtttcatcatcatcaactacttactcctctcagatattttcatggaatgctatcggaattgctatcttacccggagttatcagtctagtggcgggtttactgatgtgggtcacatcgcttcacaccgnnnnnnnnnnnnnnnnnnnnnnnnnnnnntacacacatcaactatacatcgtctttattgtgttcttggcacttcatgttggtgattacatgtttagtatagttgctggaggaatatttcttttcattctagaccgcttcttgaggttctgccaatcaagaaggactgttgatgtaatctctgcaagagtttaccttgtggaactcttgaactagtcc

SEQ ID NO: 146816 - DNA, 2351 bp, Arabidopsis thaliana landsberg
gtgagttggaattcaccttggttccattttccgctccttacatagcgatcgcactcacacagccgtcgaaggagagccaggataagcccgatggcgagatctgcgacgtcttcggtgagaacgtcgggggtgttggtgacgcggatccctttttctttgcatttccccaaatcgatcttgtcgagcccgacgctgaagctggatacaatctcaaggttgggcagatcgctgatgagctgagcatcggcgccggcagaagcattcccaacgacggcgcggatggagttccgatgagtttctatgaggacggatttctccggagaagtccagaagcgaagaaggttgaagcgcttctcaagctcgttctcgaggtaagaggacatggggcacatcataaggactccgattgattccatatctccttttctctgtttttttttttttatttttcttctgcaaatgattgagtcagtgagaggtctgtgtataatttatcggaggttgacgataaagatgggcctatttttgggcccataattgatattatccgctttttatgggccactaaatgacccttttcaagttttcctcttggttccgaaatcatgacttatgtttaaagacaacattgcacgtttgatgatattcatgcaaattgttgtaggattcatgaacatgatacaaacacaagaagacatacactgtatgtgtatggaaacgtagcagattccccgttgacattgcatgtttagggaatccagtgacaagggtgtaatcacattttagtatgttactatatgataacattttataatttaaacggctctctatctctaattatcaatgttcaaaatcctaaataatgattagttaaaattaagaggtgtggtctgaaacatgcgccccacgtcccatcttccaaaaaaaggaagcaaaagaagaaagctccacaattttctcaaagccaaaatcactgtaacaattaccctttattgttttgcggctcgattagcttctccttcccttttgattctccccatctcaagagaggcccatttgatcctctctctttctctctctctcctctctaattctctattgccatcaagagaccaggaatggttcgtgcttcggaacaagaacaggaaacctataggagcaggctcttcaatttcaaatggaggaacaacgacaacaatagtgctacgagacacaacaagagtctcagcgtcgagaccggtttagatgaggctgccaccggatcccatgacgctgaaccattgaccattattcatcctagtcagggtccaccactttcaagatcggctgcggatgaagcagtcctcgccgccctcgccgcctcacaggctagagaaaggcagcttttggcagacatggagcagatgaaagagcgcttctccaagctgttgctgggagaggacaattccggtggaggcaaaggagtatcctctgctctcgccctttcaaacgcaatcacaaaccttgcaggttgctttaggaccctcttttgttattacacttagtttatattaaccagcaaccaatatctcatgtttatcttgttggtatagcttccgtgttcggagagcaacggcgcttggagccaatgcctgcagaaagaagagcaagatggagaaaagagattgattggcttctctccgtgaccgattacgtggttgagtttgctccatctcagcagaaaaataaagatgggaccaatatggaggttgtctatctgctgctgctgctgcattatatttcatttggtaacatacaatgattcccttattctgttggtattgatttaacagataatgaccacacgccaacgtactgacctccacatgaatatccccgcattgaagaaactggacgccatgctcatcgtaagacctctctctctctctctctcgttgaccaaatatcaaccctactttaataatttcatttaggatattcaaaagcatcctcttatcccccttttctacctaggattgtctagaaaatttcaaggaccaaagcgagttcagctatatctcaaaagactcccctgacttagacggtaagagaaacgacgaaaaatggtggattccgaccgtcaaagttccaccagatggtctatcagaagcttcaagaaggtttttgcagtaccagaaagattgtgtaaaccaggttctaaaggcagccatggccataaacgcacaggttttgttcgagatggagatacctgagagctacatcgactctctcccaaaggtaaaaaaaaaaaaagacaccaacaatttgatggtattgattaagaagaagttgatgaaaaaataatacctcac

SEQ ID NO: 146817 - DNA, 1990 bp, Arabidopsis thaliana landsberg
aatcaatagtgttccgaaaaaggtaaattgttaatcagttaagtgttgcaagaaattgttattgtgtgctcgaactattgtagagaatttgtctgctgtggcactggtcatttggtttgtctgataaagataggaagtgtacttagatactgtggaggtgtattaccccttggtttaatagttttggaaacttatttttaaacagacatgtaatccgactagatcatttgtattgttcaatggtatgaggttccgagttgactattaataccttctaatgattcacaactcaattttattaggttgtagctcatcttttgaagcctcgggggtggaagcctccagttcgtcgccagtttttcttggattgcaatgaaatagctgatctttgcgacagtgcagaacgtatcttctcaagcgaacctactgtgttacagcttaaagctcctattaagatatttggtgatttgcatggccagtttggggatctcatgcgcctttttgatgaatatggttcaccatcaacagctggagacatatcgtaagtgtgcagctaaatctcttgcgccatgttatgtgttggtctgacattactgactgtattaattgttctcagatacatcgattacctcttcttaggagactatgttgatcggggtcaacacagcctagagacaattacacttctgcttgctttaaaggtagtttaaagagaactatattaatgctctcttttcaggtattattaacgcttaataagaaatgctataacgctctataattgacactgcaggttgaataccaacataacgtacacctgattcgtggaaatcatgaagctgccgacattaatgcactttttggtttccggatagagtgtattgagcgaatggtagtgtctcatctctgtgaatctcttgctccacttttagggtctcatgtcatggctactttgcagggtgaacgtgatgggatctgggtgtggcatcgaataaaccgtttattcaattggctacctctggctgcactgattgagaagaaaatcatctgtatgcatgggggaattggtcggtcgataaatcatgtggagcagatagaaaatatccaacgtccaattacgatggaagcaggctcaattgtacttatggatttattatggtaagttcatgtctaatgctgtatcattctatgttgtttccgtgatccttgtctcactagtatgtcatcttgtaatctgttaggtcggatccaactgaaaatgacagtgtcgaaggtttaaggcccaatgctagaggccctgggttggttacttttggggtgagtggtctttttcttctatttcgtacactttgcattgattactgctctctttcccttcccctcctcacctcatactccattacatcagcttgagtgatcttttctttccgctcattttgagcttcctaagtgtgaagagtactgattttgctagtcccttacccttgacatattcatgggctgttgttagacaattatattgagtaatataattctacttcgcttccataagtagttctgcctgttctattacttaccaagaatttgacaactgcagcctgaccgtgtcatggagttttgcaacaacaatgatctgcaattgattgtacgtgcgcatgaatgcgtgatggacggatttgagcgttttgcccaaggtcatttgataacgctcttttcggcaacaaattattgtggtatgtttatggaaccgagaactcactcctaagctggtaataagacctgatctgatagtttctgacaaaaaatgatctatatttattccttctcaggtaccgcaaacaatgccggggctatcttggtgttggggagagatcttgtggtggttcctaagcttatccatccattgcctccagcgataacctcacctgaaacttcaccagaaagacatatagaggatacatggatgcaggtttttatctcaaacagatac

SEQ ID NO: 146818 - DNA, 635 bp, Arabidopsis thaliana landsberg
gtctatggaagagcatagaagagagaatttctttaatgtaagaggatggtgtagcaaattcagataattccaatcagtagtcaactcagcgggaactcaacattgacgaaatgattgacatctttctcaaggtaatttcgagtaagattttgtcttttaataatataatcgttccatgtttgatgattagtacttgatgttgcttgaatgatttccatagtcagtcttttgtttcatatacttaatgttgcttgaatttgtcatttttgtatgtgtaattcgtcttagattgcttatgtatatatttgatggtttgtgaatcattactttttgctgaacatgattatgtatttgatctcttcctgtttgtgagcatgattttgttttgtttttcttaagtgtactgaaacagatgataaaggaaactattttggcatcagatctcttatggtgacccttaacaaagggaaaagaaaagaaagctatgcaaacatctcttcttcctcacttacagagcttcatgatcaacttcgtcaaaagatggcagacatgacgcagaaaatgctcgacgtgatgcagagctgcaacgatctcaaactcggatcgcaaacttggagatgctagtatcgtattgg

SEQ ID NO: 146819 - DNA, 1699 bp, Arabidopsis thaliana landsberg
tcggtcattctctgtatttcttcgaaggcttgcttgattaggtcttcttcatggttcttgacttgattatgtgcacggaacaaagtggagatgtcatctttggacagaacagaggaagcggtttctttaggtttctcgatgatggtgacaagatcgcctgatttgagaaaagggtttgtcgcagcaccaacacggtttgggtctctgtcaccgtgattgtcgtcggatgcgaaagttctccattcctgagagtattcgatgatgtgagcttcggagacaaggccacactccgaacagatggtgtcaccgctactgtgatcaaccaccattgtggttgctctcttgcagtccaagcaagtctcttcttccattaacatatttttagggttttttttcttcttcgtatattgttttcggagttgatttgttgatttattacccaaggtagagtacagtagaaactccataaattaatactcgataaattaataaacacgataaattaataaattttgctggtcccaagtcgggccaatgtaaaaattaaccaaaatcgataagataataagatgataatttttttgaaatccctatgtaaaaatatggtcccaaaaatatcataaattaataatcataaatcttaagcatatattcaaacactaattttatatgaaacttttattcaagtcacaattacaactctcttagagtacagttggtatgatctctttcgtactcacataactctttgcgtattttatccgtcatatttggttttgtaacattttttaatcattgctaagatttgtgtaaagaaaaattggattaagcctcatgttaacatcgtaaatatacggacacaatatcttgtaggaaaataaattaaaaagttaagaaaaaaataatttttttttaacataattgaatataaaaacaacaaaacataagaaaaactaaattaaaaaacatttttaaaagaatttagtattgtattttacgtaaatatttctataaattaatactactataaattaataaaattttatggtcccaacattattaatttatagagtttctactgtagatccaatacattagtttggatggaaactcctatcgcacgtgttttttttttcatattttgaatcttcactttaatagttagtgttgtgcactgcatggtttatcttgtcactcgtacttaatttgcataagaataaggataactctaggatcaggttcatgtttaaaccaaacgttttcgtatttttcaaagaaaattaagttttaatttggtatacatattacatatatatatatttcaattatataattaatcaaactgaagatgaacctatatgaattaataggaggaggacacacgatcggaacagctgcatgtgggtttatcacgaacaggatattcaactcgagcggaaacacagcagatccaacaatggaccaaacatttgtaccacaacttcaaagactttgtccccaaaacggcgacggatcagcacgtgttgatcttgacaccggaagtggaaacacttttgacacatcttatttcatcaatctcagccgtaacagaggaattcttcaatccgaccacgttctttggaatagtccggccacaagatccatagtgcaagagtttatggcacctagaggcaacttcaatgtccagttcgcaagggca

SEQ ID NO: 146820 - DNA, 2479 bp, Arabidopsis thaliana landsberg
aacaaatgtttgatttgcataaagagggaaagattgaatttaatgaagatttgtggactgggggttgggttgagaaagaagaggcagttcttggaaatgataaacttacaagaaaccattataaagcaatcttgctggtaactaaaacaagatttagctaacaatcctttatgtaatgtagtagtaccaaagagtctgatatgttttgaatgagacaggatgttctacttgcgggaatcgatacttctgcaataacaatgacatgggcaatgacagaacttgcaagaaatccacgagtgatgaagaaagttcaatctgaaataagaactcaaatggggaacagatcaatgataagtttcgaagacatggatcagctagagtatctgaaaatggtgatcaaagaaacatggaggctacatcctacaacacctcttttgcttccaagagaagcaatgtctgaatttgatatcaacggctacactattcctgtcaagacacggcttcatgtgaatgtttgggctattggtcgtgatcctgatacttggaaagaccctaaagtgtttctcccggagaggtttatggataataacattgatgcaaaaggacaacattttgagctgttaccgtttgggggcggtcggagaatctgtcctgcaatatacatggggacaacaatggttgagtttggtctagctaatctcttgtatcattttgactggaagttaccagaaggcgtggaggttaaagatatcgacatggaagaagctcctggactcactgtaaacaagaaaaacgagctcctacttgtgccagagatgagaagatcgtgtggttgagattagagctgactcatcatatcgacggttatgttgttgttcttgtttgacttttcaaacctaaaaagtatatcttatgaatataaaattaagtttaacgttacgtactacgtagcagagaatatatattgtaagataataataattgaagagagcagcaatgtactagtataatataaagactacacttatggagccactttaattgcaataaaatcagaaatgacaaacatttggcttctgtcacttatcttcgtcatttgtattcttgtagccgtgttcaaccacaagaatcggaggaattatcaacggacaccaccgtctcctcctggctttcctatcatcggaaacttgcatcaactcggagaattaccacatcaatctctatggaaactctccaaaaagtatggtcctgtgatgcttttaaagcttggaagagtaccaacagtcatagtttcttcctctgaaacagcaaaacaagctttgaaaatccatgacctccattgttgtagccgtccaggctttgcaggtactacaattttaactttggtttctctgttcaaacccttgaatcttgaatcttgaaatcttgaatctttttgtatcttgaatcattctttaggggcaagagagctctcttacaactatctagacattgctttttctccttatgatgattattggaaagaagtaaggaagctcgctgttcaagaacttttcagtagtaaacaagttcactctatacaaccgatgaaggacgaggaggtcaagaaactgatcgattcaatctccgaatcagctgctcagaagactccgatcaacttgaacaagacattgctggctttaactgttagtgtggtctgcaggacagcgtttagtgtgaattttgagggaactgtgctcaacagtgaacgattcaataacatagtccgtgaggcgctcgagatgttggggagcttctctgcttcggatttcttcccgtatgtcggttggattgtcgattggttcacgggtttacacgctcggagggagagaagcgtacgagatcttgatgctttctatgaacaaatgattgatttacatctacagaaaaacagagaagaaagtgaagatgattttgtggacttgctcttgaggttggaaaaggaagaagctgttcttggatatggcaaactcacaagaaaccatatcaaagcagtcttaatggtaactatacaaagatttgctttccaattgtaggattataatacctaaagattataatggtcttattacagaatgttcttcttggaggcattggaacttcagctataacaatgacatgggcactgacagaacttatgagaaacccgcgagtaatgaagaaagttcaatccgaaatcagaaatcaaattgggagaaagtcaatgatcagcttggatgatatagatcagctccattacctgaaaatggtgatcaatgaaacatggaggctgcatcctccagcaccacttctagttccaagggaagtaatgtctgaatttgaaatcaacggctacacgattccagccaagacaagactttatgtgaatgtatgggctatcgggcgtgatcccgatacttggaaagacccggacgagtttcttccagaccgcgtttgttaa

SEQ ID NO: 146821 - DNA, 434 bp, Arabidopsis thaliana landsberg
ctttagactcacaagcctcctctcatcttcaccataaccgaaaaaccaaacaaaaaatccttagataatcagatcttgatattatggatcatatcatcggctttatgggcacaacaaacatgtcacataacacaaaccttatgatcgctgccgcagccactaccactacgacctcttcgtcttcctcttcttcctccggaggctcggggactaaccagctaagcaggtacgagaatcagaagagaagagattggaacactttcggacagtatctacgcaatcaccgtccaccactttctctctcccgttgcagtggtgctcatgttcttgaattcctcaggtacctcgaccaattcggcaagactaaggtataacatatacacttacatatgtgtctatctatctcttacatcaaaatactctttttgataatt

SEQ ID NO: 146822 - DNA, 530 bp, Arabidopsis thaliana landsberg
tttttcctcttcctctcttctctctcaaatctagaaagagaaaaagtcttaaatttgtctcatttatgcgataagaaccacaattcctctatcaaaatctctctctctgacatacccagttggaaaaattcaatcttttatccctaagattcgatctttcttcttgggaagttgataaatgttcaaggaaacataaaaaagagaagatttttgaataaaggttgaagaaaaatgcaggatccagcagcatattaccagacgatgatggcgaagcaacaacaacaacaacaaccacagtttgcagagcaagaacagttaaagtgtcctcgttgtgactcaccaaacactaaattctgttactacaacaactacaatctctcacagccttgtcacttttgcaaaagctgtcgtcgttactggactaaaggcggcgctctccgtaacgttcccgcggtggtggttctcgaagaacgaaaccaacgatccacttcttcttcttttctgctcctctcttccacagagccaaacag

SEQ ID NO: 146823 - DNA, 2401 bp, Arabidopsis thaliana landsberg
aacattgtttgtgacctaaagattcttctttttaaattgacaggaatttgtgtctaatggtggcggtatgtttgtccatcaatgtcgaacaaaaacccctagggttacattttgcgctgctcatgatagaatagccaagttccaagtcgaacaagacaaggttcagtttttaagaaattagctcctttgtgatagcttatgttaatgtgtgtgtttaaaagctgagattcatgaaaaagtttcgaactttgcatataggtttatgactccacattatgttttctgatgaaagttttataatctatgtatcaatgatgttccttaggaaagtagtggagcatgtgtgtttactcaaagcaaaagatggtttatctgaggaagtagaaaaagatatgcttgactatctttacacaactcaataccaaatgagaggcattgttgctatatctgttggtgagtgcttacatattcttgctcccaatctagatagaaagtctctgtgtgtgtttataaaaccagtctctatctgtttgttttttactcgcacaggttgtatcggtgatagaaacaatgaatatttcacgcacgctctctacatgcgaatacatggaatactaagattcgaatgtaatagttcaactattttctctataacaggccaacaaacgttgaaactccatataattcaagtattcgactcttgtccaagcttaaaaaattgggtttggtttataaatatcgtgattataataatatacatgtgatcaatcgaagattcggagactaataaagctacattgatctcccctaaattggagatcttcactaatttcaacccctaaactttctacaattcacccaaaatgaccccaaatcaaatttacaattcccccaccaatacattttcactaataatcaattccttttgtgacccactaatcattgttccttcacacctcgctctcaccataatccaatccccaccctccatatcacatctggtcccatccaaaccaccaacacacttcagccgtccgatcctctccgagtaacaaccccacaagcttaaacgatcaagatctctcgaatccttctgtatttcctctgtttcttcttcttcctcttcctctactgatctccaaaacgtttgatctgtcacacttgtcggtgagtttgaaatcaaaccgggaaccagaactggttcaatgtctggtttagttgtcaaaaaaggatggtttaggagttgtgtcgctgtccatctttcatttgcttccctcttcaaacacttttccaaaaaatcttttgcttcttccgcaagcaaacaaggaagctccggagtttcactcgaatacccgacccgataaagaaccaaaaccgggtcggtaaaatccgccccaatccacggctgagacccggtaaccatctctatcaccgtacaacccaccgcccatatatcactctctttcccttgtctctctccacgcgccgcttctggagccatgaacgccggcgttcctctaaccggttcggttatttccggttcaacccatttcgcacacccgaaatcagcgatcttggcttctccgttctctccgaccaacacgttactaccctttacatcacaatgcacgattcctttcgagtgtatatactccaatccttttagtatatcgcgcgtgtacttcactacccgagtctcgtcgactcttcccccgtctttcgccgccgcatcggtcaacgttccatacggtgcgtactccatcaaaagattatacataacgacaccgtttgactctctcttggtttctgatcctctgtatccgatcacgtaaggagaacttaacgaagagagaatcttggcttctctttgcaagaactctgagcggtgaacctcagatgatttaacggcgaggatttcatctgaattgtgacctgcggcggcgtatacggtggctgtagagcctcggcctaggattcttcctctagtccattccatttggagaagactagagaagagttataaaaagaactgttttttttttgtatgtttgtttgattttgcttttttccactctgcttattcaacagaagctttatataagggtgaacgattttgttttttttttggttgtgaaattagatagtgtatacttttggtaacatcgagttttatctaccaacgctaaaatttaaattatgaatataacaacgtaattatgttcttgtgtacacacgtggatttctttttgaggtggataaccaaatgtaacccgtttcgatttgatttgatactactatttttataaaggtctaaaaagaaaccaataagagagaaatgtgtagaatatctgaatatgtgaagttttcaagattacaacaattgagaaacgtgattgaaata

SEQ ID NO: 146824 - DNA, 919 bp, Arabidopsis thaliana landsberg
actttctaacaaatagtatacgttaatgatgattacagggtattaagttcctagtggatgattcgggaggattttccgctgtagcagcagatttccttgaaaacatggcagatgagtacacgaatgtacctgtattgctatattccgtaaggactccaatgtcacagatgagctcgaaaaagacagtttcaaacaagcttcacgatgcgatatcgttttcttgactctcatccttttgtaaactcttcactccaatcggtttaccatctttgacaggaagtacgcaacattctaactctcattgaaacataactcttttgattttctctcaatgcaactgacgatttcatgtgtcttgtttatctgttttgttgatttttaaaggtaaagcatcaaaatttcttaatctcggtgatgagaaaccttatcgaagcagtgcagtgtacgccgctgctctacattcaagcacaatacctttccgaatgcaacccactagctcagattcaagtgaagtgtcaaattctatggatgttaatacacttgtacagcttttaacgggtcgtggtagacaaaacatagtggcgattttagattctgcaatgccagctcctacattagcagggaagcaattagagaatactcttttaacgagtttgcaagcactaacgccggaagtaactgaagatgtagaagacaatcaagcggttgagtcaatgtgtatacttggagcccttagatcagaagataaagaagcattggtttcagaagtgaagaatgcggttgatgcatcttacgaacaggcaaccaccaaagggaaaccgttgttttgcaatctatcggtttcgcgttgtcctcttacggtaaaattaccgtttccttctatatttggaaaccttgttggaggaaaggtgagatactg

SEQ ID NO: 146825 - DNA, 321 bp, Arabidopsis thaliana landsberg
taagaatctctttattgggattgcaatttcaaacaaactttacatcttcttcttctctctgcttttgccttcacgacgagtagagagagccatggacacactcattgctcagttacagagacgattttgtgatttcaccattagtctctatcaccaggtaaattttagcatctctccttagagattcaggataaaagtgattaactttcttgtgaagagaacttagaaattgtggttgagtttcaaaggtgtctcctttttagagaaggctcaacacagtctttagggttcttattgaagcttttaaattgggttttgggg

SEQ ID NO: 146826 - DNA, 468 bp, Arabidopsis thaliana landsberg
agattaaagacagagatttctgggttttaacagtaggaaatgaatattgttggattaagaagcgatcggagaaagtagcaaaaatcgggagaggaaagggatattcgaaaaccctaattttggaagatcattcatttgagagaaaagctgttaaatttgagggctttagatcgaatttgatatctggggttaatgggttttttgaagaagttaacgggtatacttgggtttggtcataacgatggtggtggtggtcatggagctgtgagagatgaagatggtgatggtggagataacaacactggaactgtttctggtgatggagataaacgtcgggaagagaatcagacgagatttcgtgaaactggaccaaggaaaggttttggtgtaccggttcaagttgctgttgaacggtcgaatcctggtcctattcttcagccttgtgctgctttagacggtggtgttcag

SEQ ID NO: 146827 - DNA, 2222 bp, Arabidopsis thaliana landsberg
  unsure (1)..(2222): unsure at all n locations
ctagttgcttcacaaaatgaagcctccaacgattatagtacccgcatccattaaagatactgttgagagtttattcgaagttcacagaaaggtagattcttcagagctaaagcacaatcttgttggcttggacataggtggtaactcaacctctagcattcattgcagccaagatttggcttttttgttaaaccttggacacttcttcatgcaggggaggagtttattataaggaaagatctcaaagtcaaagcctttaagacataccatgtcatccaaagccaggtttattttagtaaactcgcatgagattttcgatatcttagcgttatgtgtcttcgttgaattcatgctttcgtttgatattttgcagggttatgtagtgtattcaactaaatataaactcaagaaggaatatattggcctatctggaaatgaaattaagaacttgaaggcttcaggtgttgaggtttgtctttgatttgcttaatattgcttgtcaattttttcttatgtttgtctatcacaaagtcaatagttttgcaatggtctttccaaagtatataagcctgtttaataagtttggattgtggattgtagattacagacagcataataactcctgaagttgcttttacgggagatacaacgtcggattttgtagttgatgaaactaatgctgatgctctcaaggcaaaggttctcgtcatggaggtgaatatctgctactgatatgaatttggacaatgtgcgtgatttataatgatatagttcttcccggtccaagtttcatggctttgtattaaaagggaagctgtctctatttcctcttgtgcagagcacatttcttgatgattcggtatcggtagagcatgcgagagattatggacatatccatatatctgaggtcaggatcctcctttctttgacacctcttgttactttctgtctcttgatggtcatagaagatttcatatatccttaaactgcagatagtaaatcatgctgaaaagtttgaaaacaaagcaatcctgctaatccacttttcggctcggtatacagtgaaggtgtgtcttctttatccaacctggttatgaagcagtaggaaatcagttactctcttaccttgtagtggtaattaatctttgcgagttttcacaggaaatcgaagatgcggtttctgcattgcctccacctttagagggacgtgtgtttgcactaacacaaggattctaaacattataacactcttataggttttacatacttttgtttttgtattccacatgtaaacattgtattctgttgttaattttaagatttcttctatctcgataaagaatgaagtgtggaagtagagaatacagacgagcacaccaatatcagataaattcagaggaaatctcatgggatcccaaatcttattatttccctgcaacaagattgttatgtaaatcattggttttgaaaatcaattttctgtgtaacaagaccatctcccaagattgctatgtaaattattgactgcagagatcaattttcttttataataataaaagaaattaatcatgaatacaggatattatattgttagaaaaataaagaagattgatttctgcagaagaatgatattcgttatagttttacaagcacgatcatattttaataattagatttagccagaacggacttggggttttcnnnnnnnnnnnnnnnnnnnnnnnnnnnnnnagaaagaagcaaatttgctttgtaaactcatacgtattactttttgtcgcatatgatatatgattgatcgccactccaaattatttttgtctgaattgcagcttctgccgcgtaaggtaagataatcaatctagcattgcctatttgttgtattttttattctgaccagtgtccagcgatcaaaagtatgggatttgggcaacttgtatagtagtttaattggacttatttcgcaagttgtcaaacaatgtctcgagttcaacccttgtagtcgatcctccttgtgatagaagtttattggtcttatgtcttaagttgtcaaataaatatggagtgtgaacatttgaattataggtttagtcgtagagtaattatattttaacctcattgtctaacttgtgtgtactttctgttaactcttgatttatgtgtttatcatttttttaagttttgtgttttccattatgctctgtttatctaaaaatagtagt

SEQ ID NO: 146828 - DNA, 2276 bp, Arabidopsis thaliana landsberg
  unsure (1)..(2276): unsure at all n locations
gatgctatccttattagtgacttgaactcgcaggacaaggtaatcttacctctactcgttttgttttcttaagatttgatttgatctgctggttgtttgtcacatttatgagaaattatttgatttaggatccagtaaagtctatacatatcagcaattcaaaccctatgtgccatgcatttcatccagatgctaaggatggacatgatctacttattgggctgaactctggggatggtaatgttcaactttgagattaagtttgttacttatgttcttgatggaactttgtcttgttgtttattcgtttggtgaattattgtagtctacaccgtatcactaagacagcagttgcaggatgttggtaagaagcttgttagtgctcagcattataacaaagatggttctgtaaataacaggcaagcttttttctttctgtaaacttcttttctttttttttctttctctgctttattgttctagtatttgttaacattttttgaaattgaaataatcaatcttgttggttcccatatgttggtgtagcaatcgtcagtattctcacttgtttttgtcttttgtacttctgtatttatgccatatgacacaaccttgtgcagttatcttcgtttgtcaatttactagatatatgctctaggtaactctcgatttagtctaggggatcagaagatctcttttatactattattacatgataggatgtagtctcagaggagaacactttttcttggataaagagataactgaaatctggctgagattccttttccgagaacaaaattactttatatgttttttatccacttcaagaataagattaagtttgttgcttttaacagccgctgtactagtatagcttgggtgcctgnaggtgatggatcttatgttgctgctcatgccgatggaaatctgtacgtataagaaaaggcaagtgcagatattgaaaaagaaattgacttttcattacctaattttgtcaaaaaaatttacctgagtaattattatacttgcagaataaagaaggtgcaactgattcttcattttctgctataagggatcctacacagttttcagttgacaaagcaaaatatagcaaggtacctgaggtttttggtagtgttttcaattttcattcgatgttgttttcgaggactgtatgtgtagctctggcaagatgagaattctcatttcttttctgtacacacctgcacatgaatattttctcagacaacgcgatgctacaatccttacatgttctattatttgtttattcccacaaatatttctgcagagtaatccagtagcgagatggcatattgggcaaggtgcgattaatagcattgcattttcaaatgatggagcgtacttggcaactgttggaagagatggtatgatgggtttttgttttattgccggctccaattcttcctctctctatatatatatctttcagttgagaattcattttctcttttgaccatgtacaggttatcttcgaatttttgatttttcaacccaaaagctagtgtgtggtgtaaaaagttattatggtgctctattgtgttgtgcttggaggtaactggatctaaatcctttgacaaatgatcttccctattgcatttgtaggaaaataatattctgtgttaattttttctccctcaagttgcttttagcatgcgttgttaatttgtaaatgtatgctaacattgcgattggcctgacagtatggatggaaagtaccttttgactggaggtgaagatgacttggttcaagtgtggagtatggaagatcgaaaggttgtggcatggggtgagggacacaattcgtgggtaaggttcttaaattggagtatagtgaattacgtatgtaagacaaacactacttgacttatgtgaaagcttcctcataggtaagtggtgtggcgtttgattcgtattggtcgtcaccaaattcagaggggtctggcgagaatgtcatgtatcggtttggttctgttggtcaggtattcagttatactaaacacttttttgctttaacgttgagagtataccttgacctatatctgagaattgaacagtgttaatacctttatttctattagtttaacaggatacagattgtagaatgattctagtgtaggggagcgataaagagtgagagaagtgagatgaaatctttaattggaaatttcatgtagacgatgctatcaccccatatgaccaaaagaaattcccaattaaagatttcatcttac

SEQ ID NO: 146829 - DNA, 738 bp, Arabidopsis thaliana landsberg
gcttcttctataagctttcttgaagcttccgtagccatcttttgctttctcatccttcattacttgttcaaaacaacaacttataatggccggttccctagaaactggccggttctcgggatgctcccctgtctgctcgtggtgctccacaggatctatgactatatcgttgagattctcgaaatctctgatttgacattttcattcaagggaccgaggttcgccggaatggataccttgctcacggttgatccagctaacattcatcatatgatgaactcaaacttctcaaattacatcaaaggatctgatttcaaagaagtttttgatgtcttcggagacggaattatcaccacggactctgagctatggaagaatctaaggaagtcttatcaagaaatgctccatcatcaagcgtttcaaagcttttcattgagtaccacaagaagtaaactcaaggacgggcttgttcctcttcttaatcattttgcagaggaaggaacaactgtggatttgcaagatgtgcttgggaggttcactttcgatacaatcttaatccttataaccggttctgatcctagatctctctccattgaaatgcatgaggatgaattagctaaagctctcgacgttgttggagaagggattttctttaggcatgttaaaccaaagttcttgtggaagctgcaaaactggatgggatttggacacgagaagaagatgattgaagctaatgca

SEQ ID NO: 146830 - DNA, 1204 bp, Arabidopsis thaliana landsberg; identical to SEQ ID NO: 63967

SEQ ID NO: 146831 - DNA, 513 bp, Arabidopsis thaliana landsberg
  unsure (1)..(513): unsure at all n locations
ttttctcaagttcacaagtttgaaaagcctaatgatgagacatctctaaatttgatgaattcatgtgcatcttcggttttagtagagtatcctgatatagtctttgcatatggatatagtgacgagtacaggtaccattgtcacttggattactttacttgacttagctttgactagtacttgtgacaagatttattgttttcatatattatcatgtagctttgtattcaagaaaacatcaagattctaccagagacgagccaggtatttcaggatttgggagatagctcgacaagaatttagttttcttctgtatgatttgaattttgacatctacttttacttttatgctgtttcatatgcagtaagattatgtctttggtagcctcattttttgctgcggtctatgtaacgaaatggaaagagttctttcttcatacaaaattagaatatgctccttcattcgcttcaaaagttgtaagttgtgcatcggtagaggttnttcacagctta

SEQ ID NO: 146832 - DNA, 994 bp, Arabidopsis thaliana landsberg
acatagctgcagacaaatacaagattccgtccctccaagaactctgcagtaaccagctcattgcctccatgaattcatcaaatgcattcaatgtcctcgagcttgcagatattctctaggataaaatcctaaagatgctgtctctgactttatgacaacacatattgaagaaatgttgttagaagaatccagtttggctttataaaccctaattttttctctctaaaagtcttgttaataatcataatcttacgccatgtaaaatcagatgatcacgtacacttagttgtgcttaagtaaagtatcaatcgtgggacgaatgtgtagaacggatgtatttgtacgttttactttcccgggtttctggagttattttgctcacgtgaacaaaaatgcttgtcttcttctgttgtaggaaacaattttctctaatatcttctgatcaaatccaaaatagtaataagttttagttctctgctacactcagctttttttatttatttctgatctaatttaaaatgaacaaaattataactatctcagttgataacttgatatgttaggtgatgtaccttaaaaacgtattttctattgcttacgtgaaataaataaacatacaattgatttttcttcattatccattttcacggggaaattctggactacaaaatggacagaagaaaaagaaaaaagaagaagcagaaatactatagaaactgtgttatttccttatattttgtataataagaaataaattatatataaaaaaaaaatgaaaagtgggtcaatctagttctgtggatcattgatttcaccccagctcctgattgcatctgtcactgcctgtttcactgcttcagcatccatattttctccatcttcattctacatttgtattattaacagtgacgtaatcattaaaataattatacatgccaacacacacacatatcgacatagactacacatgtttatattttgtattcgtgtgtgt

SEQ ID NO: 146833 - DNA, 1323 bp, Arabidopsis thaliana landsberg
ggtgaaactgaattcttcacggagtatggagaagctaacaggtatcagattcaagaggttgttggcaaaggaagttatggtgttgtggcttctgctgttgactcacacactggagagagagttgcgatcaagaagatcaacgatgtgtttgagcatgtctccgatgctactaggattctcagagagatcaaattgcttcggttgcttcgtcatcctgatgttgtggagattaaacacatcatgttacctccttctcgcagagaattccgcgatatttatgttgtctttgagttgatggaatctgatcttcatcaagttatcaaggcgaacgatgatttgactcctgagcattatcagtttttcttgtaccagcttcttcgtggtctgaaatatgttcacgcaggttattttctggttttacacattggtctctttcgatcctcatggttttttcttttgtatagatttattgaaacatttaagggttctctgttttcagctaatgtgtttcatcgggatttgaaaccgaagaacattctagctaatgctgattgcaaattgaagatctgtgattttgggctggctcgcgggtgtttggacgattccccaaccgccatattttggaccgcgagtcatctaactcaatgtgaaagcaaaactgttcattaggcttcctctttactattttcaatgcttgtgagctcatttcgtttatatggattttgtaggattatgtagctactcggtggtatcgtgcccctgaactctgtggatcgtttttctccaaagtaagattctttttcaccgaacccaactactcttgttatttctctgtacaaggaaaaagctcctagtttgctgttttgtagaatatttttgtgtggttctgtagtgttgataagaccaaccatctcaagctaagtctactcttgttatatttcagtatacccctgcgattgatatctggagtgtcggttgcatttttgcggaaatgcttttgggtaagcctttgtttcccgggaaaaacgttgtacaccaattggatctaatgactgactttcttgttactcctcctcctgagtcaatttcaagggttagtcactcaaaacatctgctcatattttctgtagcaaatttaatgttccatacatcattgagaggaaattaaatccttgtaatgagctttgcaatcttggacttgtacagattaaaaatgaagaggcgaggagatctcttctttccatgaggaaaaaacaaccagaccctttctctcataaatgccctaaagctgatcctttggctctccgacttctggaacgcctg

SEQ ID NO: 146834 - DNA, 620 bp, Arabidopsis thaliana landsberg
  unsure (1)..(620): unsure at all n locations
cacacacttcatcgtctctgaaaccctaaaatttaaacacaagatgggtttggttagatcattgtgcttattaataaccttccttaattgtctcatcnnnnnnnnnnnnnnnnnnnnnnncgcaaggcctggtcctgtttccggcactaggattgggttttacttaactacgtgtcctagagctgagactattgtccgaaacgccgtgaatgctggtttcagttctgaccccagaatcgcacccggaatactgagaatgcatttccacgactgttttgtccaaggttgtgacggttcgatccttatatccggagctaacaccgagnnnnnnnnnnnnnnnnnnnnnnnnnnnnnnnnnnnngaagtcatagacaacgccaaaacgcagctcgaagccgcgtgtcctggagttgtctcttgtgctgatattttagcattagccgctcgtgacacagtcattctcgtaagccttaattatttcataaacgttatacgtaattaatgcattatcattacttttataagtttacatgtatataacgttatacatgcatgggttattgtgcatgcagactcaaggaacaggctggcaagtccaacgggacgtagagatggtagag

SEQ ID NO: 146835 - DNA, 1466 bp, Arabidopsis thaliana landsberg
cgattccctctaatctccccagacgatcactggtcacaatgggctgctctcttcgccgccggagctttcggtgtctggtaaatcacctcaatcctctctgttgaaactagggttttgtatactgatgaaattaccgacttcattaggtcggagaagacgaaaattggaagtatggtgagtggtgcgttgacaagtacgttacttgggctcgccgctagcaatttaaggttaattccgtttgaaacgccgtcgtatgacttcttcatggagtttctcttgccgcacacgattccattgctgttgtttagagctgatctccgtcgtattatccgatctactgggtcattgcttcttgcattcttaattggatctggtaaagatttagtcttttgcttaaaggcaagtttttggattgggattaatttggattcatgcttaagactaacaaaagtttatgtctttgagtgtttttagttaaaaagattgattgtgaagtgacattgttattgatgatgtgttgagtggtttattaatttgtgagttggtttgatgtagttgcgacgattgttggaacagtggtggcttttatgttggtaccgatgagatcgcttggtccggataactggaaaatagcagctgctcttatggggagttacattggtggatgtaagtttgtctggagccccttcattgcttctttggcttgtttacagacagaggtactcaatgtttatcttctttagccgaaaagattctagctttgcttgattttcgtttatcgaaaaaagaggaaaatcttgctaaattggcttgtaagatgtttatcacaacttgggaatggattcttcaagaggaatgagaataaaattgttggttcttgttttttgttctgcagcccttaattttgttgcgatatcggaggctctacagatatctccatctgttatagcagcgggtgtagctgtggataatgtcatatgtgctcttcacttcatggttttgtttgcgttggcctcaaagataccccctgagaccgcctcagcatcttcccctggtaaacttccatcttgatcacattttgtatatataaggtatgtaagtatgttgcaatgtgagaggattactaaagaacttatggcgaatagtcggaccaactaaggatttggtgactctagggctacttggttagttgtcaaattgatttgagtgaatgttggtaaagatagttattattaatacatataatgtgcctatcaaattaagacttgataataagttttcaatacttttgagttttgacattattacataacgtttctcatcttctaactgcatttgcatccacatataaacactactattcaagtttttgtgatctttgacagatgctaacatgactaaggatggcaagctcgaggacaagaacagagtggtttcaacttcaattgcactatcaggttccttcc

SEQ ID NO: 146836 - DNA, 954 bp, Arabidopsis thaliana landsberg
aagagcgtcactacacgaatcagcgttcttccgcttccttgttgccattgaagaagacgcagcctacaatgagttgaagaggtacagaggaaagctcttaattaaccggaaacgggaagcagcgtcgattttcgccggcagtcggggaagcgcgaagagtttcgccggcggtcagagaaaacgattgagcagatgacaattttacccccagaaaaaaggataaagtggcgcatcattaataaaacgcatataatttttgagttttacaaaaaaaaaaatcgaataaaatgtcgaaagaagaaaaaaaaagaaaaaaatcgtaaaccctataatttttgctcagaaccctaattccgcaaacgtaacctgtgttcactgcgccgtcttctcaccggagaatgagtactactactactacggctgcacttccgcagcgacaccagtcgaaggttgacccgcagaacgttaacagagccgtgaagtctctgctaaaatggtgggactccaaatccaagaccgagaactctgaatcgcttgagaacgacggtttcgtctatctaatcgtgacactgaagagaatccctcagttggatcgtactaaccccttgatgatccctcttcctcatcctctcatcgatctggtcgccgaagatccgccggagctctgtttgatcatcgacgacaaacacaagaacaaaatcacaaaggaagcggctttgaagaagatcgaagcagagaagattccaatcaccacagttattaaagtctctaaattgaaatccgatttacgcaaattagaggaggagaagcgattcgagttgtatttcgcggagaggaggctaatgccgatgttgccgaagctgttggggaaagagtttgttaagaagaataagactccgattgcgattaacttaaggcatggtagttggaaagagcagatcgaaaaagcttgtg

SEQ ID NO: 146837 - DNA, 455 bp, Arabidopsis thaliana landsberg
  unsure (1)..(455): unsure at all n locations
ggcgttagggtttcttcatatatctctctcggaagaagaagatggtttgcgataagtgtagntccatcaataatctcctctttgaattccatattctaattgaatcaatctatacttggatcggttttaattctaattgaatctatactattggcgttaggatttgtgattcgtttcgtttctagcttaatcgattacatgtttcaggaagaaatttaatgatctctgattcgattttggtttcttagatcgaaaccctagttgtaggatctctaatttagtccaaagtatgaaccttttgactcaatttgtttttatcttttaattttaggtgagaagaagttatcgaaagtgatagttcctgataagtggaaggatggtgctcgtaatgtaactgaaggtggtggtcgtaaaatcaatgagaataagcttctctccaagaagaataggtatgc

SEQ ID NO: 146838 - DNA, 981 bp, Arabidopsis thaliana landsberg
atttatacgtggccagggtagttgaaggaagagatcgtgtttaatattgttgtttaatcagagaaagatgggtctttctctttctttgctcttgtctgcttggaaagaagttgtgacgacccagttcttcagtttcaagaaccctgtcgagagttttcttgaaaccagatctttcagcttaaaacttaaagaaggaggcttgacttcaagaaccaacagtttcaagagtgagaacccgcaggaaaagtctccgaagacgggtatggagcggtctttgagcttcaacagctgggagattgtgacagaagttgagactgaaccgatgaacaaggaagatgaggagattgttgaaccgacgaagcctgctcgtaacagtttgaatggaaggaactgtgagagaatccaaataacgaagcctactattactccacctacgccttttgtgttcttctctccaagaccggtcaccgagcttgatgcagctgcaactacgttacagaaggtgtacaagagttacagaacaagaaggaacttagcggattgcgcggttgttgttgaggagctctggtgagtcacttgatggtcctctatcttttttattagtaatgtggttcaagctgttgaaactaattcaaatgtttcataggtggaagactctggatgctgcagctttaaatttgagctcagtcgccttctttgaagaagagaaacatgaaaccgcggtttcgaagtgggcacgagctaggacacgagctgctaaggtttgacatcatttccacaatttattatctatgtttagatgtcataagaaactgatgtgaatccttctattgtatgtcatttaggttggaaaaggattgtcaaaagatgaaaaagctcaaaagttagctcttcagcattggcttgaagctgtaagtccccatacttgctttggacatgaaataaacctttcattttgtggatttgatctaagttgtgtct

SEQ ID NO: 146839 - DNA, 975 bp, Arabidopsis thaliana landsberg
gtacctgttggaagagctacccttggccgtatcatgaatgtgcttggagaacccattgacgagagaggcgaaatcagtaagaagtcttagccacacccacacttaatttatgtctcacattctgcaaacttgtcatgacaatacgttcttgctgttactcagagaccgagcattacttacctattcacagagatgctccggctttggttgatctagccactgggcaagagatcctggccactggtattaaggtagattctgagtcctagctctgcactgttcccacaggtcacatgtgttgtttcttatttcgaggtgattcttcgttttacttttcaggttgttgatcttcttgctccttaccaaagaggaggaaagattggtctctttggcggtgctggtgttgggaaaactgtgcttattatggagctgatcaacaatgttgccaaagctcatggtctgtttaccacaagttgttctgaccgtattagtctctctgtttctatttattaagtggtgcttcttctgatgaataggtgggttctctgtgtttgctggtgtgggggaacgaacccgtgagggcaatgacttgtacagagaaatgattgagagtggtgtcatcaagctaggcgagaagcaggtttcaattcattttaattactcttcaccttgctttgttctgaaaacggcatttgatttaatttgttactcaattctctctgttttcctgtcttaacagtctgagagcaagtgtgctctagtgtacggacaaatgaatgagcccccgggtgcccgtgcccgtgttggactgactggtttgactgttgccgagtatttccgtgatgctgaaggccaagacgttttgcttttcattgacaacattttccgtttcactcaggtgagccttgttcctagctttgtcctattactcagcccctgtgtgccatttatgcattgtacttggtatactctttt

SEQ ID NO: 146840 - DNA, 2752 bp, Arabidopsis thaliana landsberg
  unsure (1)..(2752): unsure at all n locations
actttaaagcacttctttttaccctgtgttatcggaccagctaataagattaattttttaaaaaacacaaattatcatacgaatttattcgtgtgttntgcaatatatattttcgaaaacttgaggatacttggatcatatatagaagcatgacgacgaaaataacacgatatgtacaatttgatacaagaaaatgatgataaaatttacaaaacaatttgccaaataacatgttagttagagtatagcacccatccaattaaatagcttttgcaaatgacataagtttctaaaatatccacttaattaattttcttttcttacgtttttatatcctaactaacactagtatactcaattaatttttcgtaacattggttacatacctaactaactaggtctagaaaatatattaaaatcgggacaagtcaaccattagacatgtgtaagctgaaccaaatcgagtcatttattttcctagtaacccactctcaccaagaccagaaaaaaagcgtagatccagaggcgacaatattcaaacacacaaaaagtcatcaatatgtattaataaataaacgaaaatgcatttcctcttcatataattcatattgtcatgttacgaaaacaaaaatgatcaccgacacataaaactaaaccaaatatttcaatgaaaaattaattaacgactttgacgctttatttctctttctctcttcactctctcattatatctctttcgctgccgcttttggtactttttgttcgttcgaatcccaatatagaccaacgaagaagaagacgaagaagcagtctctcaaacttcttctccagatccgaatctcactctcatttctccgatctctctatgtgaatgacctacaatttcgcatctcttttgatcttgatctctgtttctctccttctactggtaagagatttccttaatccgcttctctgattttcttattccttcctttaaccttgtatctgaagcttcctccggaactaggtttacgatctgtttaattttggaattcgatatcgatatttctgtgtgcgttaattgcgtgtttttatcgtagctttgtttctctgtttatcagatccattgataagaagctttttagattgttaatggcataagcacgatatgtttgttgttttgtgtttctcttgttttgagtaatcactaagatacagagcggcggcgatgagggggacatcagaaggagggaagaaaaagccggtgattgtgttactctgcgttgcatcagtagtgcttgtttttgtatatctcttctttggttcctctaaccataaagctattgagtatgggaggaaacttggtttgggtggtgatgatgatgatagtactaagaaagatgacacttctagctctttttatgtagaagatgtagtagggaatggtttcactcccagaagctttcctgtgagttctttagaccttctttgtgtaattgatgattgagttgagcaatatgtgtttaatattgttgttaattcttgtaaaggtgtgtgatgatcgacactcggagcttattccttgcttagataggaatcttatataccaaatgagattgaagcttgatttgtctttgatggagcattatgaacgtcactgtcctcctcctgaaaggaggtttaattgcttgattcctcctcctccagggtataaggtgtgttatttctctagctttgttgatatgatcagtgtcttgacatattttgaagtttttttctatgtgaatgtgtctagattccaatcaagtggccgaaaagcagagacgaagtttggaaagtgaacattcctcatactcacttagcgcatgagaagtctgaccaaaactggatggttgttaaaggagagaaaatcaatttccctggtggaggcacacattttcattatggtgctgataagtatattgcatcaatggcaaatgtaaggcagttactagatcttatgtggaatagaggtgtgtgtccatcttcatttactgatactattcatggaaattgcagatgcttaattttccgaacaatgttttgaacaatgggggaaggctgaggacatttcttgatgttggctgtggtgttgctagctttggaggttatcttcttgcatcagaaattatgacgatgtctttggcacctaatgatgttcatcagaaccaaatccaatttgctcttgagagagggattcgtgcatacctcggcgttctagggaccaagaggctcccatacccaagcagatcctttgaacttgctcactgttcacgttgtcgtatcgattggcttcaaagagatggtattcttcttctcgagctagacagggtgctaagacctggtggctattttgcatattcatctccagaagcatatgcacaagatgaagaggacctcagaatatggagagaaatgagtgctcttgtgggccgtatgtgttggacgatagctgcaaaaaggaatcaaactgtaatttggcaaaaacctttgacaaatgattgttatttgggaagagaacctggaacccagcctcctctttgcaattctgacagtgacccttatcctgtgtatggtgtacacatgggagcatgcattactcaaggcagtgaccgtgagttttcattattctatcttcttttcacaaacagagtttggtcattaacttcacaagcttgtaatattgcatatctgagaacaaatatgctcactatattatttttcaacgttt

SEQ ID NO: 146841 - DNA, 1187 bp, Arabidopsis thaliana landsberg; identical to SEQ ID NO: 7755
  unsure (1)..(1187): unsure at all n locations

SEQ ID NO: 146842 - DNA, 841 bp, Arabidopsis thaliana landsberg
  unsure (1)..(841): unsure at all n locations
atgaacttgttttggaacacaggattttgtgttatagttttagtggttgcgagggttggtcattggtggtaccgatggtcaaaccctaagtctaacggcaagttacctccgggatcaatgggtttcccgatcatcggagagacattagatttctttaagccttatggattctacgagatctccccatatctcaagaaaaagatgttaaggtcagaactctctctctctatttatatatggcattttcttacagagatgaagtcttgtgtttgagtattgtgtgagtcttttaggtatgggccattatttcggacaaacattcttggagtaaaaaccgtggtatcgacggataaggatgttaacatggagattttaagacangagaacaagtctttcattttaagttatccggatggtttaatgaagccattgggaatttttagcttgttcttgaagattggaaacatccacatgcacatcaaacaaataactcttcatcttttgtcctccgagggtttaaaacggaaaatattaaaagatatggaccgtgtgacacgcgagcatcttagttcgaaagctaaaacaggaagattggatgttaaggacgcagtttcaaaagtagtcaatcttttttttttctttgatgaatttcagttacaatgttggagttagcatgttattacgtgctagtctcacactttttagcatgttttaatctttgtagttgataatagcccacttgacacctaagatgatgagtaatctcaaaccacagactcaagcaaagcttatgggaatttttaaggccttcacttttgattggtttctgacatcctatctt

SEQ ID NO: 146843 - DNA, 1273 bp, Arabidopsis thaliana landsberg
ctccctcatcactttgataaacaagagtctcatttttcgcttttccaaagggaacaacttcttcggattattatctatggcagagaagcttgagccggtgaaggttttgtactgcggagtttgctctcttccagcggaatactgcgaattcggtcccgatttcgctagatgtaagccctggctcgtcgaaaacgccccagatctctatcctgatctcctcaaaggtaccttcaaaccctaatcttataattttcgaccgttcttcagaactcgtttgattttaggtttgtagtgcctcaaattttttattcttccaagggctaagcgattcacacaatcgaaaagatgaagatttttgttttaacttgaattataaatttatgggtctgttcaatttggtgattatgttatgttggattgtcaatgctgttgtgtagagttttacgattttttggtaccctttacacttctgttttactggttatgacaatgagtttaatttgatttaagacttactaatatttgagtttgcatacgaattttaaatttgtccagaagcaattgagatttcagcagataatgtttctgacaaactccagtcggtgggaatctcttcaggtggtgctgatggggcaccatcttcagctcagactggtaaggaaccgtgtctatgtgtgtgctttttcttgttcatactattgcatacacgtatttggtactgtacatcgctatgaaaaattccaaactgaatggctggaaacatctttaatgtatttgtttttctggggaatctgcaatcgaactgttaagcatgaacgataaatattgctagagtcactgattggtgatgatgcctatgttgaaaggatttggcttttagttgaatttctactcagtaatcaaaggatcttccaatatataggagggacatccaagaaggaggaagtgaagcgcctacctggggggaaagttaaaaagaaagtaagtaatatcgtgtaaatttcgtcccaccttactggaatgtcttaatgcattaccaagtttccatggaaacgtacaaaacaacatgcttggacattccctgactcacatatctacgttttgctttctggtttccattccttcgtctttgacgtggacatgtttgtccggttgtctaattttctaatgtttatggatgctatataggatcgacaggaagttatctttgaaaagattaaacgcatcaaacgcaagtgtatcaccattgtgaaaggactagaactgtttgtga

SEQ ID NO: 146844 - DNA, 778 bp, Arabidopsis thaliana landsberg; identical to SEQ ID NO: 14084

SEQ ID NO: 146845 - DNA, 647 bp, Arabidopsis thaliana landsberg
gccgcagctagagagaaaacgaaactaaccggagcatgaagagacgaagagcggcgaagaaatctccggcgatggtgacggttaccgattggaaagggttagattgcggcgaagagacgagaatcgtaaggagattgatgaagttcgaagacttgcctgagtatttgaaggacaacgagtttatacacaaccattatcgatgtcaatggtctctcaaagatacttttctcagtgctttctcttggcacaacgagactctcaacatttggacgtacgttaaatttctttcgaaagggggtttttcgtaattttatagaagtttcgaaattgattttgtggagattttgataatcgttaggcatttaattggatttggtatatttctgtggatgacggtggtgagttgcttggagacgacggagattagtctcgccggcgtttttaacggcatggccgggtaagaaccaccgaggttaaaatcgtcattttctgctctgttttttttaaagtcaccctaataatatataattggcttttttcggggacctgacgatagagtgaggatttgcctctcaacgcaatcagactctgcttcatgtaagttatttgtattcttttgatattttttaattgccgccttatcttat

SEQ ID NO: 146846 - DNA, 1072 bp, Arabidopsis thaliana landsberg
  unsure (1)..(1072): unsure at all n locations
aacaggaaactcttggggaagttcttaatggtgatcgttaaatgagctctttatataagctgaaatttagggaggacaaaactcattttgtattgtgccggaacacgttancatcgagtgatattgccaggttcagagatattattgctcaagattactactttcgaatgtactacgatgatctccctttgtggggatttgttggaaaagtagagggagattattttggtcaaggggaccagcatactaagtattatatattcagtcacttaaagttcaatgttctgtacaatgcagacaaagttattgagatcatcagttttagtgatccgagttatatggttgatatatccgagaacactgagattgatgttcaatttacatactcggtttcttggaatctgacttcagaacgctctgagacaagaatgaataagtactcccgggcgtcgtttcatcctatcagccagaagattcacttcttctcatttctcaactcgataactgttgttgttttgttaattggacttatatcttttctcttcatgcgccatctcaagaatgaactaagaaggtgacaattttttcttaggagactattcttgttttgcgtagtttaacggatgtggtgataaaatttacatttttgagtttaacttctcctttatgcatttcagttactctatcggagatgaagaagagagaaaggaagcaggttggaaactcgtacatagtgatgtatttcgatgtcctcggaacatcagctggctttgtgcaatcttaggaactggtactcagttgctaatcttgtaagcttctattatctataattccattattactgttgtaagcttctattatctataaacatttggcttctacttaccaaaaaaaaaacatttggcttcttattattgttgtttctaacttgtttttcgtcttcaggattattgctctatttgcattggccttcaccggttttctctacccatacaatcgtggaatgctgttgacttctctcgtcatcatgtacactctaacatcaatagtggctggttacacatatacttct

SEQ ID NO: 146847 - DNA, 1746 bp, Arabidopsis thaliana landsberg
  unsure (1)..(1746): unsure at all n locations
tccattgaagatcagtggcttgctcaggccgatcttatgactttctcggaagctgtcgtgcaggccatcaagcgcatgaacctcaacgagaacgagaagaatcagagactgagcgagtggttaacccatgcaaggtaaaactatataatttaccaaaatttaacttttgtttacgtataggtttaactttttttttttagttataattatgaagtccgtagtataatttcttctaaaatacaaaaaaaacgtccattatgattagttaaaaactgaaaatagttttattttttttgtttccgtattatttgttaggttccttataaatcatagatctatttatgtttaaataacgatcctaaaagttttttctctaatgttcacaaaaatgttacaattggactaatcaggtatgagaactgcctgtcaaatgagcaaggccgagtgttagcagcaaaacttggtgtgacagatcttttctgggactgggacttgccgagaaccagagaaggattctaccggttccaaggctcggtcgcagcggccgtggtccgtggctgggcctttgcacagatcgcagacatcatctggatggaaacggcaagccctgatctcaatgaatgcacccaattcgccgaaggtatcaagtccaagacaccggaggtcatgctcgcctacaatctctcgccgtccttcaactgggacgcttccggtatgacggatcagcagatggttgagttcattccgcggattgctaggctcggatattgttggcagttcnnnnnnnnnnnnnnnnnnnnnnnnnntgctcttgtggttgatacatttgcaaaggattacgctaggcgcgggatgttggcttatgtggagaggatacaaagagaagagaggacccatggggttgacactttggctcaccagaaatggtccggtgctaattactatgatcgttatcttaagaccgtccaaggtggaatctcctccactgcagccatgggaaaaggtatgttagtttatgtttttaacatttatttgctcacataaagtaactttagtgaaataatagtgtgttatgataagattctgcttataagaacaatgaaaaggagtttatatgtgacgttctttatatctttcaactataattgtttggttactaaagattcgtccggttggtcgagacaagtaatagagtcatttctattacacttctattataggtaatgtagaaaatataaatgcattaagtagtacgtagtgaaaaaacccggtagaagtaatccaattatagaatattttttctttcaaaattaacaatgacgttaccctttttcatatataggtgtcactgaagaacagttcaaggagagttggacaaggccgggagctgatggaatgggtgaagggactagccttgtggtcgccaagtcaagaatgtaagacatatgttcattacggcggtgcggccaaagcggtgcggcatcttcgtaggaaagcttggaaaccacactatcttcaatatatatctttggacacccgagtaaaagaaaaaaaaagacagaaacagataataaatgtatctttgttattgtatttctcttcttcaacgtaataattgggttaaaaggtttggggcaatattttatggggtttgcttctttgtatggatatttggaatttggtgttattggctttggttatatgattattgatattcttataatattcgtgattcagtttcttgtt

SEQ ID NO: 146848 - DNA, 939 bp, Arabidopsis thaliana landsberg
ttttggcacctctgtttgccgacatcgctgatactgtctacgacattctccatggttagaaccctttctacttttggcctcttttgtaactctgttgcgtttctgtattgaattggaaagaaaagttttgtactttcctgaactttgagctcttggttgaattgtctcttgaccaaagatagtagtatgagtgtatgaccaagattcaagctttatgtgaagttgtgttttgatgttgggggatgttgttattgcagggaggatttgggcaggtcataacatattgaggtttgattgtgcaaggatcagagaagcatttgcagagattggtcgtcaaccacccgagccaaaaggcgccattgattcattgggtttgctaactcagaagtttggtagaagagctggtgatatgaaggtacaactaaacattcgaaaaatgttaatattttcacgacatcagaatgttacatgatgaaaatttatttctttgattgagttttaaggtgatttaaagtgtcttttaagtcctgtgtgctttgtttctgtagatggcaactttggctagatatttcggactcgggaatcagacgcataggtatataaaaggcataagacttaagaatctaattatttacctcaaaactatcaaaatactggtgtgctttaattctttgtttctcttcaggagcctggatgatgttagaatgaatcttgaggttctcaaatattgtgctactgtcttgttcttggtatgttctgttaagtcactttattaatggagaatctttgtctcctattagctatgttgtaaaaactggactaatcagcggcactgcatttttatttcgcaggagtcgagtctcccatatgcacatgtagataattcggtatctcctggaactattagttcaaggagacgtattgatgcatctcacgagg

SEQ ID NO: 146849 - DNA, 291 bp, Arabidopsis thaliana landsberg
gctatacatataacaaacacaagaaaacaccaaaagaccacatatccttccaatggccccccttcaacgcaccatctcggatatttcacaccaaatttcaatagacaacactctaacaaaagaaccatctccaaccgcaaccgcaacaactttgttatccttatcagcgatatccgaagtggaagatgcaaagtgtgagtgttgtggcatgtctgaagagtgcacgccggagtacatacaccgtgtgcgttaaaaattctcagggaaactgatttgcggcctgtcgaaaaa

SEQ ID NO: 146850 - DNA, 976 bp, Arabidopsis thaliana landsberg
attagctcaaattctttgcaaaattgtcgttacaaagatggttagggaaccatggtcaaagctatggctaaaaggtgtgattttgttggcaaatatcttttgcagattcgaagttcacacagcaggagcttccagcttgcaagccaattctaacccctggttgggttagatttctttctaatctctattgatgtttgagacatctgatttctgtacaaggcgcaactaaaagctcctttttttacatgtttgtgctgttgtgcaggtcatttcgacatttttgatagtcagtgttatctttattccccttggagttatctcccttttcgcttcccaggatgtaagtagttactaaagcattgctgctactcatcagattctcttccatatctcacgtgtttcatctcccatgtttaggttgtggagatcgttgatcggtatgatactgagtgcattccggcacctgctaggactaacaaggttgcatatattcaaggagatggagataaagtttgtaaccgggatcttaaagtgagttacttctgccgccacgtttgttttgttctttgagatttgatagatttttgcatttgttgtttactttctctttttctccactggcattcataggtgacaaagcgtatgaagcaacctatctatgtttattaccaacttgagaatttctaccagaatcaccgaaggtatataacacttgatagcaactacgccgtagcattatataattttgtattagacctataatgaacaatgtgggttctatgtggaaatcaacaccgatatcatggagtaggcgggaactaagactgatgtgtgtatctaacttagattagtcaagattttatagctctaatgcgtcgatggtgtctttgaaacaggtatttaaaaagtcgaagtgattcacagttgagaagtaccaaatacgagaatcaaattagtgcatgccagcctgaagatg

SEQ ID NO: 146851 - DNA, 1490 bp, Arabidopsis thaliana landsberg
ataacaatttattgttttcttccggttccgtttctctttggtttttcttccattgagaaagttgcaggtctcattatccactggatatttaaaagaacgggccgtcaccttttcttgaaggatgaagaagagggaaaaccaccattgcttcgacgcatggtggaagataccgatgattgtcatttcatgtgtgccactctatgtcccatttgtcacaagttagtttacctaactttgtctcgataatgtctcactagaaaatgttttcctcaattgcagatctgcactgcgagccttcaaaaggcgggtggcttattcaaatgtgggccatgatcgtatcctttatgtgtgttacttgtagaaatgtccttgttagcatcagacattacattttttttttccttcactagatctaaatagacgttgttggctggaagacggcatccattagacgtgacagtgaattgcctaaggtatctgactctgactggattacttgatttggttcaggattttgatataatagttctctctgataaatgaataatttcttgtttaccagtgggaagattctctgaatgagaagtatcctcatattgtttacgaagaactctgcaaggcatgtgatatggaggacataccagaaggcgagaatcattcagacgacatagaaggttagcttgcacttgttgcactgaccgtttaggcatttatcagtgattttgtagaacttaatgctcacttctcttatttctatttctactttctatgctttagatcttattagctggtaaaagaagtgttcagtccaaattcatatgttgatgatctaccatatgatgtgcataagctttcttattcatatgcatcatgatgtatataataacgtagtgcctcgtcaattgtgcagaagaaatgatcaatggcctcttctctgtctcatgggaaaaagttgatgttcgctttcacagtagcaggcagaggtttgctgcccatagtgttatacaggtctctcactctcacctgccatacctcatgtgtcttaagatataacatttgtttatcctcacacctaaggctttttaattgcatcctctcttgatagttatctttctgttgttatatacattgaacgataacatattgttcattcattttgataggattaatctccacatactttctagtaaaaccataaagtctaatagtctgtgttatgccgtttacaggttaaaaatgaagatatgcatatagaaggagcagatgtcatagagcatatcatcgatcatttccatgcttaaatcagtaaacttttcatcacccaagagtttgggacacgacattaaggactcaaatttcttatagtagagcaacaattttccagctggacgtttatatgtcacgtagttgtttacactataaaatcatctcattttgtctgtaattgcacaggtagcaagacgtcaattatgaccaatgtatttgataca

SEQ ID NO: 146852 - DNA, 825 bp, Arabidopsis thaliana landsberg
cagccttgtcgacggcaaacactatgaggcttcttacagtggcgacaataagtttcagactgatcatcagcagatcgtccaagaagctcctctaaggcggcgaacggagacgaaagatgcggatttcggtttcatcggcaaagttttgcagatcgttaaggagccggaggttgtgtatgaagagaaggagaggcctgcgacggtagaggaggaggagaagaagtgtatagttgtggtgagcaaatcggaaaatcaacctccggtggagaaacctcttgttacggctaggatcggccaaaagaaaccggtggttaagactacaccagcaggtaatttaatttaattatttaatcattaaggtgacgtcatacgaatttagatattttataacaaatctaaaaacactatttgttaaaaggttaatttcgtaatttttcagaaaggaattctatgagagcgttgagagttgcgaaaccgaaacgtaacgagacgttagagaatacgtggaagatgattatggaaggcaacaagtcaacgcttccgttgaccagttattacaagagacccgacacgttcggacttggcgaagagacaaaacaatctggtgttttgaagaaatcggagacgtttagtgacagaactaactgttaccagtctctgccgccgccacctccgccgctagtgaaggtgaaaaaggtgaaagtgtcacggagtagggatgagcttaaccggaaagtagaagcgtttataaaaaaatgcaacgacgagaggttcgcgtcgatgaaactggacaacgaagtggctcgtcatggtctttcttattaa

SEQ ID NO: 146853 - DNA, 1671 bp, Arabidopsis thaliana landsberg
  unsure (1)..(1671): unsure at all n locations
ttctgcaattctacttgcaaaacatttggctatatgactataattcgacttctgtccctttgtgcagaaccaaataactaccatgcggagatgaggctaggattaggtaagaaacagatgtcctgttttcctccttaagtttcatctttttccatgaaatactcaatttgaatcagttacctctctaatnnnnnnnnnnnnnnnnnnnnnnnnnnnnnnnnnnnatcatcttggtggcactctttgctgtcatccataggaattacagaaggaaagatggttcagagctctccagagacaactcaaaatctgacgttgagtttagtcaagtcttctttaagataccaatcttctcctataaggaacttcaagcagcaacagacaactttagtaaagacagattactaggagatggaggctttggcactgtgtactatggtaagattgatcagagcacgaacacttttagaaaagtgtgaaatctctgttaagctaatcttttcttcctttttgatctcaggaaaagtgcgtgatgggcgagaagttgcagtgaagcgtctctatgagcacaattacagaagacttgagcaattcatgaacgagatagaaatcctcacacgtctccatcacaagaatctagtctccctctatggatgcacttcacgccgcagccgagagcttctccttgtctatgagtttattccaaatggcacagttgcagatcatctctatggcgaaaacacgccacaccaaggctttttaacatggtcaatgcgcctgagcatcgccatagaaacagcgagtgcattggcttaccttcatgcttcggatatcatacaccgggatgtcaagactacaaacattctcctcgacaggaatttcggagtaaaagtcgcggattttgggctatccaggttgctcccgagtgatgtaactcatgtttcaactgctcctcagggtactccgggatacgtggatccagaatatcatcgctgctatcatctaacagataagagtgacgtgtatagctttggggtggagcttgtcgagctgatatcatcgaagcctgctgttgatataagtagatgcaagagtgagatcaatctatcaagcttagcaataaacaagatacaaaaccatgcgacccacgagctgattgatcagaatcttggatatgcaacgaatgaaggagttagaaaaatgactacaatggtggcagagttggcttttcagtgcttgcagcaagacaatacaatgagacccacaatggaacaagttgtgcacgagctaaaaggaatccagaatgaggagcaaaaatgtccaacctacgactacagagaggagacaataattccacacccttcgccaccagattggggtgaggctgcactattaaaaaaatatgaaattcccacgttcaccagtctctgtgactgaccaatggacaagtaaatcaaccacaccgaataccagcgcctacgaattctaggatccaccaggtattggtttcttctcatttgtttcaatggaacgatataagatgaggcacagggttgtgaagcagtaggtaccgagagaatgtacatagtgacataacttgaactaccaatcaccaattttctatgtctaattttgtctactgtatgtaagattgaatcaaaaggtatttat

SEQ ID NO: 146854 - DNA, 996 bp, Arabidopsis thaliana landsberg; identical to SEQ ID NO: 43753

SEQ ID NO: 146855 - DNA, 2644 bp, Arabidopsis thaliana landsberg
cttcgaattcgtgctctttcctgaaccgttcttccccatcactgcgtgaacctattagcaaccacaaaagaatctatggattacaatcggcagcaatgcaaaacaaatccacacaaatagaattcacaagttatgatatcaaactcaaaactttatcatataatgagacagcactaccaggcaaagctttctgcaaattaaatttcaagtcttaaccataaaattgcattgattaatacgcacctctccttcgtagacaaccaaattgacgcctttcagtatctcttgtctcgattcagcaatcactgctctcaaatccctaacttcaagcaacgggatcctccccacgtcatcacgatcttccaccaacgaatccgaatcgacggctgaggatacggaagacgccgaaacaataactgaacggcgagtagttcgcaggattggagcggcggcggaattagctcggagattgcataatagaacacgagagggtgaagtcccgaggcgaactcgctgagtaggaagaggaggaggagaagaaacagttggaacgaattgagctatggagtatgcgtgacggagctgtaggttaacgccggccatggagacagaaattgcggcggaagaagacggtggaggttttatccggtgaagtgatgtggttagttaggtccagggattcttttaatttcacatgttgaatgccacgtaatatatatatcggctactagcttaattaaaatggaaacaaaaaaaaaatggaaataacaaataaaacgacatcactttgtgttgatacgcatattcttcaaaaccttaagagcttctgtccttgaagtacaagaaactatttacacatatgagaccttgggatgaagaaacagacaaagtccataccctaaagcaatcctaaacccataccgtaatctcaaaatctcttcttacctctctttctatcttatatacatcattcaaacattttttatgttttcatatacagtttgattcatttatttcgtaaaggctttgaactttttgtcctgatatagtgtgatctatatataaacatatatggcggcgattttcaagagaccaaggccgggaggtggccgtcatccgccaccgctggctccgacagtgagtagtttcaagccgagagctcaatggactaactccggatcttccattttcctctacgttaatcttcctggtcttttttcttctctctttctttctttttgtttcttgagatcaaactttaattgataacaaactttatgaatttctcgtttattgtgtggaaccggcagggttttatagggatcaaatagaaataaaaaaggatgagaggacaaggactgtccagattcaaggccagcgaccgctctctgctcagactaaggctcgtttcagtgaagcttaccgtgtccctgatacctgtgacatgaccaaattgagcacctccttctcacatggactcttgaccatcgagtttccagcaatcgtggaagctaacaaacaggagaaagcagtccaagatcaggagaagattggacagaggtctaatcaggagaaaagtggagggcctggtcctaatgggagtaccttgggacgaaagaaagctttggaggaggagaaacaagtgggaacaagtcaagagaaaaccactccaacgttgaatgaagaagcacccaaaacgtataaatcagtggttgagggtaaaagagcagtgccaacgggcagtcaagagaagtctgaagcgaaagttaaagcgcgagaggcaatccctagcttagggggaagagaacgtgcgaaagaagagaaggtggttgagagaaaggaggctgctcacatagttcagcaaaagataggagataaattgaaggaggaagaggctaaaagtacaccaacccttggtggtagcttaaaacctaaggtacaggcaaaagaagagaaagtaattgagagaaagaaagatgatgatataagtcagcttaagactggacagaaggtgaaggaaaaagagattagcagaacgccgaccatagatgctagagtggaatccaaggaacatgccaaagttgttgagaaaaaggaagatggtgaaataggtcagaagctggagggaggaaggattaacttgggaccaaagaaagaagataaatttacaaaaccagttgttggtgatgaggcaagaagaatagagaagaatgttgctcagagaaaccaagcagagcctaagctaaaaacgaaagagggagatgaaagaatcaaactggatgttgatgatggcgtgagaaacaagcaggatgagaataatgagatggttggagacatggttagtgaaggagagattcaagacagagtggagcagaagaagatagacgaagctggtttagccaaagatagaggcgatctaaaggataatgctgaagtcgtggaaccagaaaccggtccattactagtcaaagaaggacagaagaagagcgacatggatcctcctcttgcagtaggaggaagaggaatgggtgaagaagagagtcggacatatgacatacctttggtgaatgttggtgtagctgctcttgtgattatggggtttggtgcttacctaaactcccccatactcataactgtctcctga

SEQ ID NO: 146856 - DNA, 2124 bp, Arabidopsis thaliana landsberg; identical to SEQ ID NO: 37991

SEQ ID NO: 146857 - DNA, 547 bp, Arabidopsis thaliana landsberg; identical to SEQ ID NO: 42640

SEQ ID NO: 146858 - DNA, 660 bp, Arabidopsis thaliana landsberg; identical to SEQ ID NO: 14266

SEQ ID NO: 146859 - DNA, 882 bp, Arabidopsis thaliana landsberg
  unsure (1)..(882): unsure at all n locations
tctctctttcgctgtccgattccgacagatagacagagggcgcgaaacagagagaaaataagaagaagaaggacgatccagatatggaggatccttctaacccacaaccaaaccagagcaatctctcgcaatgcccgcctttagccacagctccgacacctgcgccagttcgtggtccgtaccaccggagagcacattcggaggtccaattccgtctccctgaagatctggatctctctgaaccattcggaggattcgatgagcttggatccgaagatgatctcttttgctcatacatggacattgagaaacttggatccggatccggatccgcatccgattcggctggtccttctgctcctaggtctgataacccgttttccgctgagaatggaggtgcggaggctgggaattcgagacctcgacacaggcatagcctctccgttgatggctcttcgactttggagtcaattgaggctaagaaagctatggctcctgataagctcgctgagctttgggtcgtcgaccctaaaagagctaaaaggtttcatctttaatccccaaacgtcgagaattttgtttgatatgattgaaatctagttccttgttttatgcttttgtttacaattcgtggggaagaaaggcagtttctttatgaccttttattgatgaatatgtaatcttttgatgttgatgtgatgcattagtcattaggtgttcttttggagatctttttgtttttcttggttacgtgagtacatcaccttttctttttgactatgatctcgaatctcaacgataactgatttttaactgaaattttagttatagcttctactatgctgcttttttattttaggtctttnctgctgagagagagag

SEQ ID NO: 146860 - DNA, 666 bp, Arabidopsis thaliana landsberg
  unsure (1)..(666): unsure at all n locations
tcttttttccctcttcaccacttctctctcaaactaaagacaaaagctcttctctcttccctctctcttctccggcgaacaaaagatgattacggcggcggacttctaccacgttatgacggctatggttccgttatacgtagctatgatcctcgcttacggctctgtcaaatggtggaaaatcttcacaccagaccaatgctccggcataaaccgtttcgtcgctctcttcgccgttcctctcctctcttttcacttcatcgccgctaacaacccttacgccatgaacctccgtttcctcgccgcagattctctccagaaagtcattgtcctctctctcctcttcctctggtgcaaactcagccgcaacggttctttagattggaccataactctcttctctctctcgacactccccaacactctagtcatggggatacctcttctcaaaggcatgtatggtaatttctccggcgacctcatggttcaaatcgttgttcttcagtgtatcatttggtacacactcatgctctttctctttgagtaccgtggagctaagcttttgatctccgagcagtttccagacaccgcaggatctattgtttcgattcatgtgatccngacatatgctttagatggagacaactttggaaactgactgagata

SEQ ID NO: 146861 - DNA, 1732 bp, Arabidopsis thaliana landsberg
tttaactcgattttttttgttttacaaagtcggcacaattctgaaacccttaattgaatccaagagaatttttgattaaattaagtctctggaccctgaagtccccacacaagcaagcttcgatggatcccaagaacctaaatcgtcaccaagtaccaaatttcttgaacccaccaccaccaccgcgaaatcagggtttggtagatgatgatgctgcttctgctgttgtttccgacgagaatcgcaaaccaacaactgagattaaagatttccagatcgtggtctctgcttccgacaaagaaccaaacaagaagagtcagaatcagaaccagcttggtcctaagagaagctctaacaaagacagacacactaaagtcgaaggtagaggtcgacgaattcggatgcctgctctttgtgctgctaggatttttcaattgactagagaattgggtcataaatctgatggtgaaactatccagtggctgcttcaacaagctgagccatcgattattgcagctactggttcaggaactataccggcctctgctttagcttcttcagctgcaacctctaaccatcatcaaggtgggtctcttactgctggtttaatgatcagtcatgacttagatggtgggtctagtagtagtggtagaccattaaattgggggattggtggcggtgaaggagtttctaggtcaagtttaccaactgggttatggccaaatgtagctgggtttggttctggtgtaccaaccactggtttaatgagtgaaggagctggttatagaattgggtttcctggttttgattttcctggtgttggtcatatgagttttgcatctattttgggtgggaatcataatcagatgcctggacttgagttaggcttgtctcaagaagggaatgttggtgttttgaatcctcagtcttttactcagatttatcaacagatgggtcaggctcaggctcaagctcaaggtagggttcttcaccatatgcatcataaccatgaagaacatcagcaagagagtggtgagaaagatgattctcaaggctcaggtcgttaaaaggattgggtttttttttgtatcttctggatttgaaaaagcttttggcttttgtcttgtgataatattgctgtactttgtaccaccatggagaagaaaaagaaaaggttatattctgagtgcgagtgataatctatacttattgaaacctctgcaaaaacacaaggtgagttcaatttgaggatgatgatacaagagagtggaatcttcaaacctttttttccgagtgtttgtgacaattttttggcagttgttgtttgaacttgcaggtggagtttgttgaatacacacagccagagatttttttgtttggagtctttaagttgcagagaggcttgtttttacttgttctgagttttgttgcttttgaatatcaagaaaccggcttttttcagatagtacaacaatggtaatgtatacttgtcttccatcacatatttgtagaatgaagatttatagctctcttttgctcagtattcttctattgcatctccaaagattgttctctttcgttcgatctctctgaatgagttaaagactttcgtttagagtcgagtgtaaaacacttcgctgcatgttctgattcagtggctttgagctgcaatggatttcacaatgatggtaacgttgtatttcttaactcttacttacattcatgttattgc

SEQ ID NO: 146862 - DNA, 1231 bp, Arabidopsis thaliana landsberg
  unsure (1)..(1231): unsure at all n locations
gaggatgataagatatgtcttccatcgtgctttaactcttttactcagncttgangatttcctcttatctacaggnctctgataagaaagcagctgactggtgtgcttcaaatggtaacataccctatttcgagacatcagcaaaagatgacttcaatgtggatgaggcattcttaaccattgccaaaaccgcccttgctaacgaacatgaacagggatatgtaagttttcttttgggttaacctctaataaaggaaagctgggacctttttaatggttaaaccggagagactgaatagtgtagaatctcaatcttaatctgaatatgacgtttaaatgtagaaggcagatagtgtagcttaaattatgtgactttcttacatgtctatctgcgattgggctacttgtgaattccaaactcttgtgtgatccgaattgaaaactaagaatgcattaaaaataaccgctgaatacttatacagtatgtacctcatacacaatggcttgggttaattgcagatacttccaaggcataccagatgcagtgactgaaaacgagccaaaaggcggtggttgcgcttgctgaaccacagatttgaggattcaatgacattcgtttttttgatgcattcatttgaaggttggtgtactcttgagttgcagaacgataagcttgtagaagcaattttttgtcattccatcatatattaattgattggagaagtctgtgtatgatcaatcgattctgctggatacaaattttatttttgtaagaagaaccattattgctcttaatccctatggcgatataaagttgcatgctacactatttcagtttggtttgactcaactgtcggatatgttactacatctatagttagaccatatgttcattttgcatgtatagtttttttcataaaatattgtaaaactttgaagtcaaactttaacctagatcatgtgatattttaaaaacctttgtgaatgtaatacactcgaatagctattcaggtgacaaaacctaaacagagattgtcttaaccaattcagagaggatatagcatggtcgtctattttctttagttctcaggctgtattattacccggacgtgatctgattctagctgatacagtgtactatctccaacctggaggctacatccgtgcagaagaaggtggtggactcagtgaatctgcaattatactttcaatgcaatcattacagctttga

SEQ ID NO: 146863 - DNA, 997 bp, Arabidopsis thaliana landsberg; identical to SEQ ID NO: 33747

SEQ ID NO: 146864 - DNA, 938 bp, Arabidopsis thaliana landsberg
cacacgcttttatttattttggagctaatcggaaaacaaaaaagcaacggccaaagcaatgaggaaagatgatctctgcatcactgttcctaccttcttccgatgtcctatatctctcgacgttatgaaatctccggtgagtctttgcaccggcgttacctacgatcgagctagtatccaacggtggcttgacggcgggaataacacttgtccggcgacgatgcagattcttcagaataaagatttcataccgaatcggactcttcaacgtcttatcgagatttggtctgattctgttcgtcgtcgaacttgtgttgaatcggcggaattagctgctccgacgagagacgagatcgccgatgcgatcgatagagtgaagatcgagaaagaagaaagagatgatcgcgaggttttgtcgaagattgttcgattcgggagagaatctgatgataacagaggatttctcgccggaaaagatgatttcgtgatacttctcgtggatctgattaaccaggtggatttcgaaaccacctccgccgcgaaatctctggttgttcaagaagcggtgaagattctgagtacgattcgaagcaaagtctcagatcggagacggttttcgaatctgattttaaccaacggtcgagatcggttatcggtgatcgtctacttgtttaaaaccgggaatgtcgaattgaaaattgattgcgccggtttacttgagttcatcgccgtcgacgctgaatcaaagctgttaatcgccgagagagatggattaatcacggagctaatgaaatcgattagtaaagattctgatttaagtttaatcgaatcgagtttatcgtgcttgatcgcgattagctcaccgaaacgtgtgaaactcaatctcctccgagagaaactcatcggagatgttcgaagctgttatcagatacaacgtc

SEQ ID NO: 146865 - DNA, 1680 bp, Arabidopsis thaliana landsberg
  unsure (1)..(1680): unsure at all n locations
aaaaaatcttagtttattacttgaatggaatccattttaggtccctttcatcttgaggcgtttaaaatctgatgtcatgcagcaacttgttccgaagatacagcgggtatggatatatctatgcacaattaagtacacgatattaatcttcttagctgcaaatctcattaatttcccatcaatccaatgcaggttgaatatgtattaatggagagaaagcaggaagatgcatataaagaagccatagaggagtatcgtgctgcttctcaagcacggcttgtgaagctttcatcaaaatccttgaattctttagccaaggcacttccaaagcgtcaaatttcaacctcctttactcaattccggaaggtaattctaaacaaataatacaaagccccttttgtgccaaatgagtgtgttattcatgtgttattaaattttggttgtacagattgcaaaccatccattgttaattaggcggatatacagcgatgaggatgtcattcgcatcgccaggaaattgcacccaatcggtgcatttggatttgaatgttccttggatagagttatcgaggaagttaagnnnnnnnnnnnnnnnnnnnnnnnncaggtaaatgtttctctttccaaaagcagttgaatatccattaacaaacatgttatgcaattgaagaagctaactaacttgtttctttccatagcttttgttccaatatggagttaacgataccaaaggaactctctcagacaaacatgtcatgctctcagcaaaatgtcgggtacgtgatattcttcttcatttcataagtcttctttgtgaaactgattaagtataactaaacctgtgagcgatctaaatctccctttatgtatcagacattagctgagcttctcccttcaatgaagaaatccggccatcgtgttctaatatttagtcaatggacatcgatgctcgatatcttagaatggacacttgatgtcatcggcgttacataccgaagacttgacggcaggtaataaaagaaaaaagagtaatttgtcacatttttgacgattctacaaaaaggaagaagcttaagtcattttcttttgtttcaacagtactcaagttacagatagacaaaccatagtcgacacattcaacaacgataagtcgatattcgcatgtctcttgtcaactcgagcaggtggacaaggtcttaatttaaccggggcggatacagtcattattcacgatatggattttaatccacagattgatcggcaagctgaagatcgttgccatcgtattggtcaaacaaaaccagtcactatcttcaggtttgagctttaaatccttggcccagtgaaaacgttttagagatagcatattaactctggcaaatgttggtgcagactggtgacgaaatcgacggttgatgagaacatctacgagatagcgaagcggaaactagttcttgatgcggcggttctagagtccggagttcacgtagatgacaacggagacacgcctgagaaaaccatgggagagattcttgcttctcttctcatgggataacattattgttaccttttttgttttgaggtaaaattagtcaagaaacgaagttaatgtgttattctaaacatgtgtaaccactagctattattagacttaaatttaatagatcacgatagttatat

SEQ ID NO: 146866 - DNA, 835 bp, Arabidopsis thaliana landsberg; identical to SEQ ID NO: 42918

SEQ ID NO: 146867 - DNA, 1152 bp, Arabidopsis thaliana landsberg
tgcagataatttccgcagtttctggaggaataacagacctatcattcaatgctgttggctatgcttggcagattgctaattgcttcttaactgcatcgtactctgtgagtaaacatttgatcacatttgtgttttcttttctcaaaaggttgggagtcttttgaaacaataaacacagatatgcaacggagatcacaatatattacatgctttttggttaagactaagtcaataaactaaacagccttccctataatcattacgatactggcttgcttttgagttttaagatgctcacgagataccgagattctgttacctttagaaaattatatagccttgcaatccattgtcaccggtaacctgagtacttcactcgttgttgaaagtaagaatagcatgttaaagagaagacttttggcaaagaatgcaaattgacatcatcaacttctcagttctcattaggttttccattgctgggtcaaaaaacgagagtgttagactgttaggttcccatatatttatccctacatcctgtcaacaaaaaccaagtgattggcttgctagctaggctactatactcataaaatttgcccccacttttgacttgctcatattttggtgtcttgcagctatctttgagaaagaccatggatacggccaagcaggttactcaatctggagacttgaacgagctctgcatggtcttgcttaataacacactttcattaccacttgggcttcttctttcttatttcttcaacgagatggattatctctatcaaacgtgagttcctgtccttgtttcctgtcaatggaaaatggtttgtgtcatctgaaaacaaaatggtgtattatatttgtgcaggccacttctacgattaccaagtttctggatggtcatgacacttagtggacttctagggcttgccattagctttacttcaatgtggtttcttcatcaaactggagcaacaacatacaggtagcaaattagcgagagagagcgagagagaaacatggagttttccctatatccttttttgcttttttggtggtttattccttctaactagatacatctttcgttttattcaaaatcacagcctagtgggatcgctaaacaagatacctctatccatcgcggggatc

SEQ ID NO: 146868 - DNA, 801 bp, Arabidopsis thaliana landsberg
agaatgagttcagtactctgtgcgtgcgtgtctgtttgtgttttttcagagagtcatgccaagctcatggttcctcctcttgcgattttgggtgagtcaatcaggaaaatccatagtcagaaaaataaagtcattacgcaccaatatgtgatcttcattgactgttttgacgtttcgattttcatcttccactcatttgctttttaatagctgagagttgatggtgtgcttatgagattgagagagacgagaatgcattataggtttggcgaagatgaggcaccaactgttcttcgtgaaaactgttggagagaagcaacatttcagtctctatctgcggttagttttcttcacttttaggacagattactagatattgttaccatttccaatctttgttcttattcaaatccgtctctttcccatcagcaagcaaataaccacaatctttttgttacaagacgatgacatattgcaatgtttctatgttagtgaatacagaaggtcccgtgatttaactcttgaatatgtatatatatgcagaaagggtatccagttgacttagcagtctggagcgacccgagctccatcagtcagaggcttccagtgattaagcatacgacacagaaactgaagatccctcgtaaagtttaagctgtttataaagttgcaaattatatctaaaagagcgtaccgatgagctttctttacagccaaacaaactacttactattgaatttgttaatgtaaggagttactccactgacttattgtggtggtttcatatgaacattcaaaccc

SEQ ID NO: 146869 - DNA, 1444 bp, Arabidopsis thaliana landsberg
aaaccttctattacttggccacgacgcttcctgcttctcaagaagggtacacttggattggaagcttgaagttaggagattacagttactcgaagtttagagagatcgatctctggactcgatacactacttctatgtactttgcagttgttactatggcaactgttggtaagttctgataactgaaaacttggtgaatatatcgtttgctttcattccttaacttggtatgtttcttataatgcaggttatggagatatacacgcggttaatatgcgggaaatgatattcgcgatggtctacatttcattcgatatgattctaggagcttacttgattggtaacatgacagctttgattgtaaaaggttcgaaaacagagagattccgggataagatggctgatatcatgcggtatatgaaccgaaacaaactcggtaggaacatccgtggtcagattaccggacatttgcggttgcagtacgaaagcagctacactgaagcagctgttcttcaagacattcctgtctctatccgtgctaaggtatgatgagtgcttcagagatgcttgttcagattcagatgatgaacaaatgtaaacttatgttgttactgcagattgcgcaaactttatacttgccgtatattgagaaagttcctctctttcgcggatgctcatctgaattcattaaccagattgtaagccttttgatttttttgaaaattactttctttcttcaggtaactaaagagcacacttttgcttttattacaggttataagacttcatgaagagttctttcttcctggagaagttataatggagcaaggaagcgtcgttgatcagctctactttgtttgtcacggtgtattggtaaacaaaatatctgtgttttcgtcaataaatgttaggaatgactaaaaaatctcagttactaaaccaaacttcttgtgatttcaatcaggaggagataggtataacaaaggatggatctgaagaaatagtggcagttctacaaccagatcattcttttggagagatttcaatcctctgcaatattcctcagccttacacggttagagttgcagagctatgtcggattctaaggcttgacaagcaatctttcatgaacatactcgagatatttttccatgatggacggaggattctcaacaatctgcttgaagggaaagaatctaatgtccggattaagcaactagaatccgatataacctttcatatcagtaaacaagaggcagagctagctctgaagttgaatagtgcggctttctacggtgatctttatcagcttaagagtttgattcgagctggaggtgacccgaataagacagattatgacggaagatcgcctttggtatgcttctacagcttctcggtttcttaaatccaacattggaagatatctattaacaatttttgttgt

SEQ ID NO: 146870 - DNA, 465 bp, Arabidopsis thaliana landsberg
gaagaatttcacatggctcacatcaatgtttcgtgggtcaaccagctcctactttagaaagtcttaaataatttgacttttcttagtcataacaataacattacacatgcgtgtataatctacgtataggatccgaagcacggtcactggtggctacaattcgggtcaggtgcattagtcggttattggccagcgtttttattcacgcatctaaagcaacatggaagcatggtccaattcgggggcgagattgtgaacaaccgacccggcggttcacacactacgactcaaatgggtagtggacattttgccggtgaaggttttggtaaagcatcttatttccggaatctcccaattgttgactgggacaacactcttatacccgcttcgaatctaaagattctcgcaaaccatcccaattgttatgatataacaggtgggacgaagcgtgtgggggtaactatt

SEQ ID NO: 146871 - DNA, 1056 bp, Arabidopsis thaliana landsberg
taaatgtcataatatagattaattaagtaatgttctatatgaacatcaaaggaagctatggttctgataagtctaggctatgtgatccaataaacagtagaattagttcaaaccttgtttactgatttactgtttaaacttatatttttcagattgtttgtattgtgatgcagggatatagtttgtggaatcgtccacttacacgaattgggaatagttcatcgggacttgaagccacaaaatgtgttaattagtaaagatatgactttgagtgcaaaactgtccgatatgggcattagcaagcgtatgtccagagatatgtcatcattgggtcaccttgccacaggtaagttgttttttattatcttttttttatgcccaaaatattggatttgtaacactttcaaaaataggactgattgatctcgcaaaacaaaactaacactagagaaaaactacataatgtcataagttggtcaatagaatgcatgttagtgtctgaacgcaatgtatgatcgtttgttgaatatgtgttatgtttatgaaatgagtttcaacccacatttttaaagtatctgctttaaaaactacaggttctggcagttcgggctggcaagcaccagagcagcttctacaaggtcgtcaaactcgtgcagtcgatatgtttagtttaggttgtgtcatcttttacactataaccggttgtaagcatccctttggtgatgatcttgaacgagatgtcaatattgtgaagaacgaagtcgacctatttctagtagaacacgttccagaagcttcagacctcatatcccgtttgttaaacccagaccctgatttacggtaatgttactttcctctctgatgattaaaatccactcgaaaaagcctaatctcttatacactgtttgctctttgcagtcctagcgcaactgaagtgctactccatcctatgttttggaactcagagatgagactgtctttccttcgtgatgctagtgaccgagttgagcttgaaaatagagaagctgattctgaaatcttgaaagcaatggagag

SEQ ID NO: 146872 - DNA, 1159 bp, Arabidopsis thaliana landsberg
tccctgtttcgattctcgagagggaacatagatgagtaccgcccctttctttcaccagaaggagctgagtcttacctctcctgaagtcgtcaccaagtacaagagcgccgctgagatcgttaacagtaatacaccctctctttcttcctttcttgttttaagtccgatttggatttagggttttgaaggtgtagctttatcgagtattgatttctgttgggttttcaattgcagaggcgttacaggttgttttagctgaatgcaaaccaaaagctaagattggtgatatctgtgagaaaggagactcttttattaaagagtgagtatatctcaatttgttcttaatgtagatttcgaccttggattactcttagaaatctatgtgtttggtctttcttctgtttttgtattaaaggccaacagcaagcatgttcaagaattctaagaagaagattgagagaggtgttgcgttccctacatgcatttctgtgaacaacactgttggtcatttttcaccgcttgctagtgatgagtctgtgttggaagatggtgacatggttaaaatgtaagttgtcttcaagtaatacctgtttttagatgtttctgtatgattcacctgtgttatttctgatgttgttttgcgtttctcaattgcagcgatatgggatgtcatattgatgggttcattgcccttgttggtcacacacatgttcttcaagaagggcctcttagtgggcgtaaggctgatgttatcgctgccgcaaatactgcagctgatgttgctctaaggctcgtacgtcctggaaaaaaggtatcatcagttttactcttacattaaacttgaaactataggcttttggtactataactgcctcttgaatgattgtcaaggttttacaaaacccagatgatgaacacttaataaatggctatggattattatccatatgatgcttttttgtcatagttactctgatgggatttttcttattctgatttttagtctgatccctcgttggatttactatgagatgttggaactttgtctaaggttttcctctcttggtcttgcacgatgctgttttttttttaacggacttcaaatgtaaattgttttgggaaaagatttctggatgaagaccgtaattgttatggattc

SEQ ID NO: 146873 - DNA, 915 bp, Arabidopsis thaliana landsberg
tttgttgtactgaaagtggtttatgttgaattgcatataggttgctgtggcacacacaattggtcatgtggctgcaacggtgagtatgtcaaaggttgctgtttctttcactcacatcatcaagagtggtgaacctgcgtttagtgtgcttgtctcgaggtttattttgggtgaaaccttccctacttcggtttacttgtctctcattccaatcattggtggttgcgctctgtctgcccttaccgagcttaacttcaacatgattggtaacatatatcttcatcttatttgttagatacattgaggtgtaattgggattgagatttgaaatggctttgcatgtttgattttggcttcaaatctgctgctccttacttttcaggtttcatgggagctatgatttcgaacttggctttcgtgttccgtaacatcttctcgaagaagggaatgaagggaaagtctgtgagcgggatgaactactacgcctgtctctcaatgctgtccctattgatcctcactccctttgccattgctgttgaaggacctcagatgtgggtcgatggctggcagacagcgctcgctactgtcggaccacagtttgtctggtaatttccctctacaacgaaagaaaactcttttaaactcgaaagatagtttctttacgtgtttaatgcattcttgtcctgttcctagaatccgttgtgaaagacccacttgtcaatttcttgtctttagctctcaaattttgtttgttatcatctaaacgtttaagaatccttgagtctttttagtgattagggcaatgaatccatcccattcacttatccgattccacatttttctttaatcaaatttgcacctgggtggttgcgcagagtgtgttctatcacaaatacaaacaagtgtcttacatgt

SEQ ID NO: 146874 - DNA, 2287 bp, Arabidopsis thaliana landsberg
tagttctctacggcatcgttgtactatcctccaaccggagatgacgtcatcatttaccggcctaatactcttcgaatgtttggggtttagtttaacaaatcaaaaactatcgaggttactaatgaaatattaataaagtatgagggcatttaaatgaaatatttcattgcttatgtagactatagtcgtctgtcattcatttcgagcaaatattttactcttttatttcgaagagagagagagaagaagacggaagctagaagaaatcgtttttgatcggaggtacttttttccgacgaatatactctctctagggttttcttttttctctctctccctcttcgtttcttcttcttagctcttcaatctcagctcgaatttctgggctactgaagtttaatctaggtgtgcgcttcgttgaagaaattttgaaatttgcagagaaatttgcggagaaagcggaaagattagatttatccatcgtttatcccagtaaaaagctttgatttttccacatgtcttttttccccccttttttcgtattaaaagccctagatatatatatcaaaattgaaaattatctgaaatcgatttcgtgggtttcagttccggttcggttctctttcttaaaatattgatttctgtcactttccgcgatgaaaagttttcgaattttgcttcttttggctccaaagtttttatctttcaaatattttaaatctgggtacttttttgttttggttccttctttgtgaattgtatctagggctttgctccttttctaatccaagatctgttttcgttctcagatagtgtatgagctagttgtttgtaatttgacggctctcgggaactgatctatctccggtgtctctgctttgtcggtagctacaggagtgaagagagtttctacaaggtaaatttgaaaactttatcattgaaccttgtacttgtagatttatagtagtgtttgggtatgaatgtgaataatggtcagatattgaaattgtgtagtagttgcattaggctctgagttctgttgtctaattcagttacaagttgatgttaatagggttttaatggaagatgatgactctccttcttctcgggatttggatgcacagaacccttatgatcgattgcttgctctagatacaagtatcgtagatccaaattgtaacttggattcggtttctgccatttatctagcgatgaagagctctaagctggaatgtgttgacgagcgtggtcaagattcccttattacttcggtatgcatggaggatgaagaggatgaggagctcgatgagtttgatccttatctgtttatcaagaacttgccgaacctgtcttctgttgtcccaactttcaggccggtcttgcttcctaaacaaacccgaagctgtcctcctatttctcttgtcctagaccttgatggtaaggctacttttcagttgattcgtttgtttaaaattgtatctctctttgcaggttttaatggcacacaaatcttagttttttctcaccaggttttaaggctactataacatatatgttttattttgcagaaactcttgtgcactcgactctagagccgtgtggtgaggtagatttcacattcccagtgaattttaatgaagaagagcatatggtgtatgtgcgatgccgtcctcacctcaaagagtttatggagagagtgtcccgactttttgagatcattatatttacagctagccaaagtatttatgctgagcaacttctgaacgtgcttgaccctaagagaaagctctttcgccatagagtgtaccgtgactcgtgtgttttctttgatggtaactacctcaaggatttgtcagtcctcgggcgtgatttatctcgtgttatcattgttgacaactccccacaggtattatactcttattatccttctacacagtgagtaaacacgtttagttctccattcttatgctttatacctaaaccgatcgatagatgcttttatcagctataattgtaggatacacttctagtataggaaaactataataactatgaaaggtagtatgggcgaatccagtagaagttctttgtttgcaaaagctatctcattggttttgtagggttgatgaaaagaagttgattccagaaccgccgttaagaattctctaagctcgatctaaggatgttgaacaatctacattggtgtttttctttatctgcaatgttttaggcatttgggttccaagtgaaaaatggagtgccaatagagagctggcttaatgaccca

SEQ ID NO: 146875 - DNA, 1291 bp, Arabidopsis thaliana landsberg
  unsure (1)..(1291): unsure at all n locations
aaggtctgtggagcaatatacaatcttgcacagggatatgaagactctggagcaagtttatctcttctctctccttatcttacagagatcatcacacatctgcttgcagctgctgagcgtacagatggggcagagtctaagctaagaggtgctgcgtatgaaaccttgaacgaggttgtccggtgttcaaacctttcagaggcctcaagcatcatagcgcatctcctccctgnnnnnnnnnnnnnnnnnnnngagacaatggacctccctataatatcaactgatgaccgtgagaagcaagcggaactccaggcgtctctgtgcggtgttctccaagtcataatccagaagctgagcagcagggacgatatgaaacctatcatagtgcaaaacgcagatgacatcatgaggttattcctaagagtgtttggttgccatagttcaagtgtccacgaagaagccatgcttgcaatcggtgctcttgcctatgcgactggaactgagtttgtgaaatacatgcccgagctttttaaatatctccagatggggctgcagaatttcgaagaataccaagtatgctcaatcaccgtaggagtgattggtgacgtatcccgtgcgctggatgaaaaaatcctacccttttgcgatcagataatgggtctccttatccaaaaccttcaaagtggtgcactccacagatcggtgaagcctccaatcttctcatgctttggagacattgctctggcgattggtgctcattttgaaaggtatgtagctccagctgttcagataatgcaaggtgctgctcaggtgtgtgcgcagatggacacccttgacgaggagcttatggattatgcaaaccaactccggagaagcatctttgaagcatactccgggatactgcaagggttcaaggatgcaaaggctgagctcatgatgccctatgctcaacatctgttgcagtttgttgactagtatccaaagattccctgaggtccgagccttcttttttcaataatataatcaatgttatatatctcttctagtttcactattcagtttaaacttattactcggtttttgttttgggagcagggatgatagcgtgacaaaagccgccgttgcagcaatgggtgatcttgcggatgttgtaggggagaacacgaagcagttgttccaaaacttcaccttctgtgatgagttcctcaatgagtgtctcgaatcagaggatgaagatctcaaggtcactgcacgctggactcaaggaatgatcgcaagactcgtgctctaa

SEQ ID NO: 146876 - DNA, 2434 bp, Arabidopsis thaliana landsberg
cgaaattcgaccgtatcaaaggctgttccggttgcgaaggcgttcatgccttacccactaggaagagatccttcctcactcccaaagcttgatccggtatccatcagctatatcgatagccgcccaatttctctgcgctacagagtcagggcaatgatcgagatgtctaatctcgacgaagcctcgaagctctcgcggctagctgtcttgaacggatttctagtcgacagagacaccgtcttcatctgcaattccgtaatcggcgccatgtgcagcgccaaacggtacgacgatgccatctctctgttcaattactttttcaacgagtctcagactcttccaaacacgctctcctgcgatctcatcatcaaagcacactgcgaccaaggtcacgtcgacgatgctcttgagctctaccgtcacattttgctcgacggacgtgtagctccagggatcgagacatacatgatactcgcgaaagccttggttgatgctaaaagattcgatgaagcttgtgttttggcgagatccatgagctgttgtagtttcatggtctacgacattctaattcgcgggttcttggatatagggaatttcgtaaaggctagccaaatcttcgaggaattgaaaggactggatagtaaacttccagggagagaatatcacaaggcaaatgcaatctttaatgtttcgtttatgaactattggttcaagcaaggcaaagatgaggaagctatggagattctcgcaaatctggaagatgctcaagtgctgaaccccattgtcggaaacagggttttgcaagttctggtgaagcacggtaaaaaaacagaggcctgggaattgtttggagagatgatagaaatttgtgattccgagactgttgacataatgtccgagtattttagtgagaagactgtaccattcgagcggcttaggaaaacgtgttataggaagatgatcgtgagtctctgcgagcatggaaaagtgtcagacgcagagaaactcttcgccgagatgtttaccgatgttgacggaggggacttgttggtggggcctgaccttttaatattcagagcaatgatcaatggttatgtttcagtagggagagtggatgatgctatcaagaccttgaacaagatgcggatttcaaatctcagaaagcttgctattcatcaagccccataagttggatttggtatttttttttccttgtttatccttaaagtcttcttattcttttttttcttttttttttcttctttgaatttttactaatcgattggtattagtgagtttgttgagtgatgtctttttgttgctaaaaccgaactgaaggaattggagaaactaactagaagctacaactagaggtttggttaactaagtactttttagtatcttttgctttttgcttaaatcatggagaatcaataggaaacttgtctacaaaaagtgatgtcttgaagtaggtaaggtgtaggcgtgtgggtgtaacaaagactgtctgtttgctttctctataagagcatcattatttgtggtatcttacccaaattcttaggctaagatttgtgaagaaaagactcttatataagagcttttactcttatatttaagttttttcttcacaaatcttaatctaagatttggctaagataccactaataatggtggtcttatcaatggattcttaaatgtttttgaaaacctcttaaaatattatataaaataaaatataaaaaaataaatagaaaaggattcttttagaagagtaaattgacttttaaataagagattttttattcactctctcctcatcttaagagtctccctcctcatcttaagagtcttcttatatttaattataattttgtgtatagaagtcttaagaaatttgtttaaaaccccatcaataatgatggtctaagtgtgtgtaagaagaaaatggagcaatgagttcttgtaacggtgtttgaatgaaaacaagtttaaagaagaattctagctactcaatgttttcttttctcaaataaacatcaaatatctgagaaaacaacagttttgatacaatatttttacatgttttaaaatttaactaggtatcaatgttttcacgattttttgttagtattttcatttattctttacttaattacttaaattaagttttgagcaaaaaaaaagactttcaaatttccaccattgaagatcgaagctctcttcatttttttagtagagtaaaagttcacgacgaatttagtgtttgcatatattcttcaattaattaaattttgtctctgattaactagttaaagaaaaccaaaaactttgacaaaaaactgtgatatcttgtaacaccaccacgttatctagtggtgcggcgtagtttcccaccgtaatctaactctcctctgcacaacgtcctcaatct

SEQ ID NO: 146877 - DNA, 2297 bp, Arabidopsis thaliana landsberg
  unsure (1)..(2297): unsure at all n locations
tcatgtgatccaacggcttgaagaagaagagatcacgtgcgctctacaatcagatctcgttaagcatgtgttcaccttcaacaatctcaagggaggagataagagcagattctccaccgtattcaccgagaacgatgcggatcagtactctctcgtcttcgctaattgtctccaacaggnnnnnnnnnnnnnnnnnnnnnnnnnnnnnatgtataaccttgaaggtaaaaagggaagtcgtgattatctctctgctggaagaactgttcttcctaaggtctatttcttattctctgttatctatttctctctcgccgccacgtggatctacgttctctataagaaacgtctcactgttttcgcaatccatttcttcatgttgggagttgttgtcttgaaagctttgaaccttctttgtgaggctgaggataagtcgtacattaagaaaactggaactgctcatggttgggatgtcttgttctacattttcaatttccttaagggtatcactcttttcactttgatcgtcttgatcggcaccggttggtctttcttgaagccctacttgcaggacaaggaaaagaaggtcttgatgatcgtcattcctctccaggttgtcgctaactttgctcaggtggttatcgatgagactggaccgtatggccaagattgggtcacatggaagcagatatttctgcttgttgatgtcgtctgttgctgtgctgttctgtttcccattgtctggtccatcaaaaacttgcgtgaggcggctaagactgacgggaaggctgctgtgaacctcgttaagttaactctgtttaggcagtactacattgtggttatctgctacatctacttcactcgtgttgttgtgtatgcactggagaccattacctcttacaagtatatgtggactagtgttgttgccagcgagttagccacacttgccttctatctgtttactggctacaannnnnnnnnnnnnnnnnnnaacccatactttgttgttgacgatgaggaagaagaggctgctgctgaggctctgaagcttgaagacgagtttgaattgtaagtcatcactggaataatcgtgtcacgtgtgagtcagtaaaaagaaacatactttgtttgacaggatgattgagagtaaaccggatcatcagctgcctgctaaaccgccttctcttctttggttttttcctcttgttatctttcttagaatgcaatacctgttttgtttttacttgaattgttaggatacttatatagactctatgaatgtcttgtcccccaatgcatagtatgtgtattactggtaacataaaacgcttggtgctgctcgttatacttaatctgagtctctgcttttcatttgatagacaaaatggctgattagaaaagttgcttaaggaagcaaactttgttcactactatttgccttgttggatctgtatttatatctttgtctgaagtgacagacgaaagaattggtatagtgtgtggaggtggaagagattaacattgaatgtttggtggaccatagagattgattggtcacataaatacaaaaagtttggcggaaattaggtgtacgaatgcggaggtgatttattgaagggaatacatattttggaccttgaaaaattagcacttgttgcttgtgccaagattctgtctgccactactctggcctcaaatgtcttcaagttatacaattatcgaaaatcatcatcttctttagaaaaatctaatcaactaagattcattatttaaataatctatgcttaaacaagaaaaaggaggatggaatggaaaaaagaaaagagttggagaggaggtcggcacaacaaagatggtatgtctcctaaatcatcctccgaccaaaacaccaacacaaaactaattaaattaaatttgggggctatatcacgtcatcaaccgagtaaaagtacaaagccgacgagatctagtggagaagcttttacaaccgaagcttgatgatgcaaagcaagaagaagaacaacacacactcaacgaatctgccttttccctgcaaaaacgtcaacaagcattgcctatgtcacactcctttaattcgtttattcaagaggtcaacaagtcaaaaagtgaggcactctaaatcaattatattttcagacaaaagtaacaaaacaagagtcatctccacgtgataaccaatccaaaacacattgtcacagtttgtcgagtttataataaagattccaactttttaaccaaaagtcactaactttaccacaatgttaatccttccttat

SEQ ID NO: 146878 - DNA, 2089 bp, Arabidopsis thaliana landsberg
atgggcaaaaataggcgtaaacagaaggttatacctccaccgctgcttccgccagatgaaaacgaaaaggatattgagttttccgacgaggatttgaagtatgtcaaagagaacacagattacgcccaattcgtctctcaaattgacaccgccgctatcaataagtgcgtttacgtctcttttcgaattgttttgcaatttggtgatttttagtattagggttgattttaccacaatcaatacttgctatatccgaatcgagtttgaatctctgcattgataatatcttgttacgctgttgttaggcaatgtggtggtagagtaatgacagtggaggataagtatgaagaagaacgatcaaagaggaagacacttcaggaagagaaagggaatggcgagatccttgtggatcctgttgatgtgctccctgtcaagactttagatggaaaacttcactatcgaacaggtgagaaatgagaagactcttttgttttttgtttaatggctcgagttaagtagcattctaagtggaggtttttctgttttgtggctactggttcagagtcaaagaagtcaaaactagctgaagccgatacagatgaagcagagaaggatgttcttgaagatgaacatgtattgaacaaatctcaaagaagagaaaaagctaaaaagagtaaaagggaggcaaagaaacatgagaaagatttgcctgatgagatattacaagaggaagaagaaacttcccaagccgctgttctggtattgcctgttttgagtttctctttttttcttggttcattatataagttgctaaaaatttcattgttcgttctttgacatcatttttcattttgagcatcatatttgatagctttctgcatcttcatcgtttaacatctttccattaaaagaatttataagaacgtttaatcattggtatttgtaatttgtaatttggagcgttttagtgttttccatatccattcatcattttttttttaacgtgtgaatgattctcttccttcatcaggcagaagtgaaagaagaactatctgctgaagagtcatttgaaaataagaaaaataaaatcgcggaattgggaatgctactactttctgatccagaggcaaacataaaaactttgaaggatatgttagatatctgcaaggatcagaatacgaagattgtgaaacttgccttgttatctctgttggccgtatttaaagatattattcctgggtaattttattaatcttctatgtaccttttttcctcatttgatttgctaattattctcttcattctccccctttaattatgttggtaattagctcttcttattttttttgtggtgccagctatcggattagacttcctacagaaaaggagctcgagatgaagatctcaaaggaagtgaagaaaactcggttctatgagtcgactttattaaaagcttacaaggtgtgcatgtcagttatatattattcttgatttctctgagtataattgtaacacgttttcctttgcttctgatgtccttaacagtcatatctgcagaagttgattatatttgaaaagcagtcagtatataaccaaattgccaatcggtgcctttgtacattgctggaagcagttcctcacttcaactaccgtgataacctgttaattgctgttgtcagaaatatcagctccccagatgaagtcgtaaggtcctggttcttttaaccctttttcagagtgacgaataatgtctaactgatataccatggaatctaacctaaagtagaactgttaatatctcttgtgtcatagtcatgtcattttactgcaattgcatccatttcgttcctatctaactcatttcttgcaccggtttgggtatgcaggagactctgttgctctactatcaggtatcttttctcaaatgaagggaaacatggtggtgagctgaccgtgcaagctgtacgcctgattgctgatcatgtcaaagctcacaactgccaacttcatcctaatgctatcgaggtattcattggtattattttaacattctaagaaccacacatttacacaccaatcactgagtaaa

SEQ ID NO: 146879 - DNA, 946 bp, Arabidopsis thaliana landsberg
ctccctctgcacggcttctcgtttatccttacatgtccaatggcagtttcgcttctcgtctcaaaggtagttaattaagcaccttgattttgatttctttacatgaattgacccggtttacgattcgtgtgaatggtttgcagctaaaccggtattggactggggcacaagaaagcgaatagcattaggagcaggaagagggttgctgtatttgcatgagcaatgtgatccaaagatcattcaccgtgatgtcaaagctgcgaacatacttcttgacgattactttgaagctgttgtcggagatttcgggttggctaagcttttggatcatgaggagtcgcatgtgacaaccgccgtgagaggaacagtgggtcacattgcacctgagtatctctcaacaggacaatcttctgagaagacagatgtgttcggtttcgggattcttcttctcgaattgattactggattgagagctcttgaattcggaaaagcagcaaaccaaagaggagcgatacttgattgggtaagaagtaaaagagtaaaacattttctcttcttgtttcagttagcttaaaaatactcacttctagggttttttctttggggttacttgtaggtaaagaaactacaacaagagaagaagctagaacagatagtagacaaggatttgaagagcaactacgatagaatagaagtggaagaaatggttcaagtggctttgctttgtacacagtatcttcccattcaccgtcctaagatgtctgaagttgtgagaatgcttgaaggcgatggtcttgttgagaaatgggaagcttcttctcagagagcagaaaccaatagaagttacagtaaacctaacgagttttcttcctctgaacgttattcggatcttacagatgattcctcggtgctggttcaagccatggagttatcaggtccaagatga

SEQ ID NO: 146880 - DNA, 1883 bp, Arabidopsis thaliana landsberg
agcttactgactctcttgtgtatcgctctctccgcatttccattaaccctccaattttcccgcctttgtctcactctcttcccgccttgcactcgccggggactccatggttcagaagcagcaagcctccgccggtccgggtaccgagcctaagaagcgtcgccgtgtcggattttctcccgccggtgagtcatttcttcttcttgtttgttttcctttactcgcgattaccactttcccagctccgatttcgtatttttctttaatccgttgatttttcttatgtgcagatactggtgtcgaggctaacgagtgcatcaaaatttatctcggtgcgtatttgatttaaatcatttgaagttgattttggggatatagtttcgtacgaaaattagggttacgtttcctgctttcgacctttttggtgaaattagttggccttacttcaatttttctagtttttggcttttccggcgaactttattgctttcaaaaggtagttttcagttattgaacatgtagagcagatctgtatactgagtttctgttgatttatgtgttttatctttcttccaattgatatttgttcaatgagttgtaaaagtattttctgtgtgaagtgtcttaggttgctgtgacataattttgttttctgttttggtaatcgtgatgggtgatgttctagtttcaagcaaagaggacgttgattcctctgatatttccagcgtgaagccagttgacttgaatgatttctttgatggagatggcaagatttatggttaccaaggtttgaaggtaatgtggcctcctaccattagattattttgctctttcttaaatttctggtttcgcattgttgtggttctgttctgacatattcttgtccacaatttattgatgtcagataaatgtatggatcaatagcatctcattacattcatatgctgatatcacataccagagcaccattaacgtaagtgttgattgtatttgctattcgttggattggttttatacggcttttaaagggactaatcatcactatcctgttactttctgttgtgtgtttgaagggagacaaaggcatcacggacctcaaatctgctttacaggtaccaatcaacttggacacatgcttcttttgctctcattatattattctgattgtctgtttcatttcacccacccagaacatatttgctgagaccattgttgataccaaggatgagtttctgcaaaccttttcgacacagagagattttatcaggtgcataactgcataccttctggttgctttcataccatctcaaatttgttcccaacttaattacgatagatctctttgtagtctctgaatataatgttgaactttgtcattgattgttgttctacaaatatggtctcgaatggagaggtaatgcatgctggagcaacagatggaagcagcaagaatgctgaagtggttccttctgatccccaggtagtttttgcttaatatgattcacgtatcctatagtcttaataagtttgagcaaattagtttgagatgttttcagcttcaaatagaacttataaaggttgattatcctcaggttatacggatggaaattggttctccaaatgctggactcctctatagccgattggtaccccttgttcttctttttgtcgatggtaataacccacctaccctttaagtcatcttgaatattttatttctcttgttagtaacttagtactaacgagatgccggctcattcttttgatcaggcagcaatccgattgatgtcactgatcctgactggcatttatatctcttaatccagaagaaagaggaaaaagaagatcctttgtatcgaattgtgggctttaccgcgatttat

SEQ ID NO: 146881 - DNA, 1074 bp, Arabidopsis thaliana landsberg; identical to SEQ ID NO: 28000

SEQ ID NO: 146882 - DNA, 3706 bp, Arabidopsis thaliana landsberg
ttcagatccatatagctttagacttctttatgttcttatgtatcaaggctttaattagaattgctgcttttgccttttgcaggagaaatttcaactgcggcttagagtcttagaagagagtttaagagggccttcaagcagtggaaaccgatcgacacctgagggaagaagtatgagcaacgggccttctcgaagacaatcccttggcggagctgatattattccgaaactgacatcaaatggatttttctccaagaggtcaccaagttctcagtttagatctttgaatgctagtacaagcacaatattgaagcatgcgaaaggaacatccagatcatttgacgggggcagtagatctttagataggagtaaagtactaacaaacgaacccagatcgaagtttccattgaaccaatcttctgaaggaacaagcggaggcgggtcacctaattcaacaaaacaaggagattcagagaaagcagcagggacaaataatgatagtgtcccaggagtattacatgatttgcttcaaaaggaggtgataactttaaggaaagctgctaatgataaagatcaaagccttagagataaagacgaagctattgaggttagtcattagttttacacctttccaagaaacgtttgcttatatttatttatattctctgatcaaaatacttgggcttgtgtttgcttttagatgttggccaagaaggttgaaacactaacaaaggcgatggaagtggaagcaaagaagatgcgaagagaagtagcagcaatggagaaagaggtttcagctatgcgtgtggataacaaaggatcagatagtagaacgagacgtcactctactaactcaaaaggagcttcaacaactgcacagttactttctggaaggtacctgatgttttcttattataatgacccaatgtaacgattataagttggttaggttagttttctttaacacttgaacgtttgctttgcattgttgttttagcagaggctcaggacgaatggggatgacgaggagcacgcagtgatcaaagaagtcgattccacgagcaaaatatgaatctcaattcagtgattaatagattgaaggaatgacaaaaagcatacaaatatagaaatccaatatgggaggtgtgtgtgcttcttaacatagtaagatttcaaagttaaaaactgattcttaatttcttggctgatgtttattgttttcctcatatatagaaaagagttaggtttgtgttttaactactaacttgagcttagtgtgtgatttattgtatctctctctatcttacctttgtccatttttctcattttggggtatgttatagatttaagaaattagttcagaaacagaggtgagagttattagtgaaaaaattgaaattgtcattagtttcattgatccagacacaacattcactaacattagttgagtctggtctccttgaaggcttgaaaagagatgtccctttgaatgtaatgaatctgtgaaggatcaaaaggacctctcactctatcaatctttgtaatgactgctctctccggcaacacactcctcgccggatccaccgccgtttctccgctcaagcacgacgacactcctttaaagattacaacttccacttcttcatcgtcgacaatggccgtcactataagcgcttcttctctacacgactggctatatatctccaacatcgccatttcctcgttgtatccatacatttcatcttcatcttcaccacctccctcgtctctcacccttctccgagcaccgcaccagaacatcttcaaagctcttcttctctccgccactggagggacggtgaaaagttttttccggtagttatacgagtttgtgagcgagggtattttagtcatttgatctttctgtccgaaaacgaataatccggctatgccaccggataaattcgccggcgtgataagcattctgatattgtagtgcatgaggaccgtgactttgtctatagataagattttaaaggactcgtgtatatttacaaataagggtagtaccaattggattaattacaacagagtgccactacagctattaccagtcgctttcgttgcctctctcttcaaaccagtggctacttactcaacactgtacgtcttcaatcatttcttcttctttcttctccaaccaaaatctctttctcagttctctagggttttcaatactcacaccaaagcttaatgccgatcaacgatcagtttcctagtgggttaagaatactcgttgtagacgatgatacttcatgcttgttcattctcgagaaaatgcttctccgtctcatgtaccaaggtctaattctttatcaaagttcccaccttttaatagattttctcaagaaagttttaacatttttgttttatcttctctttgtagttacaatttgctcacaagctgatgttgcgttaaccattctaagagaaagaaaagacagttttgatttggtgctaagtgatgttcatatgcctggtatgaatggttacaatcttcttcaacaagttggtcttcttgaaatggatcttcctgtcattagtaagactctgttgttatgttttgtctctaaagattgaatctttgcatcaatgtttcttacatttgctctgtttctagtgatgtctgttgatggaagaacaactacagtcatgactggaatcaaccacggagcttgtgattatctaatcaaacctattcgtcctgaagagcttaagaacatttggcaacatgttgttagaaggaaatgtgtgatgaagaaagagcttcgaagttctcaagctttagaggataacaagaacagtggtagcctcgagactgttgttgtttcggttagtgaatgctcagaggaaagtttgatgaaatgtaggaataagaagaagaagaagaagagaagtgttgatagagatgataatgaagatgatcttcttcttgatcctggaaactcgaagaagtcacgcgttgtttggtctattgaattgcatcaacaattcgttaatgccgtaaacaaacttggaattgacagtatgatcctaaacactatcttattgcttgtagaagaaattcaaagtaatttgtgcttataagaatctctcttattgtttcagaagctgtaccaaagcggattctcgagttgatgaatgttcctggtttaagcagagaaaacgtggctagtcatttacaggtttctttgattgattgattgaatctttcttcttattagggtctctataagggttatgactgaatcaataccatttgcagaagttccgattgtatttgaagagattaagcggtgaagcttcgcagagtaatgactctgagtctaccaaaagatatgaaaacattcaagctctggtttcctcaggacaattacatccacagacattagctgcattgtttggtcaaccaatagacaatcatcactctgctagttttggagtttggattcctaatgacaatcttggtagatctcaaaatgaacacttctcggttgatgtatcatccgcttctaaccgtcctgtttctgtggcggttcatggtctatcttcctcagcaaatttcagacagagaggtgacgttaacaacaacagaatcagacaagggtatggatcaaatgtcaatgaagaatcttggatcttggaaagatcttcaagacaaagatag

SEQ ID NO: 146883 - DNA, 2003 bp, Arabidopsis thaliana landsberg
gatattgtggtggcacaggacgggagcggtcaatacaagacgatcaatgaagcgttgcagtttgtccccaagaagaggaacacaactttcgtggttcacattaaggctggactctacaaggagtatgttcaggtgaacaagaccatgtcgcatcttgtgttcatcggtgacggtcccgacaaaactatcatttccggcaacaaaaattacaaggatggtatcaccacctaccgtaccgccactgtcggtaagatatatattttgaggatttttactcgttagattacaaagtcttagaagtcatctatgtaaaatgatgaatgtaatgtttattgcagccattgttggaaactacttcattgccaagaacattgggttcgaaaacaccgctggggcaataaaacatcaagcggttgcagttagggttcaatcagatgagtccatatttttcaactgtagattcgatggctaccaagacacgctctacactcactcccaccgtcagttcttccgtgattgtaccatttcaggcaccattgatttcctctttggagatgcggctgctgtattccaaaactgtacgttgttggtgaggaagccactcccaaaccaagcatgccctatcacagcccacggtcgaaaagacccaagggaatccactggatttgtgttccaagggtgcaccattgccggtgaaccagattacttggctgtcaaggaaaccagcaaagcctatctcggtaggccatggaaggaatattcaaggactatcatcatgaacactttcatcccagattttgttcagccacaaggatggcaaccatggctcggggacttcggcctcaagacattgttctactctgaggtccaaaacacaggaccggggtctgcccttgcaaaccgggttacttgggctggaatcaagacattgagcgaagaagatatcctcaagttcacaccggctcagtacatccaaggtgacgactggattccaggcaaaggtgttccgtacactacaggccttttggctgggaacccggccgctgcaaccaccaccccaagcgtctcagctgctgctccaggtttctccaccttcacggatacaagtggcgctgactcaattgctccaacagcttccccagcagcttccccggaaagttcaattagcatggcttacacggggacagcttctccggaaagttcgattaaggtgtcttcttcaacggagacggcttccccggaaagttcatttacggaggcttcaacagagacggcttccccagaaagttcaattatggtggcttcaacggagagctctggttcgtttttttcaatgtttacctaaaagattgattaagatggcataaaatgtgttttttctttactctaattcaagcaaaacctgaaaggaacaaaaatatttgcacaaccttgaggacttcaggattattggtcttccaaattgttgacattaatgtttagctttgtaaactcatgtttaatatatcagtatattaaaatgctgtttataaatctattattattaactagtgcatcttgtaaactcatttatatgtagaaattagttcattactatgcgcgagctgttccaaagaatttcatgtgtcctctagtactaacaatttcctatacgaaattaatattcttatataaattattgacacaaccctcaatatataatatttatatatgaattgggacaagtttatgaaaagagaaagttggaaatagaagaagcagaaatagtgaaaggtagtaaaagaaagtagttacaactaacctcatttacttctctgcattcattttagctccaccctctcatcttgtaagctatagccaaatcatcttattctatacgtccattggaaaagttagagattcttttaccccaagttcgaatccgaaatctagccattaaatttgcatatgtgtactttcgaaatccgttgctattaggttttatatttcttagaaaacgttga

SEQ ID NO: 146884 - DNA, 1291 bp, Arabidopsis thaliana landsberg; identical to SEQ ID NO: 12530

SEQ ID NO: 146885 - DNA, 766 bp, Arabidopsis thaliana landsberg; identical to SEQ ID NO: 25019

SEQ ID NO: 146886 - DNA, 554 bp, Arabidopsis thaliana landsberg
gggactttcactctttctctctctctgcaacaaagaagaaatggaggtagcttcagctactgcgacgagcttcacaacgcttcgagctcgtacgtcagcgattatcccgtcttctacacgtaatctgagatctaaaccgagattttcttcatcttcatctctcagagcttctctttcgaatggctttctttcgccgtataccggaggaagcatctctagtgacttatgcggcgctaagcttcgtgcggaatcgcttaatccgttaaatttttccagttccaagcctaaacgcggagttgtcactatggtactcgaatttatacttttttcagtttcttaattaacgagctccctattctgttaggattttgaaattgaggttttcgttgctatagctgagatttatgcttctgtggtagtgaattttcagaaattgtatttgtcgagaaatggtgttccttagttttgaaccaatggattagattgactctagatatgggctattagattgcaaggggaagtaatggtcattcattctatagctgagaattatg

SEQ ID NO: 146887 - DNA, 1129 bp, Arabidopsis thaliana landsberg
  unsure (1)..(1129): unsure at all n locations
agatcgtaaagtgtgggctaataatggtttacgtatggtggagcatatcganatctcagtttctgaataagaacgcaaactttaccatatttatattgcaaaagttggtcatgctctttatcaaatagagaagttagatcatgcagattaagccacatcctgacatccttcttttttttcttttttttttatgcgacatatatcagtttctatttatttacgaactcccaaaaagactccaacacaaattaaaccaataaactcaaacaaccatattaaaatgaacaattcacaagtaagtgtttggttttgcttataattttaatggtttctacaaatttatctacgtatcttttttttttcttgtttttttcattgaaaaggtcagcaatcaaatttcaatcaggtgaaactcaaaaactttatataatcacaaaaaataattcaacaaacatatccttaaaccaaacgtaatcatattcttttcacaaacttcaccataaggtgttgcaaaagttggtcatgcaaattgagccacatccttattttcgtctttttctgcggcctcaacttcttatttatttacgtaaccacaaaagaaaagactccaacacaaaccattaatcgatcaaacaactaaattaaaaaaaaatcttgagagattcttggaacacaagaaaaacatgaaacctagaatgtgtttaatcttgtttattgctttaatgagagtaatgtcgattgtttctgctcagtcgagttgcacaaatgttctaatcagcatggctccgtgtctcagcttcatcactcaaaacacttctctcccgtctcaacaatgttgtaaccagttggctcatgttgtccggtattcttctgagtgtttgtgtcaggttctcgatggtggaggttctcagcttgggatcaatgttaatgagacacaagctcttgctttgcctaaagcttgtcatgttgaaactcctcctgctagtcgctgccatagtaaaataaactcactttccatgcattagattcatatttatgctatcttttttctctcacacatcagaactttattattctcaggtcgttcttcggttaattcacattcagaaaaagaactagcttataaata

SEQ ID NO: 146888 - DNA, 803 bp, Arabidopsis thaliana landsberg
gtattttcagatcgccaagaacaaattgataaatctaatggcagttttcttgctgaaatatgtcaaaagaaatcgaactccagataattactctggtcagacttgacactagtagatgtggctgctgctggagtagcaggcgcactctcataatcaaccggttttggtatctctggtgggctagcgcatcgaaccaatgcccaattcactccttcaaagaaaggatgttgcttcatctcagttgcaccacgcttatacgctaatctatgctgaggctctttcacaagcagactcctaatcaaatccctagcagcaaaactgacaactggagattctgggaaacgcagaggctgacccacaacgttgaagagtgttgctcggtttcctgaccctttaaacggggttttaccaaacaatagctcatacaaaaagatcccaaaagtccaccaatcaaccgcactcccatgcccttcacctttgatgatctcaggagctaaatactcatgtgtgccaacaaatgacattgagcgagcacttgtgggctcagcaacgagctcgggcaatggacttacctggtttccagtttcgtttttcattttcttgtctttcttggatttacttgagaaataacgtggagaaaagcatgttgtaggagcagaaatgcaagatggctgttggatgcaagcaggttgcgcacaataacccgagttcttttgcccttcagacgcaagaacagttgatctgaccactgtggggctaacagtacatctcaaggagaggtcgaagtcagaaagcatcacatg

SEQ ID NO: 146889 - DNA, 1624 bp, Arabidopsis thaliana landsberg
  unsure (1)..(1624): unsure at all n locations
atgggtgcaatcaggcatcagcaaaggtgaccgcttgcgactatcatcagggacttgacatggttgtggcggggttctcaaaaggtgtccatgggctttatcagatgccagatttcaatctgatccatctgctctctatctctaggcagaagctaacaacagctgtcttcaatgagcgtggtaattgcttgacctttggttgcgcgaaacttgggcaactgttagtctgggattggcgaaccgaaacctatatactgaagcaacaaggacactattttgacgtcaactgtgtcacttactcaccggattcgcagctcttggcaactggtgctgatgataacaaagtcaaggtaatgaaatttcatagacttagctgttatgttctataccatgcttctcatctatttctgaatttaaccagcccgttttttattatgttacatttttaaggtgtggaacgttatgtcaggaacatgtttcattacattcaccgagcataccaatgcagtgactgctcttcattttatggctgacaaccactccctcttaagtgcatctctggacggcactgttcgtgcttgggattttaaaagatacaagaactataagacatacacaacccctacaccccgacaatttgtttccttaacagcagacccgagtggtgacgtcgtctgtgctgggaccctagattcattcgaggtaattcaacttaggccctgaaggatttcagtcacctactcacaaatactttggtgaggtgaatcactttatgcttgcctatgtgcagatttttgtatggtccaagaagactgggcaaataaaggatattctgagtgggcatgaggctcctgttcatgggttgatgttttctcccttaacggtaaataaactgtcatagtctcatacttcttttagtcaaaatacaatttgcttcgtgcctctgaacaattatgtgaacttctgccttatggtgttataacttccatgccttatctagttcatatatttctttctctgcagcaacttttagcttcatcctcatgggactatacagttcggttgtgggatgtgtttgctagcaaaggcaccgtggaaacgtttcgacacaaccacgatgttctaacagttgctttccgtcctgatgggaagcaattagcctcgagtacgctagatgggcagatcaatttctgggacaccattgaaggtgtgttaatgtacaccatagaggggcggagagatatcgctggaggtcgggtcatgactgaccgtcggtctgcagctaattcaagttctggaaagtgttttacaacattgnnnnnnnnnnnnnnnnnnnnntatattctagccgcaggaactagcagatatatttgcatgtatgatatcgcagatcaggttagctaactagctcctcttggagttcaggttttcttaaagcttgtgttcttctgataaagaaacttagtcaaagtgtctggaatatcaccttttcaggttcttctgcgccggtttcagatatcccataatctttcgttagatggggttctggacttcttgcactccaagaagatgacagaagcaggaccaattgatctgatcgatgatgacaacagcgatgaagaag

SEQ ID NO: 146890 - DNA, 1058 bp, Arabidopsis thaliana landsberg
aggatgggtcatcactcatgctgcaacaagcaaaaggtgaagagagggctttggtcacctgaagaagatgagaaacttattagatatatcacaactcatggctatggatgttggagtgaagtccctgaaaaagcaggtgatcttacttgtatattagttttcaagtaacatatttttttctctaaccaattataacgatcttgcgttaattaacatatatagttaatgtaactaattttaaaatgcatgtttgatcaaatttagggcttcaaagatgtggaaaaagttgtagattgcgatggataaactatcttcgacctgatatcaggagaggaaggttctctccagaagaagagaaattgatcataagccttcatggagttgtgggaaacaggtttccatttttactaactcgacttaattttttatatattatcaattcaagatagtgtattattatagaccgttacaggaagtcttataagattttcaatactgataccattttcaataataagtttgttggggtgggatacatacatagtacattttatacttatattcagtttatcatgttagacttgaaatttaacaattatatgtttagtttggccacggtttgaagcaacgactagcctactgtcgatgaccaaagcatttttcacgtgtagtttcattcatctagctcgtttacttttgtctacttggtcgagctattaagtagtacactttagttacttcattgaacattctcaaaatgtgatacatacatattttcttatattactctttctttctttttttttttttttttcaggtgggctcatatagcaagtcatttaccgggaagaaccgataacgagataaaaaactattggaattcatggattaagaaaaagatacgaaaaccgcaccatcattatagtcgtcatcaaccgtcagtaactactgtgacactgaatgcggacgctacatctattgccactactatcgacgcctctaccaccacaacatctacgatcgataacttacattttgacggtttcactgattctcct

SEQ ID NO: 146891 - DNA, 1598 bp, Arabidopsis thaliana landsberg
aatgccgttcagttgagttggctggtcaaagaagctctctctgcaccgaggtggataagcaatttactgaccaggaatttcctccaaatgatcgctctttatttgtggatacaccaaaatcccccatcaaaattgcaggtatggattgttaaatttttctcattttttctgtttttagttaaatatcattttaagtgattatatatctggacacaaaatctgccttcacatagatcaagtaaaactaacaacttgatgggaactctaaccttttgagtgtcataatttcaggttgtttctgaatggatgagacctgactccattgtgaaagaaaacggtagtgattcccgtccctgcctgttctctggggatgcaaatccttcagatgtttgccaggtttgatcacttactttttctgttcagttactttttcctgaccgtcttgtatgcatgtcaattcaaaatgatcccagagatttattcttgcgattgggttaacttgttttataggggcgtttgggggattgttggttcttaagcgccgttgcagttttgacagaggtttcacgaatatctgaagtgatcattactcctgaatacaacgaggaagggatctacactgttcgtttttgtattcaggttcctgtctcaaacattctttcacggcactgcattgttctcttgattgtagcatcgtgcaggttcttctatgatttgtgtacaatcagaggtttgaagtttgattgctttccccttgcagggtgagtgggttcctgttgttatcgatgactggattccatgtgaatcacctggtaaaccagcttttgctactagcagaaagctcaatgaactctgggtctccatggtggagaaagcatatgccaagctccatggttcttatgaggcactggaggggggactggttcaggatgctcttgtcgacctaactggaggagctggtgaggagattgacttgcggagtgctcaagcacaaatagatcttgcaagtggcagattgtggtctcaattgttacgttttaaacaagaggggttcttacttggtgctggaagtccatcaggatctgatgttcatgtatcttccagtggcattgtgcaagggcatgcttactccgtcttacaggtattcccttttgctttggttgcatttgccatatcctgagtatgagaacccaatttaatatatttacgtactgtctttcttcaggtgagagaggttgatgggcacagacttgttcagattcgaaatccatgggctaatgaagttgagtggaatggtccctggtcagactcatccccagagtggactgataggatgaagcacaagctgaagcatgttccacaggtagtttctcttgcgcttaacttctttacagctcattccttgtgttccttgaattctcttagtccgattagggggactatattgcagaaactggtaaaagattttgctttattgttaacaaggggacacacatggacaaaacatagtgctcacacccacatacttaggtgtaaatatatgtaataatgctataatttcttcaagtaaagtatattgcgtactgatcctgtgcatt

SEQ ID NO: 146892 - DNA, 941 bp, Arabidopsis thaliana landsberg
gaagaagatggagccaaaacaagaacacgagaaaagagtgattcttgaaacaatcgtaagccttcttcctcgagagaaaaatgcaatgtcggttagctttctctctatgcttctacgcgcagcaatattcctcgaaacaacggttgcttgtagacttgacttggaaaacagaatgggattacaattaggacaagccgtgctcgatgatctcttgattccttcttattcattcactggagatcactccatgtttgatactgacactgttcaacgcattctcatgaattatctcgagtttgaagtcgaaggagttcgcttaagcaataatggtgttgatcttgctggtgatatggaacgtgttggtaaacttttggagaattatatggctgaaattgcttgttataaaaatgtgagcttgcagaaattcatcggtttagctgactttatccccgggcagtctagggttactgaagatggtatgtatcgagccgtcgacatctgccttaaggtaatattaagttagtaaacatttacattcatttgctctataccgaatccgtttagatgaggctacaaaagctggtaaatatttggcatcttgtggttaaggagatgatcaagttcccattatcttagagattttggaaaactttaagagagctctagtgaacaactatgtttttttcttgcaggcgcatcccaatatgagtgatgtagagaggaagaaagtgtgcagcttaatggactgccaaaaactatcacgagaagcctgcgctcatgcagctcagaatgatcgtcttcctgttcagaccattgttcaagtcctttgctacgagcaacaacgtgtacgaggagaagtcgctagcgattcagattctccagccccgccgccaccacaaccagcagctgttcttcctcccgaacttagctcctacaccgac

SEQ ID NO: 146893 - DNA, 2554 bp, Arabidopsis thaliana landsberg
  unsure (1)..(2554): unsure at all n locations
atgactagtattcagcctttgctacaaaaatcggagtctagagatgatgttcgtgctgagtttgagagaggtttggaggaattcatgcgtgggcacttggacgagtgtatctcatttgggtcttgtagttctgttcacaaccctgaggatgaggataatgaggatgatcagcttgtgaggagcagacgaaggtctgaacttgaaggggataatttgnnnnnnnnnnnnnnnnnnnnaagacgccaatctcaaattttgagccgttgggctgctaggcaggctcaggagatgattactacgattgagaggaggaatcgagagtctgagttgattgcgttggctggtttgcaaacggtctctatgcttgattcttcttttcttagggagtctcagtctcagtctccgtcttcaaggcgtcagggtgctgctagtgagaggcctaacactcaggcatctgggattttgcagatgtggagggaattggaagatgagcatgtgcttaacagggcacgtgaaagggtgagggaaagattgaggcagcaaagaagtgttgagtctaatactaatttatctagctctattgcttcggagagtcagctgagtgaaaataatgggagtctgagagactcaagtgagagtgagaatgattttgggtcttggtcacatgatcggaatgagcatggggataataataatacttccagtagggaacaatctcctgatcttggtgatggcgagagggagagggtgaggcatattgctcgtggatggatggatagtaggatcaatgatcattcatctaatgtaaggcagagagacgataaccgtagaccggagtggctgggtgatactgaacgagaaagagtcaggattataagagagtggatgcaaatgacaagtcagcagataggaggagctcgttcaacaccgagagaagataagaggtttacttcaggagctgataggattcatcacgctgcccctcaagttgacagggtccgtgtagggttagctgttagccatgaagaaggacgtccacctcatgttcgtcgagacttgcggagagttagaggtaggcaggcgttacttgatttgcttatgagggctgaaagggagagacaacgagaacttcagggcttgttggagcatcgtgcagtgtctgattttgctcaccgcaatcgaattcaggttagtttgtaaactaccaaattcatgtctacttctttgtaggaaatgaacggctcttctttctcatattctttttccgtacacttatgacattctgagataccattacaattcatgagctataaattttatttgccagcatgataaatatgttatattccgaatatacatgctaatcaaataagaaatcttggtatttgattttggattgtgataagaaaaagtgtttggaggagcgagagatgtatcctatttcatgctaggactggacaacaaacatcaaatattaacagtatcttagcaccttagacaaatgtagactgatttctaatgccttacgcttttctgcagtcgcttcttagaggaagattcttgcggaacgagcgacctacagttccagagagaactccatcaatggcttcaagggaactgcttcagctaagagaaagacaaactgtctctggcttaaggtaagatttccctccaattccattttaatggataaaacaattttttcatacagttttctgtcactttcttgttcaactcaataggaacagattcattgcatcataataatataactacactacaaacccgtaaaggactttagaaatatgaattttgatatccttgcatctcatgttctctcccctgctcactgaagataacataaaaatttcggcttgttctctttctgatctttttgttgtgttcgcattttgtcctttcatcttattctattaattgacaagtacttattggcatttagcttgcttgctgataattgcccacctgtcgactctgcttctgtctcagggaagggttccataacgggagggaaaatattgtccatgaaaatactagacaaacactgataacgataatagcaatacttccacaaatgctcttgcaattgcaatcactgctgggaattctcagcgtgtaaccgatgagagttcaacttcttccagacaagggaatgatagtcccattttgcctgataactcagaaagcaacctagcaaatgcggatagagactcggaagaggataccaatcacagaaggatctggcaggaaaatgtcccagtagatgagaggctaaatttggagcaaacaactctaacgcaatttgatgggtatgataacacagatataaatcgtgatgaaacctctgtcagtgacatgcaccgagaagctagtggatttgcagatgatgaatatcgcacacaagaagctcatggtgtttggcatgagaatagctctagacaatccgatgggaactagcctgggacacggtcagaagccctaaggagtcgccgtgtagtacagttgagaagattacataggtccatccagctgagga

SEQ ID NO: 146894 - DNA, 477 bp, Arabidopsis thaliana landsberg
  unsure (1)..(477): unsure at all n locations
aggagtgccatctctctggtgggctctctgtctctgccttgagcacatgccaccgcgaanatatcctcggagagaatggtttgggcggtgagagaattggctaggtctattgggacaagaggtttagtcgcgggacaagcgatggatataagcagtgaaggtttggacttaaacgaggtcggattagagcatttggagtttatccatgttcataaaaccgcggttttgttggaaactgccgcggttcttggcgccataattggtggtggatctgatgaagagattgaaagtgtgagaaagtttgcaaggtgcattggattgttgtttcaggtggtggatgatattttggacgagacgaagtcgtcggaggaattgggaaaaaccgccgggaaagatcagctcgccggaaagctaacgtatccaaagttgatagggttggagaaatcgaaagaatttgttaagagattgacgaaaaat

SEQ ID NO: 146895 - DNA, 2005 bp, Arabidopsis thaliana landsberg
taggtttaccacttaagcagcttattttcataacttagcgaaatgataagtaatttatggtatgtgcctgtatgttttattgccactgctcttagtttcccccagagcattgtttctcaggttttagattatcaagataaaagagagtggtttcatctgtctattgtttatatttatttttcctcactttttcccaggtaccagatcccaccttttgatttttctgtacaaggagttacttcaatttctgtggacgtgcataaatatggtttggctcctaaaggaactagtacagttctatatagaaatcatgagatcagaaaggtaaatactagttatttttccagtcttatgcaatttctcctggctcaatatgaattggtttaaattcacctcctgtgttctgattttggcatgcttgttgggtcacggatcatctacaaaaacataaccacgatatcgcttacttttgcttccttggcattggatccctgaaatcattcacactgtcttatgaaatcttttgaatattctactcagtgctgtgaaaattgtagtttcttataaatgatctttacctgacttttggattttcttcctgcaaaatatgtgctccttcatctacaaaacagcaccaatttgttgctggtaagttatgaacatagattcttaaattcatggaaatcctaaatgcggtattactccttaactatttgaaactgggttttgcagtaactgaatggtcaggaggtctatacgtgtctccaactatcgctgggagtaggcctgggtctttggtagccggtgcttgggctgcaatgatgtcgctcggcgaagaaggtttccttatagatatctcactctctcaagcttctggcattagagtgtgtcaaagattgaaatggttgattctgtatgcttctgctgttccacaggttacctacaaaacacaagtaagataatggaagcatcaaagagactagaagaagggttggtatactttttttgactattttgccttcttcaatcgttttgattcttatagctttgactatcgtaatctgcagagtaagagaaatccatgaactattcgtcattggaaagccagatatgacaatcgtggcttttggttctaaagcattggatatatttgaagttaatgacatcatgtcttctaaaggttggcatttgaatgcactacagagacccaacaggtaatcttaacgaccaaaacactacattggtgttcaactagtttgaaacccttcactgttctgaaactacctatgcctgtgttttggatcagcattcatatatgtattactcttcaacacgtccctgtagtcgatgacttccttcgggatctgcgtgaagctgtggaaactgtaagtccattaataaaaagtcttttgatcgtttccattcctcagttgatcgctcgtttccattcctcagttgatcgctcattgttatacaatttttgttaggtaaaagcaaacccaggaccgatcacggcaggcttggctccaatatatgaagcagcagggaagatgccagaccgaggcatggtgaatgagcttctggttagtttcatggacagtcaatattaagtttcttgaaggttaaagcatctagtgggtaaattgatatcacatttcagttggagaagcaaaactttgtatattcacacccacattgtttcgtttgccctactaataaaatttcattacaatcttcataataaacaaatcttagttcgttacattacaccttcagaacaaaaaagatgatcaatcagatttgtggtcagaaggtggggatcggggaacttgaactggcttgtcttcttggcttttcgccaagatctcgtctctctctctgaagtattgctcgaaagcacgaggcaggaacctagggatcaagaaacagagtagattcactccgaagtagcctaagtttgctagtgctaaataccttccaaaccagaaccatgtaaccacctgca

SEQ ID NO: 146896 - DNA, 510 bp, Arabidopsis thaliana landsberg; identical to SEQ ID NO: 36223

SEQ ID NO: 146897 - DNA, 1032 bp, Arabidopsis thaliana landsberg; identical to SEQ ID NO: 55669

SEQ ID NO: 146898 - DNA, 609 bp, Arabidopsis thaliana landsberg; identical to SEQ ID NO: 79451
  unsure (1)..(609): unsure at all n locations

SEQ ID NO: 146899 - DNA, 549 bp, Arabidopsis thaliana landsberg
tttccaaatggggaagaatttccccatttttttttggtagaagtggggtcacatgaattgaaaaatttgtgtatgtttttgtagggttattggaaaaagcacgttgttcttgatgagataattaactatatacaatcgttgcaacgtcaagttgaggtgtgaaaacgtctctctcttctgttgttttgttactatacatttacatgtgtgttctgatatgatggtttgggattttcagttcttatcgatgaagcttgaagcagtcaactcaagaatgaaccctggtatcgaggtttttccacccaaagaggtgatgattctcatgatcatcaactcaatcttctccatttttttcacaaaacaatacatgtttctatcgaggtattctcggggtaggagtctcgatgtttatgcggttcggtcatttaagcattgcaataaacggagtgacctctgtttttgctcgtgctccccaaagacagaacttaagacaactatattttcacacaacatgacatgtttctatcgatattctcgagtaggagtcgc

SEQ ID NO: 146900 - DNA, 1005 bp, Arabidopsis thaliana landsberg
taaaggaagcaaaaggcaaaggagacagtgttactgttgaaacatgtccacattacctagctttctcagccgaagagattccagaaggtgatactcgtttcaaatgctcccctcctatacgtgatgcagcaaatagagaaaacttgtgggaggctttgatggtataatatatattttttcccaatctttgttgttataccttaacgtgttgattctgaggtttagatttgattagggaggagacattgatatgctgagctctgatcattcacctacaaagcctgaactcaaacttctgagtgatggtaacttcttgaaagcatggggtgggatatcttctttacaggttcgtttagtcttaaaaatgtaatatgtagaaactgtgagagcacaaaaaaactcatggaagagccaattgcagtttgttcttcctatcacatggtcttatggaaaaaagtatggagtaacgctcgagcaggtaacttcttggtggagcgataggccttccaaactcgctggactacactctaaggttcgttattattaaacaaacgcagcttcaatattctcttttttgtccatacacggcacaatggcataatagagacgtgtttctattaggattcgggtccatttatcgcagcttataagtaatgatttaattatagggagcgattacggttggaaaacacgcagatcttgttgtgtgggaacctgaagccgaatttgatctagatgaagatcatccaattcacttcaaacaccctgtatgtacacagtttttacaagaaagatatagctaatggttaagctcgaataacacgaatgtgtaatctttatgttatgtttgcttcttgtggtgtacaatagagtatctcagcttatttgggaagaagattatcaggcaaagtggtttcgacatttgtgagagggaacttggtttttggagaaggccagcatgcttctgatgcctgcgggtctctgcaacttgcaactacttatctt

SEQ ID NO: 146901 - DNA, 671 bp, Arabidopsis thaliana landsberg
atcaaatttcccggtgaacggagacggcgaattcgaaattctcactggaatcatatggaaatgtgttgcgacggtgaggggagaatcagctccggtgacgattacggttatcagatcggatccgaagaagttgaagcctagagcggtgagaaatggtcagatgataagttccgttcacgtcgatttttcggtggtggaggcgagtttggaggagattgtgaaatcgatcggtgaagcgaaagatgagagggttgtgatcgatgagattgttgacgatgtttcggattttattgtttacggagcgaatttaacgtttgtggatatgagtgaagttgatttttatgaggcgaaagttatggggaagtcgccggaatcggtttattgtaatgttcaggggattggagacgacggagcagtggtggttttaccgggggttgtggaggaggagagggttgtgacggtgacgttaccggtggatgagattgagaaggtgaaatgggaaatgaagaaatgtggtttgatcacgccgttagtttaacggtgaatgaagaaatcattttatgcggttatcgttaatcgtgttatttattgtttgtttgggtttttatttatttggtgtgttttatatacaacaaataaatgtcatttttataatttatgtttgtagttta

SEQ ID NO: 146902 - DNA, 1136 bp, Arabidopsis thaliana landsberg; identical to SEQ ID NO: 27328

SEQ ID NO: 146903 - DNA, 2686 bp, Arabidopsis thaliana landsberg
gaaagaaattgctcaacgtgagaagaagattgctgagaaaagctcgaagcttggaaaaattgtgagtataccttggaaatctgtggttaacagattctattttcccttttaaatatagcattttcagacatgtcttacatattttattttttttgtaatcctctggaatttcactaaactttctcacttgactaacttatatctgtacctttcctgtgagcagcaacctgagcttctgagatttaaggaggagatagctcgcataaaagcaaaaattgagaccaatagaaaggacgtggataagaggaaaaaagaaaaagggaagcattccaaagaaattgaacagatgcagaaaagcattaaggagctgaataagaaaatggaattatttaatgagaagagacaagatagcagcggaaaactcccaatgcttgacagtcaactgcaagattattttcgactgtaagtttgaaagaaataaggatttttttctcttcgcaaaaaaattgccgctttccaactgtcctgaggttatagatatgcaccaacttgatttctctatattgcctatttaatcttcttgcttgagtttttgtggtgtaatgaatactacatgggtttacatgtttaacaaaaaagtttaatgaaataattgttgggtatgagtacttattctgtgctttgaagaacagtctaagcaaacaaatagttacgcgttttgtttgacataatgacatatatctgtatgtttacaggctctattattggtgctgttgttgtgacttttgtaatatgctctattattcacccttttgaatccttacgactacctttgttttctaattgatgttccttcatgtttgtcaatgtggttttgtctcagaaaagaagaagctggaatgaaaaccattaagctaagagatgagcacgaggttctagagaggcaacggcgtaccgatcttgaagcattgagaaatctggaagaaaattatcagcaactaataaataggaagaatgatcttgatgaacaaattaagcgatttaaagacaggcaaggagagattgaaacatcttcgtcgaaatataagaatgaaacaactagtctgaaaacggagttacgtgcactgcaagagaagcacgtaaatgccaggttagtttatgtcctctactcactagattgtctagcaatggatggcttacttgcgatgttatgatatcctttaaatgcgacactttgctgcaagtttttttaaaacctccttagagattcttcttgcggttgcttcatcttttgaactatggcttgagagatattggtaattcatttgtcaagaacacattattttccatcttccctatccatagtataaaccccttcttgagcaggcgaaatacattttgtatcccctgatactgaaattcaggatctgctgctgtactgaattcctagctaaaccaaaatgaagcttgtaggctcgtagagaaaccttcaaattcccttgaggtgcacctcaccagggagaactttatatttgttcttgatagttgctaacctgcttatatgatgaacagggaggcctctgcgaagttgaagactagaatcgcggaattagaagaccagttaagtgatttaacggctgaaaggtatgaaaatgagagagatagtaggctaacacaggctgttgagtctctcaagcgtctatttcaaggagttcatggtcggatgactgatctttgtcggccaaatcggaagaagtataaccttgctgtcactgttgccatgggaagatttatggatgcagtagttgtagaagatgaaaacacgggaaaggattgcatcaaggtacttatcttatggtgttctatcctacggaatctgtgaacttctaaattcgtaatttctatctcttctctgctgacaattatagtttcagactttcaataacaggtgagtaagatattctttaccatattactactcactggcatatgtcagcaaattaatgatgttttaaacaatacaacctcttagtgatgccttaaactctaccacgtcctaaatgatacaattcatattatttaggtatgtaacatatatgctgtaatcatctccaggcagacttcattccttagaattaaaaattaacccctattctatgatacttggcttcaacttaacttttcgaagctttttctaccttgcttttaagcaatttgaagtaaatgtttaagaggactttgtaccactgctctaggtatgtgatgaaatgagttcttctttttttttttttgtaatttgcagtacttgaaagagcaaaggcttccacctatgacatttattcctctttagtcagtacgtgtcaagcaagtgtttgaaagattgagaaatttgggtggctcagcaaagctggtgttcgatgttatccaatatcctttgcaaataagtgaagtgatttgacttaaggatactcaaggttacctgtattgaaaacttctcatctcttggattcataccattgcgtgcatagctgttggtagcttaagatcattttaatatattaaaccaagtatttgagaagtatagaaaggtttacgtgagccggtttctaaaatatatatttttgtccttaactcctccacgttcgatcctgaattggagaaggcggtcctttttgttgttggaaat

SEQ ID NO: 146904 - DNA, 1353 bp, Arabidopsis thaliana landsberg
atcatcatctttcgttggaactctcgaagatctttttttaaggcattgagatgtggaagaaagagacattgttaaaggtgagttttattttccattaatgctgtggcttttatgttgtgtgagtgtgatactgaatgttttatgtggcttgtcttaaacagaacgaaatggcgcagcaacgagctaatatggttaattcccggggagaacgtgtgtaaagcttcatacttttgattcctttagtcatgtttcttgatcttaaactgaccacattgttgattctcttgttcagttttaatcgatacagagtatgagccgctttacccgagagaagagaaatcagagctggtaagagtgtatgcaagatgattttcttaacttattggctcttcagacttgcataaagatttaaaaacttacaggaaataatacgctccaacctcaaatggaaagggcttctaattctagtaactgtgtggttgactttcttgctcattcaaattgtcaaggcaagtaatcttcttattcgtctaagcattctcaataatctttatgttgagctctcatcaatggaactcgtgggtttatacagaacgaaataaaggtctgcagcacaatatattggatactattcatcgtacaggtaacatatatatgtcgcagataacctttgattatgttttgtgctctcgctaaatcaagtcattcggaacaattttccctttgtagttcccagttgctttagcggtgtttgggtttgaagcaagcaaattgtatacagagaacaaaaagaggttaaacagtggcaacactgaatgtatctgtgaagctacgatcgagtggactcctctgagtctaatcttctgtggtctctgtggtctcattggaggtatcgtaggtggtctccttggatccggtggtggatttgttctcgggcctttgcttcttgagattggagtcatcccacaggtaaacacaccatcttatcagtatatatgattgtaaaacccataatcattcatcttgtgtctttcatttttatctaacggttaaaacacaggttgctagcgcaacagctacctttgtgatgatgttttcttcgtccttatcagtagtcgagttctatctcctcaagagattcccaataccatacggtaagatctctaacacacaacatgagatacatttagaagtcgtagcagaataaaaaggaaactgatgattgatctttgtttcattgacagcaatgtacttgatttcggtatcgattcttgccggtttttggggacaatcctttataagatagctcgtggcgatcctgagatgagcttccataatcgttttccgtctctc

SEQ ID NO: 146905 - DNA, 1058 bp, Arabidopsis thaliana landsberg
ctccagagaaaagacagagagtcccatccgcatataaccgattcatcaagtgagtctcttatttaatttttacaatcattcatattctaaccataactgtgtaacattaatataattccttgtcacgtttttattttagggaggagatcaacgtatcaaagctggtaatcgtgatataagccacagagaagcctttagtgctgctgccaagaatgtaagaaccttatttctcacatcccaaaaatttatattaaactgttatccattggttgaatcaaattttaataatcaaaagagtccttgataaccatatttactctagttcaataaaaaattattttttaacgctgaaaatctagttagaagtgatgcgtttaagtatctttgtttcctttctaaagaatttaagccattgatactactaacatcacaacttggtttagattgccggcagaaactagggtttgattttatctatgcgtatagttgctcttgtattagttgtatatatattaaacagtcatatatgtaggtatagctgaaattaggagtaaagaattttgtcgggttataacacaagttgatatgtgtcttgtacgtatgttgtttatgtgtaatgcagtgggcccacttcccccacatacacttcgggctcgtgccagacaatcaacccgtgaagaaaaccaacatgccccaacaggtaaaccctaatctgtcgacataccttacatctttaatgcatatacttttatgtaatatcatatatacaaatataatttcaattgatttggatcatatcttaaacatgtgtgtaggagggagaggataacatggtgatgaaagaagggttctacgctcctgcagctgctaacgttggtgtgactccttattaaagagataaatataatcgactaagtatttgaggaattgaaatccaatttcttagggtttatcatgtccaaaagttgtggtttcttttcctttcttgaacttatttatatatattataaatatgcatgtgtctttttctgttgttgtaatcaaaaatcttgctaact

SEQ ID NO: 146906 - DNA, 1182 bp, Arabidopsis thaliana landsberg
  unsure (1)..(1182): unsure at all n locations
gtgatcttgctaagaagaagacttttctctgctctttttatcttataccgtcaggttgggtccatatcggggctggtgcatgtgttagaaccaatcctccggttaattgagttagatatggtttgtttggttagtacgatggtcaaggatttctcaatccatatgaagcctatattttcgggtatgctaggactaacatttctgatgaagagctgagagataggattccagggtgagttcaattagccatttggctttttgcttcttaacttgtgagtacaacgcccatatggtatagattgtatgcaaatatcttgttgatgagaagaatgctgagcaagctgaagctttgtcaaagtttctgcagctggttagtctattctttttaggatgttgatttcatgaatagggtcctgtnttcggtactgaaataagattttttggttccaatctttgtagattaagtatgtgagtggcccttatgatgctgaggaggggttccagagattagacaaggcaatttcagagcacgaaatctccaaaaatagtactgaagggtcttctagaagactgttttatcttgcacttccaccgtctgtttatccttctgtatgcaagatgatcaagacgtgctgcatgaacaaatgtgagtccctttcagctgtggaatttattacttggataaaatgttaacctgcttgagcctaggacacgtatttcatctacgagttagtcttcattttagtagttagcttagaaatacaagttttagacgctttgaagttcatgtaaactatattgtctcataatttccagctgatcttggtggatggacacggattgttgtggagaagccatttggcaaggaccttgaatctgcagagcaactgagttctcagattggagagttatttgatgaatcacagatctatcgtatagaccattatcttgggaaggaattagttcaaaacatggtaacctgcttctctattaatgtctaaatcatcaatctctttctttagactatcagtgattattttatctcgtgcatttcttgcagttggtcctccggtttgcaaatcgctttttcttgccactttggaaccgtgacaatatcgagaacgtgcagatgagagctgcatagctaagacagaaatagtcagactgtttgttatttagagt

SEQ ID NO: 146907 - DNA, 1349 bp, Arabidopsis thaliana landsberg
  unsure (1)..(1349): unsure at all n locations
ttaaaccaaaagatgttaatgtaaaagttcggcatgcattttcttaaaaacgctgctcgatcagtcaaggttagttaccattaacattttcgcatgtaattagtatttcaacagggttttgtattaagtggtaagttccctgagacatgtcatttaaagtttgagtgcaggacgattcaacagcgatcatgtaatgcttcctttggttcagctattgcatgatccatcttcctctgtccaggtactgtgtcacataagatgccgcatttctttgacttagtctcccatgtgattttttttctttaaaagcaaatggcacagtcaatttgaatgtatatgtacctatatattgtggaccaggttccagttcttggtgctctgaacaatatagtaatggatttttcatcaccgaagtcatcatttatcgagtatggagggataaaacagcttactgagttgtcaaaatcaatggatccaaatactcggtgtagcgctttgcgggctttaaggaacctcatgttccttgccgacattaaacgtaaagaactcttttattcagacgttaaggctcaaggacttgcttgtctcattagtggtaaatcattctacgagtcttcaaaccaaaatcatatgatacatctgtatgattttttttgttaactaacaaacaaactcattgcactcagatcctgagcccccagtgcaagagcaagctttggccctcctccgtaatcttgttgatggatgtatcagctctatcgagtttgtatttgatgaagatggtcttatcttagatactgttgggaggcaattgaggacagctccacaggcacaaatggcaatacaggtgacaaaattgaaaaaagtataccttatcaatagattaacaaaaatctctgatataaaatgtttttctttccncagggaatgtatgtgctcacgaatttagcgagtgggactgagttacataaagaagcggttatggagcaactgtttcctcaagctaaagctggatcagagaatttcatgcttaagtttttgcagagcgacgagagccagttacggtcagcagcagtctggacaatcataaacctcattagtccttcaagccccggtgcatttgatcggcatgtgaaattacggaatgcgggtatcattccccagttaaaaaacatggtcaatgacgcttgcctcgatgttaaggtacaaattttattacccttttagttaccttgtatactctacctcttatcattgactcagctatgttatttcaatctctttggctttgcagattcgcatcagaactgtattaggccagtccatgtcttttggcgataatactaaac

SEQ ID NO: 146908 - DNA, 681 bp, Arabidopsis thaliana landsberg
gtctatattcgggatgtaatctaacatgtttcagtcatgcagatgatatcattgatagtgcaagactactggctgaagaagaaactgcggcatcaacatacacggaagaagttgatacgcccgttgggagttcttcagaagagtcagacgatttttggaaatcattcatcaatccatcatcgtcaccttcaccgagtgaaacagaaaatatgaataaggtagctgatacggagcctaaagcagagggtaaggaaaacagcagagacgacgatgaattagctgatgcttcagattctgaaaccaagtcatcaccaaaacgtgtgaggaagaacaaatggaaaccggaggagataaagaaggtaatcagaatgcgaggagagctgcacagtagatttcaagtggtgaaaggtagaatggcattgtgggaagagatctcttcaaatctatcagctgaaggaatcaatcgaagcccgggacaatgcaaatctctctgggcatcacttattcagaaatacgaggttcgtctctgaacatatgaatctgtagccgtagatttgaagttcatgattacaagataaaaagctcttaagttagcaaccaagatttgatgtaatacatttttgtgcaggagagcaagctgatgagagaagcaagacgagttggcctcattttgaagatatg

SEQ ID NO: 146909 - DNA, 755 bp, Arabidopsis thaliana landsberg
tacaggttagctttatgcattggcttgtagtccaacagatgctacacttgttgcaactgaaggtggagatgataaagcatttctctggaaaattggtaatggagattgggctgctgagcttcctggtcacaaggactctgtctcttgtttagcttttagctatgatggacagttacttgcttctggaggattagatggtgttgtacagatctttgatgcatcatcagggactttgaaatgtgttttggatggtcctggtgctggaatcgaggtataaataacttgtcctatatcatcattgtaattgagatcctcaggtccaaatctagtacttactgtgtggtatttttcagtgggtgagatggcatccgagaggacacattgtgttggctggatcagaagattgttctctatggatgtggaatgctgataaagaagcttatcttaatatgttttcgggccataatctaaatgttacttgtggtgacttcacccctgacggtattgatataagcttctaccttatatgcttctgtggattatctaattgagtctacctgttttaattgtattgtttgactgtgtgtgggtactgtaggtaaactaatttgtactggctctgatgatgcaagtttgatagtatggaacccaaaaacttgtgaaagcattcatattgttaaaggcaagcgaaatttaaacatgttactactgcacaaatactaaatctttcgccttctttgactggtttaaaatgc

SEQ ID NO: 146910 - DNA, 981 bp, Arabidopsis thaliana landsberg
gaggatgactatcccatgtcgccggtaacttctatttcttacttgtaggatacgtaatcaatcctctagacgtctctgcttgcataaggaattggacattagtgttttaagtgaatcctagaaatccggaattgtaaccataacaggaaattaggctcatgtaggttggttttttggtctcccctgaagaggctggattgtatatggttttgtgaagctgatatcttgatttctgctgaaacagcgattgagacaacattgtggtctatcgagtggggaattgcagatctagtgaagcatcctgaaatccagagtaagcttaggaccgagctcgacacggttcatggaccgggtgtgcaagtcaccgatcctgatctgtcacattcttccataccttcaagctgtggttaaggagactcttcgtctgagaatggcgattcctctcctcgtgcctcacatgaacctccatgatgcgaagctcgctggctacgatatcccagcataaagcaaaatccttgttaatgcttggtggctagcaaacaaccccaacagctggaagaagcctgaagagtttagaccagagaggttctttgaagaagaatcgcacgtggaagctaacggaaatgacttcaggtatgtgccgtttggtgttggacgtagaagctgtcccgggattatattggcattacctattttggggatcaccattggtaggatggtccagaacttcgagcttcttcctcctccaggacagtctaaagtggatactagtgagaaaggtggacaattcagcttgcacatccttaaccactccataatcgttatgaaaccaaggaactgttaaactttctgcacaaaaaaaaggatgaagatgactttataaatgtttgtgaaatctgttgaaatattcccttgttttgcttttgtgagatgtttttgtgtaaaatgtctttaaatggttcgttctacgattgcaataat

SEQ ID NO: 146911 - DNA, 832 bp, Arabidopsis thaliana landsberg
tcaagagaaatgcgattaataagatggtggagatggttcatagcgatttggtttcgatgaggagagccagagaagctgaagcagaggagctgctgagcttgcaagctgggctgaagagaagagaggatgagcttaatatagggttgaaagagatggttgaggagaaagaaacacttgaacaacaattacagattatctccatgaacactgatattctagactcgtgggttagagagaaccaaggcaaaaccaagaatttagttgatttggatgtggataatgcttttgaatgtggtgacacactctctaagcagatgttagagtgtactgctttggatttagccattgaagatgctatttattccttggataagtcgtttcaagatggtgttgttccctttgatcagtatttgaggaatgtgaggttgttgtcgagagaacagttcttccaccgagccacgggttctaaagtcagggcggcacaaatggaggttcaggttgcagccatcgcaggtaggttacattcatgaatgaaattcagtgtttttgtttgcgggatactgtgtcacacaatgctggtttatatagtctgagattagcatctttgaggagtatttctgtggctatgcgtgtgatgatggttcctctttaagattgaattaaatgtctatagactatatatacacgaacaatgttgtgcacatacatatttgaatggatcagggcctgagaatcgtctacttttgtgatctatgactacttttttacatgttggggatctttgtgataaacagtattattatctagtgaatcaatcaattggtttgagaat

SEQ ID NO: 146912 - DNA, 1105 bp, Arabidopsis thaliana landsberg
cccttccgattttgagtctactagtcgagttgactcagtagagtcgaaaggtacgaccttttttctctacttcactgattttgaaactattgaagatttgatttggtaagatcattcattggctgtataattttattgcagcttctgggtttacgaagagacatctcctaattgaaacaaaacctttcctttccattgggctgagaaaaaagcaagagtctttgaatattttttggagcgtggttttatttagatgggaggtcaatgctctagcctgagttgttgcaggaacacttcacacaagacagctgttcttgaagctcctgatgttggttagtttctttaagacaatgaattagtgttttttctacttggatctaagaagctataagacattgtctgattgatgcagataatggagagagtagtgagatcactgatgttcctaatttccgggagtatactttagaacagcttaaggcagctacttctggttttgccgtggagtatattgtatctgaacatggagaaaaggctccaaatgttgtctataaagggaaattggagaaccaaaagaagattgctgtcaagcgttttactagaatggcctggcctgattcacgacagttcttggtatgttcttatctttggaaattgtagtttgtttcatctctttttattttgatgttgagaatgtgttcttcttccttgtgcaggaggaagcgaggtcggttggtcagctacggagtgagagactggccaatttcctcggatgttgctgcgcaggtgccgagaggttacttgcagcagagtcgatgcctaaggaaacacgagccaaacaccttttccactgtgagaatcatttttcctatatatagcctttcattttatattctcgccatgctagtctcggtagttatggtgtctaagtgttctttttatgctactagggatactcaacctatgaaatggactatgaggctacgagtttttttatatctagcacaagtttttgaatactgcaccagttaaggccgtattttttatcacgacctctatgcttacctgtttttttttgttgattttttttttatttatatataag

SEQ ID NO: 146913 - DNA, 1194 bp, Arabidopsis thaliana landsberg; identical to SEQ ID NO: 8516

SEQ ID NO: 146914 - DNA, 748 bp, Arabidopsis thaliana landsberg
  unsure (1)..(748): unsure at all n locations
ctgaataccatgncggttgtttaacaacaaagttctcctattgaatagcataattatatttagttcctactgaatatagcatattgaggaaaaagaaatctttggaggggattgagaaaaatatagcataattaggaaaaagaattgacacatctgaaaagaagggtttgagataccgtttatgtctttgatgatttaaactaaatgccattatctctatttggcaggtccatctttctccatcttaagccggaatttcatggagcactgtgtcttaggcactgacaacttccctcggactctactcatgtacttgtccaacacacctgattctctttccaactacttcccaactatcctctgcaacacggataccttcaaaaagaccatcatgaacaacaacttactctacctagcttctaacgacacttctaaagaaagataccatcagcttgatcacaaagagttcacagaaatggttgactccggagcagcttttgcaagaggattcaggtacgacgacactgtccttgatcgcatcgatcatgaacttctgggacgcaaacctggtgaagttgtgcctggtggttggtgtttaggagattctagtaaaaaccgtagctcgtgttccgtctggggtgactcgggtatccttcggcccggttctggttccgataggctcgagagacgaattgttgagttactatcaaacgattggttcagattgcaccaatgcgtacctgaatga

SEQ ID NO: 146915 - DNA, 720 bp, Arabidopsis thaliana landsberg
aagttacaatcttaaagtgtttttgtaggtaaagtaaagatgatgcaaaagaagctacttcttcttacagtgtcaatcatcttgaatctcgtattcaccattcatattctttattatagttcacccacatggaatccaacgtggaccaacagagctgcagcggaagcagaaactgtagcctctttttcatgctcaggccacggcagagcttttgtggatggtcttggtgtccttgacggccagaaacctccttgtgagtgcaacaattgctacataggaaaagattgctctgttcttctcaaagattgtcctgtcgatgctaactcgtatgcaacaactttttatcttgatcataatgaccaaaccaatctgtaaactttggaataaaaatgttattgttgtttttgtggattttgaagaggagaccctttgttcttggagcctttctggatgcgacaagcagagagaagcgcggttttggtctcgggatggcacaggatgagttatatttatgaagatgggacatatgtgtctcgagagctcgagaaggtcattagaaaacttcatagtgtagtgggaaatgcagttacagataacagattcgtaatctttggatctggtaccacacaattgcttgcagcagctgttcatgccttgtctttgacaaactcatcagtatcatcacctgcaccgcttctgacttctattccatactatgct

SEQ ID NO: 146916 - DNA, 402 bp, Arabidopsis thaliana landsberg
tatccaagaaaaaaataaacagaattgcagatcaaaacactctgtttcattcctctgttttttgctctgttttgctctcacgccataacgtgttctgcttacagtttcgacttcatttacttcggaaatggaactgatctgatgacattccatggagacgccgagtacgcttcagagcctgatggtatgagcaagtcaggagcaattggattgagccgtgacaatgtcccattctctcatggtcgagccattttcatcaatccagtcccttttaagcctagttctacttcttcctctgtctactctttccccccttctttatatttcctcattagtcctcgcccgaaaaatcctaatcccggaaatggcctcgcctttatcatcgtccccaacgatagaacc

SEQ ID NO: 146917 - DNA, 1375 bp, Arabidopsis thaliana landsberg
ctagagcatgcattgcatcaccaccctcttttcatagacccgtatcctctatacgatcacgattgcggtaacttagcgtgttcagtttgtttccggaagtcgagtggtctcatgtacagatgcagagaagaagaatgcgtaggttacgagcagtttcagctagatctcaactgcgttttagttcctgagtatttcacccataaaagtcatgcagaacatcatgtattcatctccccatcctatagcgaagaaaacgaagctctctgccagggttgcaagaagagagtttataattatcatctacactgtagtttgtgcgaattcgttttatgttacgaatgcgccacaattcctaatgagatacactacaaattcgatgagcattctctcactctttcttatggagaaagtggcgtggatgacaagtactggtgcgaagtatgcgagaaaggattagatccaacggaatggttctacataaacaaagaaagttgccccacaatccaccataaaagtttatttggagattttggttatatgaagcctggtcacatattcgattactgcggtaataaggtggaagttgttggcaatggtagtagctctcgtcccatatgtcttacatgtcaataccattgcccacatcacgtatgcttcaaagtgtgtatgattgatgggactgaaatttatttttgcgctttttcttgtataagattatgaactttgtgtgtgtaaaatattggtctgttttctctaatgtggggtcatacgagagatgttgaatttgaagctgggacgtttttttctttctgtcaacgatctgtttgtttttcatttgtgtatacagatcacacatattgaagactatagttcttttgaattcgatattttttcttatttctctaattttggatgggacagttcttatgtcacacgacttgattatatatacatatctcaatcaatagagggttgacaaatgaattcaaatcttagtacaacaacaaatctgctatggctaatgtttcacatcctaaaagccaagactcagatagaagactatagaagaaccaataattttacaaatatcaagagaccaaacgctacctggcggatgttagaaataactggtacagctcttttgatctgaatcttcttttacccaatttgttttgtttctccagaagaagcacgagaaaactcatttgccatcgattggtagagcatttgatggtgtgaagttacttagctgaattttcactgggtctagcgacatgtttcctatacatgagtcttctcaggttttgtagtgttctctgagtgaccaggccctttgcttgtgtcagctgattcctcagtggtttcaacaatctcc

SEQ ID NO: 146918 - DNA, 648 bp, Arabidopsis thaliana landsberg
tgggatcaccactatcatattcctcatcatatcctctctcaccttctccatcttccttaaactcatcttcttcttctcaactcacaaactcccaccgggaccacctcgttttccggtcatcggaaacatcatctggcttaagaaaaacaacttctccgatttccaaggcgttctccgtgacttagcctcccgtcacggaccaatcataacactccacgtaggctccaaaccttccatctgggtcacagacagatcactcgctcaccaagcccttgtccaaaacggtgccattttctccgaccgttctctcgctctccctaccaccaaagtcatcaccagcaaccaacacgacatccactcctccgtctacggatctctctggagaaccctccgccgcaacctcacctccgaaatcctccaaccctcgcgcgtgaaagcacacgcgccgtcgaggaaatggtctctcgagattctcgtggatctgttcgagacagagcagagagagaaaggacatatctccgacgctttagatcatctccgtcacgctatgttttatttattggctctgatgtgtttcggagagaaactgagaaaagaagagatcagagagatcgaagaagctcagtatcaaatgctcataagctacac

SEQ ID NO: 146919 - DNA, 1371 bp, Arabidopsis thaliana landsberg
gtcttaatgcttctgtgagtcggattttggtgtttgttaggcttagaccaatggggaaaaaggaaagagagaatgggtcaaggtgttgtgtcaaggttttgaataaaagagatgtttacctaacggagtttacgaatgagaatgattaccttaggcttaagaggctccgtgttcgtcatttcacttttgattcttcatttcctgaaactaccacacaacaagaggtttattccaccacgtaagtgtaattcaaccatattgccttgaataatggatcttttgattagcattgttcttagatgtctttcccttttgatttattcagatcagcagatcttgttgaaccagttcttaaaggaagaaatggttcagttttctgctacggtgctacgggagcaggcaagacttatacgatgttagggacaatggagaatccaggtgtaatggttctagcaatcaaagatttgtttgctaaagttagacagagaagcttagatgggaaccatgttgttcatctttcttatcttgaggtttataatgaaactgttagagatttgctttcacctggtagacctctcattctccgtgaagataagcaggtaaacataaaactgacattacattttgtctctttgagctttagataagaattaagaacacaatggtctcattcgttttcatttctctgaatgtgaacgaaatcagggaattgtggctgctggtctcactcaatatagagcttactcaacagatgaggtttcttcttgtaatctatacattttccatttttaatgatcttgaaaaacaaaagctaatatataagatttgtttgttattgtttattgcaggttatggctttgcttcaaaggggaaatcaaaacagaactaccgagcccactcgttgcaatgaaacatcttctcgctcacatgccatccttcaggttagaatttgcattcttctcagtttcatattgtgtcaaatcaatagtgtatcatcgactttgaggccaggaatgtcttaggttgatcttttgttgcggttctctaggtaatagtggagtataagactagagatgcttccatgaatatcatcagccgggtaggaaagctatctctcattgatcttgcgggttctgaaagagcgctagcaactgatcaaaggacgctcagatcactggaaggtgcaaacataaacagatcacttcttgcattaagtagttgcattaacgcgcttgtggaaggcaagaaacatattccttacagaaactcaaagctcacacaactactcaaagactcactaggcggctcgtgtaacacggtgatgattgctaatataagtccaagcagtcaatctttggtgaaacacaaaac

SEQ ID NO: 146920 - DNA, 528 bp, Arabidopsis thaliana landsberg; identical to SEQ ID NO: 42455

SEQ ID NO: 146921 - DNA, 1145 bp, Arabidopsis thaliana landsberg
caggccggtaccgccctagttgacctggttgaaaaatatgggccaaaaaaatggtttactatatctcagcattaacctgggcgcataggaaagcaatgtagggaaaggtaatgcaaaggctctcaacttctttccgataaaatgatatttacatacattgggtggtacttcaacgcacataaacaatattgtgggtgatgtaggtggcataaccatcttaaccctgggattaataaaaatgcatggactcaggaagaggaactgactcttattcgtgcgcatcaaatttatgggaataaatgggcagagcttatgaaatttttgccaggaaggtaaatatgtcttttccatgggtcctagtataacaacataggtgtaacatgtccgtaaaattggtggcctcataaatgaaataataggtttttgatgctggtagttgtggtctatcgttcctgctttggtgatttgcttattttttcttacgttcctgtaggtcagataattcgataaaaaatcattggaacagctcagttaagaagaagttggattcctactatgcatcaggtcttttagatcagtgtcaaagctcgccattaattgcccttcagaacaaatctatcgcttcatcttcctcgtggatgcacagcagtggagatgaaggtagttcaaggccaggggttgatgctgaggaatcagaatgcagccaagcttcaactgttttctcacaatcaaccaacgatttacaagatgaagttcaacgtggaaatgaggaatattacatgcctgaatttcattcaggaacggagcagcaaatctcaaacgctgcatctcatgcagaaccgtactacccttcctttaaagatgtcaaaattgttgtccccgaaatttcttgtgaaacagaatgttcgaagaagtttcagaatcttacttgttctcacgagctaagaactaccacagctacggaggatcaattgcccggtgtctctaatgatgctaaacaggaccgtggtctagagttattgacccataacatggacaacggtggaaaaaaccatgcacttcaacaagattttcacagttcactaagaataagcgatcaaccttttttgttaaactgagtcacagatccggaagctcaaactttg

SEQ ID NO: 146922 - DNA, 597 bp, Arabidopsis thaliana landsberg; identical to SEQ ID NO: 53289

SEQ ID NO: 146923 - DNA, 1447 bp, Arabidopsis thaliana landsberg; identical to SEQ ID NO: 36076

SEQ ID NO: 146924 - DNA, 1714 bp, Arabidopsis thaliana landsberg
ccaaaacgatggcgaagaagacacttcgctgaagcttttttttccaaaaaaatttcttagtgtcgtcaatggctttggctccacttaattttacggaaatgccactgagaagctctcttcctctgacctctagctctcgctattgttcctctccttcgcttcacgcattgctcttctattcgttgggtgtgaaaccctcgcgtcaacaaattgttcggccattctcttcgctgcgtacaagcgagcgtagcaacaacaggagcaataacaatcgtcgattagatcaacgtaatcataaacctactcctccttggatagataagtggcctccgtcatcctccggagctggcggtgatcatgccgggaagaaaggtggtgaaaacaacggcggagatagaattcggtctgcggaggaggaagcggaagcgaaacttcggtatttggagaaggataaaggacaaaacgcgattgagaggattgttcttcggctacggaatttaggattaggttcggatgatgagagcgatgtggaagatgacgagggaggtggaattaacggcggagatgtgaagccggtgactggagaagagagattgggggatttgttgaagagagagtgggtgagacctgatatgatgcttgctgagggagaagagagtgaggaagaggatgaggtattattgccatgggagaaaaatgaggaagagcaggcggcggagagagtagtaggagaaggaggagtggcggtgatgcagaagaggagagctagagctccatcactggcggagctcaccgttgaggattctgagttacggcggttaaggagggatggaatgtatctgagggttaggatcaatataccaaaagctgggctaacgcaggcagtgatggagaagatttatgatacttggaggaaagaagagcttgtgaggctaaagttccacgaagtgcttgctcgtgacatgaagacggcccatgagattgttgaggttcgttagttctcttgaatacttcattgattagaacagtaggttagcgaaatttgaggtgcgagattattccaagagagagcggttttcattatctattggggataagctttgcggaagtgacatgatctttataggataataagagactctgaagtacctaagctctgaaatagaatggttataaagcttttataataacagtaggaaatttgtgaaaaacgttagatctttcttgggaacgattatatagttgtgaataaggtgaatttgaggtgttgattaactagagtggatggagctgagcatgctgttagaattctttgagtaacaagactgtgcaggagatgcatgtcttaactttaggtttaaaaaaaaactgattgaattactctaatgggcagcgtcgaactggtggaatggtgatatggagggccggaagtgtaatggtggtttatcgtggacttgactataaaggacctcctgtgatctctaatcaaatggccggtcctaaagagactctttttgtcccagatgtatcttctgctggcgatgaagcaacaaatgccaaagataaccaaagtgcacctttggtaatcaaagatccgatcatcaagaaccctattcgcaaagagaatatgacagaagaagaagttgaatttaacagtctattagacagcttaggtccacgttttcaagagtggtggggtactggggtactacct

SEQ ID NO: 146925 - DNA, 367 bp, Arabidopsis thaliana landsberg
agaacatgaaagcagtggtgagcaagttgtattgttcctcgatggaggaagtgatggtggtgagacgacggccacacgtggttaacggcggtggctttgtggtgacagattacaaagaaaagatagttttcaagatcgacggttgtggagttcttggaaccaaaggagagttagttctcagagatagtgatggcaacgatttgcttcttatccacaaaaaggtctccttttaatttcatcccaaacatctcattattattccaaacttgtatgattatatatataagtttattctttataaatatttgaggattaatttcgaatgctaataagcttttttaaaaaggtgaaatagtgatggagtaat

SEQ ID NO: 146926 - DNA, 1313 bp, Arabidopsis thaliana landsberg
  unsure (1)..(1313): unsure at all n locations
ttagattatatacatatggttggaggagggatgatattttatatgaattgagacttgagagtatacgttttgatatctatccttttttttcagtaaaacaggcccaagtgtagccgatgctgctgtttcacgaattgctcaggggacaaaaatacttgcagagggtggatacgaaaaggtcttcaagcaaacatttgattgccttcctgatgaaaaacttctcaagacctatgcttgctacttgtctacatctgctggtcctgtcctgggagttatgtatctttcgactcacaagcttgcgttctctagtgacaatcctctctcttacaaagagggtnnnnnnnnnnnnnnnnnnnattacaaggtatactcgctctctatcctatggttactttttctttctaactcttttattttatatctatttacatctaagaaaactatttgagaacaaagattcagcgaatgtaatatttgatggtgacatgataaagcgttaagtgagttaagtcattttcaatgcatctatttacatagattcatagactataacaaattttcttgtcatttctagttattgacgtatagaacatagtgtgtgtacgcttatagtaaatggaaactacataatcattctaacgatattgttgagtagttgcatgttagttcctatgtagacaattaggactttagtggtttgcctaagagagtaagctaaatcttgtagcattcttgataaaactaggggagccattgaataattgttagtttgagagtttggactggttctaatgtaaacatctaacatgagctgaaatcctattaaaccaagcagaaagcttcttgacaacatgatctttggaaaactgattttaagatttgggtggttcttgagaaccttttttcgttccttgagaaccttgcacttgcagtctattttctgtcattcttccttgtaaagtctgtggctgatgattttgatgtgatgatcaggtggtacttccggcgaatcagctgaaggcagtgaacccatcaacaagtagagtgaacacatctgataaatacatacaagtgatttccatcgacaaccacgagttctggtttatggggtttgtgacttatgaaagcgctgtgaagagccttcaagaagcggtgcagtcacatggtccgtgaaggtccactggtataaatggcaactcttagtgatattgcgcattaacatatggaacagtgtgttttagtatttgataccatttcaatgtgttctacattttgtcctcttggcgtttactcataaacattgcttttgttca

SEQ ID NO: 146927 - DNA, 1984 bp, Arabidopsis thaliana landsberg
atgcatcccgggaatgtatggggtgggtcgctagacgccgtagacagcgaccgtatcggggcagaggaggaagaacggctgaggaacacgacggagtgggacagaggagctattcactcacagagaagtgaattagacgaaacgcaacaaggctggttgcttgcaccgcaagataattggagaaagaagaagaagaaatatgtaaacctaggttgtgtttccgtgagccgcacggttttcttgtggaccgttggatctattgccgtcttgtttctcgtcgttgctcttccgatcattatcgtcaagtcgttgcctcgtcataagtctgcacctcctccgcctgataattacactcttgcccttcacaaagcacttcaatttttcgatgctcaaaaatgtaagtcttccttattattctttattttttgccgactattttttcttatttatatatttacattgtgcatagtataatgatgatagttaaattttaaaatatttaactagaaacttaaaaagatgacaagaaaaaaaaagacgactagattttctgagttatcaaattttcatttcttacttttatggagtccaattttcatccaatttctatagaaaaaaaaaatttaaaaatatctacaccctttaaattagaagacttaactataaaagttgatgacttaatagagagttttttagaaattttgtggaaaatgtgattatttgtaaatataaggaaacagactcttaaaagattaacgaaaaagtggaacaattgctgatgtagttttctaatgaagtgattaaaaagtcattttattgtgacttgtgaggcaaatttgaataattccgcgttagcaagcgcaataacttattagtattagaaaacgtttaataattcaaaaataaacattctttaggtagtagacttcaagaataacacgcaagtgttgacattctaataaaataccaaaatcaatttcaagcacgtatatccgactaactttcaacctcgcattttctcattttgttcttgtgagctggcttctggtaatgctcacaaattcatttggctttccaaggactaacgcggtttcgatatttgagcagtataatttcgtaataaaccaaaatatataaacttaaattttgtatgaatatctaagtgctagcttgtttggaattatgtttttttctacactaaatacattttttcaaatattcttctctatatcaagattagaaaataaatttaaaatcaaaattttctttttatatatccaatatatgcattttgtattattttaagttgagaaggacaaattaattcttgatagtattagtttagattttcttaattaattaataaatagaagaaatatggaatcggttcaagacactcatacaaatgaaatcgagttaaaccaaaacactaaactaacaccaatatgtcgagccacattttcatatttgacctaagaaattattcaagaattctatcgtgtatcattcatgtctataaaaatattagaatctaaatggtaagcattagaggaattaaaactgagtgaaaaatattgatgatatggaaaaaaagatgaatgatgaataatgaaaatgtgatattgtagctggtaagctgccgaagaagaataaggtttcatggagaggtgattcagggacgaaggatgggctgccggacgtggtaggaggattggtcgggggatactacgacggaggaagcaacgtcaagtttcattttccgatggcattctcaatgacaatgctaagttggagtctcattgagtatagccacaaatacaaagccatcgatgagtatgatcacatgagagatgttctcaaatggggcactgattatcttcttctcactttcaacaattctgctactcgcaatgatcatatctacactcaggtaatgtattattagttgttacttctatgagagaatgttcgaagaattgctatg

SEQ ID NO: 146928 - DNA, 748 bp, Arabidopsis thaliana landsberg
cagaaatgttcgtctctcgtcatagtttttttttcattatataggtcatatctgctcactaatctcgtttgcaggatagtgtctgatatatgtcaaaaagcagtagcaaaagtattcaggtgcattttcagtaaccaaggatattggtgcctcgaccatatagatgttccgtgtgagaggctttataacaccgagcctctaaatggaatcgaggatccttctctccaaaagcttgtcatcgaaggaaaagtttgcatgtggggtgaaacagttgatacatccgttgtccttcagaccatttggcctcgtgctgcagcagctgcaggtaactctacatgatcttttattttgtctcagtttggatttggtttagttttgcttaaacgctcacctctactgttgatatttcctaaaccgttatcgttggtgaaacagaacggatgtggagcaccagagaggccgtgtcaaaggggaacataacgttaaccgcattgccacgtctacactacttcagatgtctactgaataaccgtggcgttccagcggctccagtggataacttttacgcacgaagaccccccttgggacctggctcttgctatgctcagtgatccaaaacgtttcttctcattgtactatatgtaatgtctcgtctgaaatctggttgtcacgttgctttttctgttctaaattgtgtgcttctcaatttactcaaatcatgacaacatctgaaattacgatctaaaac

SEQ ID NO: 146929 - DNA, 2441 bp, Arabidopsis thaliana landsberg; identical to SEQ ID NO: 29353

SEQ ID NO: 146930 - DNA, 1234 bp, Arabidopsis thaliana landsberg
atgagtcgtttcgagatttcgggccactggttcaacaacaactgcgtaatacttctcttctttatgttagaacgacggcgtaatatgcgtttcgattggaacgatgtcgtttctttcacactcttagaacgacgtcgtatatattcgttttactcgagttctataaaaacgacagcattttggatatttggctttactattaggccttgccggaaaaacaaaaaactagctcatcgtcgtcatgtcgtctctgtctactacaccgattccaatggaactccacgccggtaaccggaaaaagttactagaatcaatacgccgtcagttatctagttccaatcgttctctcgatggatttgttcttctacaggtacccttgattagctcttatatacataatttccaacacgtatcgatgatccgattccgggctcgctttcattgtgtttagtttgtaattttcttgattctggacgatagggtggcgaggagaaaaatcgatactgtactgatcacaccgagctcttcaggtattgatttgaaattttatctcgaggtttcttctctttcaatctgttcaatgtattgagtggaaataagatgatattgaactgacttgtaggcaagagagttattttgcttacttgtttggagtcagagagccagatttctatggagctattgtgagttttgctagctatatctccatttcttaagaacatatgacccgttcaccattttcattctatatatgttgattgttgcttaaccaatgacattgagtcactttcgatattggaaggacattggaagtgggaaatctatcctttttattccaaggttgcctgatgattatgctgtttggttgggagagattaagccattgtcgcattttaaggtaaacatctgaacttttttaagtcttgttaatttgttcagtgagtttatagtgattgcagtttgtgcttcttgttgcgggaaacatatatggttgacatggttttttatgtgaatgggataattcaagtctttagtggacattttaagggatctgaaaagcccctgttgtatctcgtgcatggtctttatactgacagcagtagcttctcataacctgccagctttgaggttttgacatttcatcctttcgtcttcactgtctctggaaaaaaggtcttatgtttgtcttgtcttgatgctgaagttgtggacatctaacgtgcatgtcttgtga

SEQ ID NO: 146931 - DNA, 1732 bp, Arabidopsis thaliana landsberg; identical to SEQ ID NO: 9446
  unsure (1)..(1732): unsure at all n locations

SEQ ID NO: 146932 - DNA, 533 bp, Arabidopsis thaliana landsberg
taactagtgtatacagcttctgagtatgctttcttgtatgtatatgtttaagtgcagtgttcaagtttgtggaacatccagagaacaatgaaaagcagccgttgaaccagaagagcaaggttaagtttaagattatgagcctgaaagttaaaccaggaatagagtatgtgcctgagttggtatgttatgtggctcctttctgattcttatcagtttacttaaaagtccaatgttggaagcaattttattcaatcttagaaaatgactcttataggctgaaacattgcagttggtaaataggttttaaaaggataagccctctctgtctcagagattcttaggcataagtccatggatgatgcatttttgggtgtttttattgtgcagtttgatgagcaaaaggatcaagtagcagtggagcaggttcttcgggtcatttttattgatgcggaccgcccaagtgctgtaagctctgcatgctgataagatcacatacagtctaaattctatagtttgaacatttcataaggaga

SEQ ID NO: 146933 - DNA, 608 bp, Arabidopsis thaliana landsberg
gatcatttaatagctcttcgggctctaaagtttcaagcaagacaagccgttcaacgggtccttcaggactaagcacaacttcttacagcacagatagtagttttgggccattaccaacacttaggacagaaggagagatactttcatcgcctaacctaaaagctttcactttcaacgaactcaagaacgcgactaagaactttcgtcaagataatctactaggggaaggaggtttcggttgtgtattcaaaggatggattgatcaaacatctctcactgcttcacgtcccggttctggaatcgttgttgctgttaagcagcttaagcctgaaggttttcaaggtcataaagagtggttggtaagttcggtttctcgccctttttcggttcaccgtgattaatgagtgtgtgtttgctgacattttgagatattgtttttttttttttttttcagactgaagtaaactatcttggtcaacttagtcacccaaatcttgtattactagttgggtattgcgcggaaggcgaaaaccggcttcttgtatatgaattcatgccaaaaggaagcttggagaatcatctttttagacgtatgttttcagcaactc

SEQ ID NO: 146934 - DNA, 1298 bp, Arabidopsis thaliana landsberg
catggatgtatcactcccaaggactttttgggaaaccagcattcttaaccgtctctgggcaacttaatggagaaacttatgcaccccgctctctcagatgtaaaagttgactactcgagtgattgtgaggtagattttggttagtaagtatctgaatctgtcatctgtatgacattgcaggtatacacattgtggtcctacatttcgagctgagaattccaacacgtcaaggcacttagccgaattctgggtcagcattattaaatcctccagccaaactcacaattaaatttcttacctaagtttgattttctgaagacctctctttctgccatataagatgattgaaccagaacttgcttttgccgacctggatgatgacatggcctgtgccactgcctacctccagtacgtagtatgttgctctttcactttatatttcctttcaaactgtaaatatcatttagaattaatttgattgtaatctatctcttgatattctgataggtaaagtacgttcttgataattgcaaggaagacatggagtttttcgatacatggattgagaaaggaatcattcgccgtttgagtgtatgttcgcctattctcactctgtgatcagaaaagaatactatgcagtttgcactgtctgatattctgattaatttacaatatatcttgtaaaggacgtagctgagaaagagtttctacagctggggtacacagacgccattgaaattcttctgaaagcaaacaaaaaattcgattttccggtaaaggctttattttctcctttcggacagatttgaactgaacttttggactaaatatgcaaacttgcataggcatttctttttctaactgcttttgacctctgagctagtagtctacctgtttgtgttttttgtattttctgtgttaaataaactgtgattatatatctattttgaatgggtaggttctttaaaatgagattatttcatgatcgcatgtgagtagaaacgtcggattggttgcctgatagagctgtatgttgcaggtgaagtgggggctggatctgcagagtgagcatgaaaggtacataacagaagaggcttttgggggtcgacctgtgataataagagactatccgaaggagatcaaagcattctatatgcgggagaacgatgatgggaagacagtggcagcaatggatatgcttgtgcctcgggtaagattaagataatacaaaatctagttgataatgagaagttgttgatggtgaatgatgatgatgggttttggcctgaaaagatagg

SEQ ID NO: 146935 - DNA, 690 bp, Arabidopsis thaliana landsberg
acataaacacaaaacagaagcatgaagatgaataacaacgacggccaacataataaaacggtgacatttcctcgaaaaagcatcgtgaaggctactgttttcatcgtcgttctattcatttcagctgctctcttagacttactgggctatctcgatttcgtgggttttaattcaccttacatttttagtttatctataatataaatcgcagtagttaacgttaatcataatcattgtcatattgttttgttttatagaatgcttttgcaggtttaaagctaacaacaaagacagaagaaccaaatccttacgggtgcgacttcgtacaaaaccaatcaagtcaaactcctatctcacaaaaccgcaaatcgagattaaaccccaacaacagttcaaaatcatccacgtgtccttcttatttccgttggatccatgaagatctacggccatggaaacaaacggggataactagagggatgatcgaagaagcgagtagaacggcgcattttagattggtgatccgtaacgggaaggcgtacgtcaagagatataagaagtcaatacaaacaagagatgaatttactctgtggggaatcttacagttgttacggtggtaccctggtaaattacctgatctcgagctaatgttcgacgctgatgatcgtcccgtcgcccgaccagttgacttta

SEQ ID NO: 146936 - DNA, 952 bp, Arabidopsis thaliana landsberg
gagaaccacatgggagacttgagagcggcggcgagcttgaccggcgctggttgacggcggccctctcaatctccagtattctcggttcaataaaagcttcaaaaaaagaagaaaaaatcgaaaattcacgaaaatatatattaatttcaattttccatatttgaattcttccagatcttatgattccttgttcttcgttctcgtggcggtttctgaattgttgatgcgacgatctcatgcccgttctagggtgaagaatagtagtagtagtaaatccgatatggatccgattaagttccagatccgttctgggaaccgagcaccgtcttcttcatcgacctatacgctaacaaaaccgaattcgaaacacgcgaaatcgaatctcttgttaacagttggttctatatctgtagtgttgggggttctctttctttgctattcaattttgttctccggcggtaatctgagaggatcgcttcgttatagcgtcgtgatcgacggcggaagtacagggacacgaatccatgtgtttgggtaccggattgagtcgggtaaaccggtttttgaattcagaggagcgaattacgctagtttgaagttgcatccgggtttatcggcgtttgctgatgatcctgatggagcgagtgtgtcattgacggagctggttgagtttgcgaaagggagagttccgaaaggaatgtggattgagactgaagttaggttaatggcgacggcgggaatgagattgcttgaattacctgttcaggaaaagattctgggagttgcaagaagagttcttaaatcttctgggttcttgtttcgagatgaatgggcttctgttatctctggtgagttttcaaaatcttctcttttgttcaaaagtgagtctttttatctaatgccattggagttgtatcagtttctgtctcgctctttttgatttgagagtatg

SEQ ID NO: 146937 - DNA, 976 bp, Arabidopsis thaliana landsberg
attgattcatttattcgtaacgcaaagctagaggtaaataccatattctcgattcattgcatttattttcaattcagattgattgattttatttattttcaattcagaatgcggctgcgtgttcttacacgtgtgatcattaagacatgctgttcctctgtgtcttacactagagataagatcagtatatcgtttggtgatgtctacggcaacgaggttagttttttccttctttaaagtcaattcttggttttgatctacaaaatatccataattcggatagcttccttcactgctaaataaatccgtaatcaatcgaatatgattttccacaaattttctggaatcttagtttacaacaacccggttcagattatccaagtagatttttggtttgccaagaaacttgaatagcttctggatcttgagatccaagaaactcgggcttaggtttgagtgtttgaccaagccaagaaacttggatttgtttattattttgaacaattttaagttcatcccataaaacaaagtatagtagtagcttgcgttttagcagtaacgatgctgcatattcaagaggttataaaatgttaaattatcttgtttatttgtctaaattagggaaaaggaatgaatatttttggcttaaaaaaaattgttttgttttgttcaggtgtatgtgaagagactagacgatccatcgtcgaggacgttcgaaaagtgttcatcagacacatacaagatatcgggtccgtgtatgcccgacgtttgttatctctacctcctcaggcaaggatccgccggctggaaaccagagaatgttaagatctacggctcatccatcagatcagtcactttctactacaaccttttcttgcctaactctgtttggtacggctttaatgtctgcaatggcattggcaataccaagtcttctcaacccattagtactacctcttccgttgcagctatgtaa

SEQ ID NO: 146938 - DNA, 777 bp, Arabidopsis thaliana landsberg
taaaaaaccaaacatatccatttaaatgtattcaaagtcatgagaaaatttcctatacttgttcctttatatctgcgagaagtcatgaaccttatccatttattagttttcttctgaccgactaaacctgataatcactaatccaccgttagatcttaaaattccaaatccaaaatggacggtcaagatcacttaacgaaaaagaaaacagtttcctgtccagaaatgtctaaccttgaggcctttttctctttcctttcaacttttttttttcgattataaattttctcgtgaagctaatttttcctgagaaagaaagcgaaacttcgctggcgactaaagattgctgagaagacacgtcgtctctgtgagaactttttctttttcttctggtatattctggagacagatattgttttttcttctgattagagaataatatgacggaagtgattagcaaaacgagtttgttcttaggagcttgtgggaatcatcaccgtgttgatgatttctctttctctccggtgagttttggtgggtttggtttgaaaaagagtttctcttgtctgaagcttaagagtcagaagcctcttagaagtgtattttacggaaaacagatcgttttcggagattctcaagacgagagcttcagaagatcatcagctatcacagctcaggtagactttaatgttttgtgttttcgtttttgtttatctgaaatattataatccattacatgcgagatctaattagaaagatcctgagagctaattgttg

SEQ ID NO: 146939 - DNA, 1108 bp, Arabidopsis thaliana landsberg
atgtctcctctccaatggctcacaatctcttttgctctaattatcttccactctctcacggtctcctctagtgttctgtcccactcagatcgagtcacccgtttacccggtcaaccccgggtcggatttcagcaatactccggttatgtcactgtcgacgacaagaaacagagagctctgttttactacttcgccgaggcagaaaccaatccatcctctaaacctctcgtcctctggctcaatggaggttcgtttcaaatcttcactcactctcaactaccaaattacattatagtagattagaaaaaattaaatgtgaaaatgtggataaatgcaggacctggatgttcatctttgggcgttggggcattctcagaaaacggaccatttagaccaaaaggaccaatcttggtcaagaatcagcatagctggaaccaaggtaattacaattcaagactcttttttcaacatttcaaaaaactttattaagtcttgatttttaattttgtttggtggttgcagaggctaatatgttgtatctagagacacctgttggagttggattctcttattcaactcaaagctcccattatgagggtgttaatgataagatcactggttaatcttcttaaacccttcattaagtatcttctttttctttaattctcaattcttgattaaagaaagcaaaaacaaaacccttcagagaaactgtgttttgctgaatctattgatttagactttgcataaaggaacccatacgtttgtgtctttttccctttttcaaaattcagcaacaacagaaaaaaacaacaaatcaaaagtaagattttgtaaccaccagaaatgaaaacagacatctttttacacaccacaaaagctttggctttcaagtttttttttttttttttttttttcattttaataagaattttctgattgagtgagaagttatgatgatggtgttacacagtagtatgacctgtgaatgtcatttcttttgtttgttcttccttttacaggaaagtgaatattattaatattttcctaaaaataaaagattcattcagcttttgtttctttgtccagtctgagactgacaaaaaga

SEQ ID NO: 146940 - DNA, 869 bp, Arabidopsis thaliana landsberg
tgtccattcggtatgttttttcttttaccgtttagcttcagtactctggtaatttgtttgcagggttgagttatctatggcttcgaatatcttggggtctgctttatagcctaacattcttcgaatacagctagctttctcttgtgtagatagcttgtagaaacagacatgttttgttcgatattgagcttatacagtgcttgcttttcaaatgttcgtggaatttataagtcaggacttaggaatactctggaggatagtgcaacttagattgaacctctgtcgttagggtgcttgagtggaatatgattcactttctgatttatctgccctgtaccacctcttaatcgatagtgttcttattagatcatgaggaaagaaactagaggtacattgaagctaatgttgggtctgtgtatgatatgcaggtagaaagcattgtgttgagtatcatatcgatgctctcaggtcccaacgatgagtcaccagcgaatgtggaagctgcaaaggaatggagagacaacagagcagagtttaggaagaaagtgagtcgctgtgtgagaagatcgcaagagatgctatgaacatctctccagcgtttttttcgtgttgtagaaatatcgattctaatcttatgagaaagcctaagcagaaccaaccatcttcaagcagcagccagatgaatctgactttgcaaaagcttctctttctttttcctttttgggttttgttctctaaggtttggtttggaatattggtgtggaatcaaatccgctccatattttaggattatattattgcactcgttaatggattcgtttgatctggctttttaactttattctggttttgggttacaaaatacttgc

SEQ ID NO: 146941 - DNA, 639 bp, Arabidopsis thaliana landsberg
gttcagtctcattaaccaccgctgctccaaactccactaccaccacggtcaccgccgataaaacacccgcaaaacgaccgtccaaggaccgtcacatcaaagtagacggacgtggccggaggatacgtatgccggctatctgcgcagcacgtgtcttccaactaacacgtgagttacaacacaaatcggacggcgagactatagagtggctgctccaacaagcggagccagctatcatcgcagccaccggaactggaaccataccggcgaatatctctactttgaacatctctcttcgaagcagtggctctactctttcagctccactgtctaaatctttccacatgggaagagcggctcaaaacgctgccgtttttgggttccagcaacagctttatcatcctcatcacatcatgacagattcttcttcttcttcttctcttcccaaaacattccgtgaagaagatctttttaaagatcctaattctctagatcaagaacccggttcaagatcacctaaaccgggatccgaagctcctgatcaagatccgggtttgacccggtcaagaacacaaaacatgataccgccgatgtgggcagtggcggcgccaacgccagcctccacaaacggaggtagtg

SEQ ID NO: 146942 - DNA, 3256 bp, Arabidopsis thaliana landsberg; identical to SEQ ID NO: 15338
  unsure (1)..(3256): unsure at all n locations

SEQ ID NO: 146943 - DNA, 571 bp, Arabidopsis thaliana landsberg; identical to SEQ ID NO: 39657

SEQ ID NO: 146944 - DNA, 1721 bp, Arabidopsis thaliana landsberg
  unsure (1)..(1721): unsure at all n locations
gtctctacatgccatatgtgtggaatattcacggttgaatgtgacaagcactgtaatgtncaagcgtaaggtgggttaaatactcaacttgcctgtgaacaatgtgttgtattttatgcagagaatcatgctggttgtaacatgtttcttttcttttgctacagttgaattacatagtgacaaacaagtatgttgatggttgggatgatccacgtcttttgacactttctggtttgagacggaggggtgtgacttcaactgcgattaatgcatttgtacgaggcattgggattactagaaggttgctacatatatatatctgaatacatcatactatttggcatatgtcaattatctttgttaactctgctctctattgttctgtgttaaagtgatggtagcatgatacacgtaagtcgtcttgagcatcatattagagaggaattgaataaaacagcccctcgcaccatggtggtgcttaatcctcttaaagtggtcatcaccaatttggaatcaaacaagcttatagagcttgatgccaaaaggtggcctgatgctcagaacgatgatccccaggcattctacaaggtaagctgtatttcgcaaatacttgttttctactaacaacatattactgtttcttgatattttttcctggtctaggtaccgttctctagagttgtatacattgaccaatctgacttccgaatgaaggattcaaaagattattatgggctcgcccctggtaaatctgttttgctaaggtatatagaaagggacagttttcatcattactacttttgctttgaatatgattcagttgtgactaaacgtgcttcctgctgctctttgcagatatgctttcccaatcaagtgcaccaatgttgtctttgctgatgacaatgaaaccgttcgtgagattcatgcggaatatgaccccgagaaaaagtcaaagccaaaggtcttttctttagccatctctgtaatttctgcaaatttgtggctcttcctaacctttactttgcttttctgcgcagggggttctacactgggtcgctgaatcttccccaggagaagagcccataaaggtggaagtccgattatttgagaaactctttaactccgaggtatttatcattctctaggttttgcttttgttgttgttaccaagaaaagtgcccataaaggctaaattttanataatcattacagaacccggctgaactcaatgatgcttggctcactgacattaacccaaactctaaaatggtaatttctggtgcctatgctgtatcaacccttaaagatgctgcagttggggacagattccaattcgagaggctaggtatgttctgtttcatgatcataaaaagtgtgcaattttctagatgagcaagactgatacaaagtttaaatcacaacttgtgatgcattaggttattacgcggtggacaaggactctgagccaggaaagcttgtgttcaaccggacggtcacactcagagacagctacgggaaaggtggaaagtaaaacactccacccatattaacattttgttggtcaaaattcccccgaaagggttttataacaacagtaaatgaaatcgtttggtttgatacgcacattgtaacacagttggttttttatttcttgaatcaaaacaatgtcatgttttatcttttgaaaaagtttttatttttagaaaacagatgctgaaaag

SEQ ID NO: 146945 - DNA, 1269 bp, Arabidopsis thaliana landsberg
  unsure (1)..(1269): unsure at all n locations
gtcgtatttcaatggctgcttctagattatgttccgcgcggcgatagctgctgcgttcacttcaatgtcaatgtcacagaaccnngcgtacgctgactcgcgatttcgctttcctttcttctcttcttcacctccggcagaagaatttccaaccgatcataagtcttcttcgaattctaaatcggagactaaacctgactccgatgagcctaaaggatctggtttcgatcctgagtcattggaaagaggtgctaaagctcttcgtgaaatcaatagctctcctcattccaaacaggtgataattgaatctctttcgagaaatcaacaagctctagcgtcgttgattcttgtgttttgagacgttgcttacatgttattgtgttcaccaggtgtttgatctaatgcgaaagcaggagaagactcgattagctgaattagcggctgagaaagaacataatgaagctattcaagctagcaaggacattgttagtaacttgctcttccttatgttatatattgaaaatttgagcatggaggttttgatatgatgttccattgcattgtctttcaagttacattctctaaatcttattaggatgttggaatcaactgtcttttcggtgtctttgttgtttcctgcttcaaagttttgctgaacattcgttgcagaatctgaaatttattatgttgtaacattttaagtctgggaagcgacaaatatgattgttttatggggctttgaatgagcaggaaagacagcggaaattggcagaggatcagagaaatttagtgcagcaacaggcccaagcgaaagcgcaaaatcttagatatgaggatgagttggccaggaagagaatgcaggtacatttttagaaagaaactgtgaacctatgtgtaacattttaaggtcttgtgagggttctttactgagaagaagtctttgacttggaaattttgcagacagataatgaagctcagagacggcataatgctgaattggtttcgatgcaagaagcatcttctatacggaaagagaaagcaagaattgccacggaagaacagattcaagcacagcagcgcgagactgagaaagagagagcggaacttgagcgagaaacaattcgcgtgaaagctatggctgaggctgaaggcgagctcatgaagctaaactcactgaggagcagaatagaagaatgcttctagataagataaatggtgaaagggagaaatggcttgcagcaatcaacacgactttcagtcacattgaag

SEQ ID NO: 146946 - DNA, 906 bp, Arabidopsis thaliana landsberg
ttataagatatcctcgtactgtccacatattgccaaaacattaactgagttttgatcataggtacgaccaaacgctctttgaggacgagcagaaaaacaggatgatggagaccaaggaattattcgactgggtcctgaaacaaccctgttttgaggtttttagttacatttttatctcatctgttaaaaatttaaagacactcttgagatgggtttggttacaaaaacttggttctctttacgcagaaaacatccttcatgctgttcttgaacaagttcgacatatttgagaagaaagttcttgacgtaagaagaactaaagcatatttatttgttttgataggcaagcaagtctttttgttcaataacgctttcttattcaatgtgcataggttccgttgaacgtttgcgagtggttcagagattaccaaccagtttcaagtgggaaacaagagattgagcatgcatacgagtaagcttgtctccaaactttactgattcccgccaaactgttaccgttatatgaccttatttttaatttggattcaggtttgtgaagaagaagtttgaggagttatattaccagaacacggcgccggatagagtggacagggtattcaaaatctacaggacgacggctttggaccagaagcttgtaaagaaaacgttcaagctcgtagatgagacactaagaaggagaaatttactggaggctggccttttatgaccttattattacatatctctagtaaattacctctccttattattataagaaaaactcgaaaactgaatgaccgtgtaatttatctttcgggacaaaagacttagcgaatcaaaatctaatgtgtctcgatggctacgactagtttctattttatcgttgtttttgttaacaatcctctg

SEQ ID NO: 146947 - DNA, 859 bp, Arabidopsis thaliana landsberg
atgtacagtaatttcaaagaacaagcgatcgagtacgttagacaagcggtaaagaggacaatgctggtaactacaacaaagcttttcctttgtacatgaacgcgcttgaatacttcaaaatctatctcaaatatgagaagaaccctaggatcagagatgccatcaccgacaagttctacgagtatctccgtcgtgctgaggaaattcgtgcggtattagttgaagttggatcggggaaaggatcgaatggcgacgcagcggttgctacgaagcctaagactaagcccaaagacggaggagatggagaagaatcaaagcttcgagctgggttaaactctgctattataagggaaaagcctaacgttaagtggacagttgttgctgggcttgaaagtgccaaacaagctttaaaggaagctgtgattttgcctgtgaattttccacagttcttcaccggtaaatatttgagagcttgaaaaaggttgtaaacctatgcacaaatcaattaacctataaacgatgtctttctctattgttttgttaatagctagggccatatatgatccaagagatgtattcttctaacagtctaaacttctggcgctttgctatatccatgaatatctccatcctcttgctgaactctgacccactctccttgcatctaaaggaaccagaacactcacactgctctgtcaaatgagccgctttcacctgattgcacctaatgcacactacatcctgcatatggtacattctttctctctgtctcaccatctctagaaggctactctccatctgctctctgtcataaatcttcccacattgtgtatccgcacatgaccattctttctctgtt

SEQ ID NO: 146948 - DNA, 2643 bp, Arabidopsis thaliana landsberg
agtgcctcctacgctattcttcattttctccggtgaccaatccttttctttttcttctcctctccgtccttaaatagttatacaggagcagggcttgttccttgatcaccaagaaatcgctttgacccctatctcctcttctgcaactcttttttatcagttttccacaacacaatatctatgcctccgacctactttcctctccgttgggagagcaccggcgatcagtggtggtacgctactcccattgattatgctgccgccaacagccagtacgacctagtccgtgagcttctccgaatcgactccaataacctcattaagctcacttccctccgcagaattcgccgcctcgaaaccgtctgggacgacgattcccagttccacgacgtcgccgcttgcagatcacgcgtcgccagaaaacttctcgccgcctgcgacgaaggcggctcgccgggatccaagaggaacactcttatccgctctgggtatggtggctggctgatttacacggcagcctctgccggagatctagcgtttgttcacgatctcctggagagaaatcccctgttagtgttcggcgaaggagagtacggcgtcactgatatactctacgcagctgccagaagtaaaaacgacgacgttttccgtctcatttatgattttgcggttactccgaggtttggaacaggtggcatcgagcagcaaaccggagagattccggcggcttacaaatgggagatgaagaacagagcggttcactctgcttcgagaggaggcaatctgatccttctcaaagaacttctctccgattgttctgttgaacatgtcttggccttccgagacaaacagggctccactatcctccacgcagccgccggaaaaggacaaactcaggtaagtgtctccggccactgctataactaaaatatcaatcgatagatgaacaaaattacggatcttggtgattatgatgcaggtggttaaagagcttgtggcttcatcataccatttagttgacgctgtggacaaccaagggaacacggctttgcacgttgcagcttaccgtggccacgctgatcttgtggatgttctcatctcggcatctccatctttgatctccgccagaaacaacgccggagatactttccttcacgccggaatctccggtttccagactcctgcgttcgaaaggcttgacaagcatacggagctcatgaaccgtctgatcacttccgcagcctcgaaatcccaaggggattttgtaaattataggaacaatgagggacgcacggctcttcacttggccatctctgggaatgttcctctggagttcgttgagatgcttatgtctgtgaaatccattgatataaacatacgtgacaacgctggtatgactccgcttgatctgatcaggcagaagccgctgtctccaacgtctgatctcctgttccgacgactcgtatcagccggagggatgttcagttgtcgtgatcaaagcatcacaagtgtcgtcgcgtctcacttgaaggacagaggaaacttttacagccctggagctcgtttcaagacatcggacgctgagatgttcctaagcaccagacttgaagttgcgcctgaaaagattggtgttgttgtccctagacacgtgagatccagttcctgttgcattgagattggtcagctaaacgtgatggatgagaatcatcatctcaagaaatgcagaaacgcgtctgttaactctacaacagagagattgaagagcgttttccactggccgcgagtcaagaaacaacctggccattccaagaacaattctgatattagcatcatttcgacaacacttgagacgcaagaaactcctgtccctctccgtcagagattctcaaaaagcagcacttcttcccttgatccgcctaataacaataaaagaacgttggcggtaagaagtaaccagtctagtcccagagccaagaagaaacggtttgggtcggtgcggtcacggtcgagctcattctcgaaaatatccatccactcttcttccacttcttcgacttcgagcatggttgatcttaaacagaagggagtgctgattgatacgagcatagccggaccatctggattgaaacggtcagagccggtgaaaaataaggtaagcgagaagcagggttcggtgaggagtagattgaagagccattacttctgctttggtacttcagctttgtcagtgaaaacgccggctactgtcttggtataaaccaggttattgggtatagaacaaaaccggtttgtatttagtttggtcttctaaggtctcttatgaaataatgaaatttgttgggttatttcaagccacgcgccaacgatgggcgtatgtatttgtaccagggtggcacccactagctgacttggtcatggatcttactttgatcaatcttcctatcattgacttgaagaaatgttttacattgaaaccgtttgttttgttacacggcaaacgtaacaagacaaatcagactaataaaaactttcatttaaaaaataactttcatatgcaattagaataaacaataatcagaattacagaaattgtccaatagtgacataaaatcaatatacaatagcttaaccaatggagtcatt

SEQ ID NO: 146949 - DNA, 353 bp, Arabidopsis thaliana landsberg
gtggttccgcagccgttaccggttgaaatgtcttcgtcttcggagatccacctacttcgttgagtttgtcactacctggagctgagaacacgagttcgagccataacaataacaacaacgcgttgatgtttccgagatttgagagtcagatgaagattaatgtagaggagagaggaggaggaggagaaggacgtagaggtgagtttatgacggtggtgcaggagatgataaaagctgaagtgaggagttacatggcggaaatgcaacggaacaatggtggtggattcgtcggaggattcattgataatggcatgattccgatgagtcaaattggagttgggagaatcgagtag

SEQ ID NO: 146950 - DNA, 1718 bp, Arabidopsis thaliana landsberg
gaaacaaaacgaattttcttatgattgaattcacaatcgaatcaatgcaagtgataatcgaacacacgagactacattgttttcagtctctgtaaggttaaattctttgggcaacaacacagtggctgctgtatttatacgaggagaaggagaaagagaagagaaaggagatatttttattctctttcccagattttgtaattcctttgttaaagccattagagaacttttgttcgcaaatttgataaacctttgttcctctgttgtatcttagttaattgaaagttaaagatctaaactttctcctccaatggtcttctctcgattcttcagagtcaccggagtgaatctctctcgacgtgtgaactctcgaatctcttcgtcttcgtcaccgagtctcgaatcgattccatggattcataaagcttcaaactttacactttacggatcatttcacgcttcttctgttgaaacccaagtttctgctaatgatgcttcgcaaaacccccagaaaatctccaagattctcaccaaattcacggattcaaaggttgaaactttgctgaacgaagcttctgttaaactttcaccagccttaatcgaagaagtactgaagaagctaagcaacgctggtgttttagctttgtctgtattcaaatgggcagagaatcaaaagggtttcaagcacactacttcaaactacaacgcattgatcgaatcattaggtaagatcaaacaattcaaactcatttggagtttagtagacgacatgaaagcaaaaaagcttttgagcaaagagacatttgctcttatctctagacgttacgctagagctaggaaagttaaagaagctataggtgcgtttcataagatggaagagtttgggtttaagatggaatcaagtgattttaatcgtatgcttgatactttgagcaaatctagaaatgttggggatgcacagaaggtgttcgataaaatgaaaaagaaaaggtttgagcctgatattaagtcttatactattctacttgaaggttggggtcaggagttgaatcttttgagagttgatgaggttaacagagagatgaaagacgaaggttttgaaccggatgttgtcgcttacggtattattatcaatgcgcattgcaaggcgaagaagtatgaagaagctattagattcttcaatgagatggaacagaggaattgtaagccaagtcctcacattttctgtagtttgattaatggacttggctctgagaagaagttgaatgatgctcttgagttctttgagagatcaaagagttccgggtttcctcttgaagcacctacttacaatgcgctagtaggtgcttattgctggtcacagcgaatggaagacgcatacaaaaccgttgatgagatgagattaaaaggggttgggccaaatgctagaacttatgatataattcttcatcatttgattagaatgcagcgctcgaaagaagcgtatgaagtttatcagacgatgagttgtgaaccgacggtgagtacttacgagatcatggtgaggatgttttgtaacaaagagagattggatatggcgatcaagatttgggacgagatgaaagggaaaggtgttcttccaggaatgcacatgttctcaagtttgatcacagctctgtgccatgagaacaaattagacgaggcttgtgagtatttcaatgagatgttggatgtgggta

SEQ ID NO: 146951 - DNA, 934 bp, Arabidopsis thaliana landsberg
tgacgaggtgtttgagacctctccaaaatctgaaagtagtcctgtttctttgaaagatcagttgaggaagaagacatatgaaggtagtgactctggtagtggatctcagagaaactcaacagagcaaaagcctagctacttaagtagcagcaaaaaagtacgcaaaccagatcaatcacacgaaaggacaagtgcaccgtcacaaagtttgacacaagataatactaaactcactgacaatgattggacagaacttctgagtactccaaatcagaggaccagcacttctacgcctcgtagtcctggtggaacatctgcgattcggggattgaagaaggatggaaaaagacatgggaatttggggaaaaatcctttggtatctgatggaaagaagagtagtagtagtaatgtggttaattccagagggaggccacaaaaacagacgaataaggaaccaagcgacaaggaagtgtctagcccttctgatgctgacatgaaaaataggaatgctcctcgggatatatttgtgaactcaactcataaagagagtgagaaggatgtcagtggtaagacacctcccctggatgactccagaagatcggctaatgagactctccctagggaaacatcaccaagtgtaggaaaaagggatggtcgtgagtccagaagaagttctgtatggggaaagcaggtgagggaagaagtctcacagagcaatgtttctgatggtctaacgaggaaggaatcttccttgtcaagtgatgaatctgaatccgattatgagtctgattcgagcactgactctgagagagagcatcagagggaggagcgtaggaggagaagagagagagtttttgctgaaaaagttgcaacaaaagctgtagcggtcatcaaagagcgagagaatatggtaccaagactagagggtgagaaa

SEQ ID NO: 146952 - DNA, 497 bp, Arabidopsis thaliana landsberg
tgttgatttcctctcacctggctgtggtggctgcaaggctctccatcctaaggtatcaatccaacttcttgattgttttggtacagtattgatgaaatgaacaagttttctaacaatgatggtttatgattgttgcagatatgtcagtttgcagagatgaacccggatgtgcagtttcttcaggtgaattacgaggagcataagtccatgtgttatagtcttggtgtccatgttctcccttttttccgattctaccgtggctctcagggtcgtgtttgcagctttagctgtaccaatgccacggttcgttctcattcttataatccatgagacaatcaatgaaaaaaccatcttaggttcgattttgatcttgatttgttttatctgtttcagatcaagaaattcagagatgccttggcaaagcatggtccagataggtgcagcctcggaccgaccaaaggccttgaagagagagagcgtgaggcactggcagccat

SEQ ID NO: 146953 - DNA, 1096 bp, Arabidopsis thaliana landsberg
ttcgagaggggatttatgtatggtgacattgtagcggtccgccactgaaccatcaggacagagtggcagggttatcaacatagacatgtttgtcaatctcgaaagtactcatgggaagatcatgaaggaagttgataccaagaggcttcaaaagttgcgttctatttcactctctgattatgtgattaacggaccttggcttggaagggttgacaaaatagttgagcgtgtctctgtcacccttgatgatgggaccaactatgaggtccttgtagatggtcaagataaacttgtggccattcccccaaatttactcgaggattctcaatattcgtattacccagggcaaagagttcaggtaaagctggcccatgcccccagatcaactacatggttatgcgggacctggagaggaacccaggttatgggaactgtttgcactgtagaagcaggacttgtctacgtcgattgggttgcctccatcgtaatggagggtgatcggaatttaactgcacctcaagctttgcagaatcctgagagtttaactttgttaccttgtgtttctcatgcgagttggcagcttggtgactggtgtatactccctggctcttcccactgtgatatagcagagcggcaaactccaaatgtggctgcctacaatctcaacgaatgccataagacattccaaaaagggtttacaagaaatatgcagaactcaggtttggatgagctatttgttatcacaaagacaaagatgaaggttgctgttatgtggcaagatggtagctgcagtctgggagttgattcccaacagctgcttcctgttggtgctgttaatgctcatgatttttggcccgaacagtttgttgtggaaaaggaaacctgcaacagcaaaaaatggggagttgtgaaggctgtcaatgctaaggaacaaactgtgaaggtacaatggacaatacaggttgagaaagaagcaacaggttgtgttggtgaggtgatggaagaaattgtcagtgcatatgaactgcttgagcaccctgattttggattctgtttcagcgatgtggtggtcaagttacttccagaaggaaaattt

SEQ ID NO: 146954 - DNA, 841 bp, Arabidopsis thaliana landsberg
agccctagtcagaattcaaacatttggcaatgaaatcatacaaacttaataaccctaatctactcatctccacgcacacacataataaactcttcttatcctcttctccattcaatctcttattctcttttccttccttcatataccttaaacagcaacgttctctgttcttcttcttctttttcttcctctgtttttctttcacaacttccatgttggactcggacacagacacggactcaggtcctgtggttgcaacaaccaaactcgtcactttcctccagcgtgtgcagcacacggcacttcgatcataccctaaaaaacaaacgcctgatcccaaatcctacattgatctatctctcaaacgtccctacagtctctccaccatcgaatcagccttcgatgatctcacgagcgagtcacatgaccagccagtgccagtggagacgcttgaaaagttcgtcaaggaatattttgacggtgcaggggaggatctgctgcaccacgaaccagtagatttcgtctcagatccctccggcttcctctccaacgtggagaacgaagaagtcagagaatgggcgcgtgaggtacacggtctttggagaaatctgagctgcagagtctctgactcagtaagagagtctgccgaccggcacacgcttctaccgttgccggaaccggttatcattcccggttcgagattcagagaagtctattactgggattcttattgggtcatcaagtaagtcattgtttccaacttttaaatcacaaatcaaatgttttttgttttttggtattaaattgatttcctctcctttcgtgttgactacgtaacaca

SEQ ID NO: 146955 - DNA, 1225 bp, Arabidopsis thaliana landsberg
tgataaaagaaacgatgcttatacggtcgaaacgacgtcgttttaatatactagttatgttttctcaggttacctaacgacgacggtgcatggaatgaacacgcagttaaaaacccagaagaagtagctgcaatggtcgatatgtaagacctctctctatcctcatttgttattatataagtatatggtttttatgcaaaaatgtaacatattttaattagcaattaatatacgttatgtacatctcactttcataataataataacgtttcagatagtcaaacgttgtgtgattccttaacttttaatttacataggaaacaccaaaaatataattaaattgcacccataatgttcccataaatgtttaattctatactcttttgatttaaacctctttttagaccagaagttttgtacaacttgtgtgtctatatgtgaatgtgacacagacacgccgtgatcgccatttaaagcgcctctatcgtcgctatttttttttcccaccgacgcaaaattttgtaattaatgtatacacatttttgtccataaaatatatcagattctttacgttctaacatttatttaaaacatcacaaaaatagaaagttaaaataaaattaaaaagaatgatataaaaaagtttccgtatggtccgtatcatatgattccgtataaatggtttacatttattacaccacatggttccttcttctcctccacgtgatttttgaactccaagagggctttaatgtgaaatcaaaaacttcacgggtcaatttgtaacagtttaataactctgttctctttttgttattttcaggaaaataaaaacttcacgggtcaatttgtaacaatttaataactctgttctctttttgttattttcaggaaaataaagaacagtacagagcggaggaggttaggattcttctcatgcgccaccggaaacccaatagacgactgttggagatgtgatcggaattggcatctccgacgaaagcgtctcgcgaattgcgcgatcggattcggtcgtaacgctatcggaggacgagatggtcgttactacgtagtcacagatccatctgaccacgacgcggttaatccacgaccaggaacactccgtcacgctgtgatacaagaccgtccgttatggatcgtcttcaagcgagacatggtgattactcttgaactcacagagctaatcatgaacagcttcaaaaca

SEQ ID NO: 146956 - DNA, 1065 bp, Arabidopsis thaliana landsberg
attaagagagagatggagaactcagtgacccaagatggtatcgcgacagtattagccaatcaatcccttgattcctcctctgttagacccgaaattgttgttcaagtcgtggatcttaagcctgctggaaatcgatatacgtaagtttcgatcttgattttgtgtgcatcgatctgggttcttctgatatgtttagaaccaaacttgttatagaatagggtttgagatctgggtattgttagaattttgccatgtctcagtttttttttttttttttttttttctgggatctagtttcaggtctgtgttagctttaatcaaattcaatattaactggtcgatgaagtatcttgacatgtgatttgggttctcaggtttagtgccaatgatggaaagatgaagattaaagcaatgttaccagcgactttgacttatgatatcatctctggaaagattcagaatctgggtcttatttgtctccttgagtatgccgtcaatgatattccaggcaaatcagaagaaaagtaataataataacaatctcttatgcatctttcatgattaatgattttcaagcaaacagaaactaacctttgttttctttatttgccacttcagatatatgcttataacaaaatgtgaggctgttgcttctgcacttgactcagagattaaggcggagattaaagcttccacaggcataatgttgaaacccaagcatgagtttgttgccaaatcagcttcacagattatcaatgagcaaaggggaaagtaagtatatctttttttaacttctgtttgtttcatagtctctgtcgaagttgttgtaaatgttgcttaaacaagtctctgtggtttttgtagtgctgcacctgctgcaagaatggctatgaccagaagggttcatcctcttgtgtccttgaacccttatcaaggaagttggactattaaagttcgtgtcactaacaaaggagtcatgagaacttacaaaaatgccagaggagaaggatgtgtgtttaatgtggaactaactgatgaggaagtaagactatctgatgatttttc

SEQ ID NO: 146957 - DNA, 498 bp, Arabidopsis thaliana landsberg
gacatgcaatccataaaattaacctatctgccaaacacttaaaaaatcaactcttgagatgggacttttgacaaaaccaaacctctcctttgtactcatcatcctactactcggcttctttgcagtctcttacgcttccgttcctcggaaactaaatccacatcaacgcatcggtttcttgaagcccttcccgaaagtcttcaccttcaagcccttaccaaaagtcttccccttcaagccctcaccgaaagccttcctccccaagccgatcccggttactccaaaaccagtcccagttaagcgaccacgaccaccaactcctgagttcgatcctccacctgacgtagccccacctcctccccctcctcctccaggcttcttcaagcctcggcctccgccggatactccaacaccaatcaccgtcaagcctccaccagatactccaacgccggtcattgtcaagcccccaccaacacttccaacagtccactaacctct

SEQ ID NO: 146958 - DNA, 721 bp, Arabidopsis thaliana landsberg
aaagctgagtcctcagtaaagccagtgttgagtatgaaactaaggtgcaagaagcgaactgggagttgtacaataagcaaaagcaagcagaagctgttctttacgagaagcagaagcaagcggaagcgacgaaagctgcagctgatgctgccttctattcaaaacagaaagatgcagagggacttgtcgcaatggccgatgctcaggggacttacctcaagaccctcttaggcgcagttaacaatgattactcagccatgagagacttcttgatgatcaacaatggcatttatcaggatattgccaagaccaatgctgttgcgatcagggacctgcagcctaagatcagcgtgtggaaccatggtggtgctgagcaggggatgaacggtggtggtaaagctacgatgaacgatattgctggactctacaagatgttaccaccggttcttgatacggtttatgagcagacagggatgcagccaccagcttggattggtacattgcgtggtgctgagcccaaacaatcacttcatgctcaacaacacagaggttgagatctcaaatgttgcttctttaattatacttttagctgttggggtttgttttctttttcttatgttatagaacttggaagttagcgtttgaagttaaaacaatagtatctgacaaatgcgacttcgactagtgatttcgataaggatgtgtttttcctttttcaaat

SEQ ID NO: 146959 - DNA, 773 bp, Arabidopsis thaliana landsberg
aaagcttcatcttgtggaagattttcgggtcacacctatgtagcttcttgatttaaaggacacgtgggtaaggaggaatttcgggactgtagaaccagataactattggtatggagtatgtgaaggggagacagaatctgttgtgcaaaggccttggaatctattgtggaaatctaaacgactgatggagattgtttctgcggttgcttcgaggttaaactgggattatgatgctattcacattgagagaggagacaaggctagaaacaaggaagtttggcctaatcttgaaaaggatacttcaccaagctccattttatctaccctccatgacaaaatcgaacaaggaaggaatctttatattgcaacaaatgaaccagaggtatctttctttaaccccttgaaagacaagtacaaaccccattttctggatgagtttaaggatctctgggacgagagcagcgaatggtattcagagacaacgaagcttaatggaggaaacccagttgagtttgacggttacatgagagcgtctgttgatacagaggtgttcttgagagggaagaagcagattgaaacattcaatgatcttaccaatgactgtagagatggaatcggcacttgcaacgtagcagcaagctgatcgctctggtaagtatttcaaaagcttgttatcagagacagttgtttgtttgtaggttgatagaaaacttgaaccatcttgttccacttgtttccactttggtacttatagaatagctgtttgtatgttc

SEQ ID NO: 146960 - DNA, 1419 bp, Arabidopsis thaliana landsberg; identical to SEQ ID NO: 56911

SEQ ID NO: 146961 - DNA, 594 bp, Arabidopsis thaliana landsberg
tgctatggtaagcaattcagtttccccatgaagaagaagtagtcttactcttgtgcaagatgactgttagttcttataacctttttgatattgcagataatggactatgagtctctcccacatttctgtagaagagaagggtctggatctggtaggcatatctcaaatggaacagtagacaattgtttctctctggatcactctttccaccaagacctttatgattatgtcaagcagcaggctctggttaaaggatcaggtgcaccgatcagacatggttcagtccacgttaagttccctgagccagacaccgaaggcaacaagatcttcgataccttagaaaatgagttccagaagcttggaaatgaccagaagatctgagtgatctacaacccttataacacgaattgcccataagaaaccggaatttgtctctggttgatgagcagcatttaagataagaatcaatcacctttacttgtattactagtttcgcttgcatcagctcgatgcaggttttgtttaaaaagaagatggaacacaatttcctcggaatggatcttttgatctagtaccattatatatatagaactc

SEQ ID NO: 146962 - DNA, 1220 bp, Arabidopsis thaliana landsberg
aatctaaccaaaggcattgtgcattggggttggaggtggtggattgctaagtttcttaaggctacagttagggttcgaagttacaggcgtagagatagatcctgaagtcttgaggattgcaaggcaatacttcgggttagaggaaagcttagctcgtgttcacgttgaagatggtattgagttcttaaagagactttctaaaagctgtgatgatgatgccagatttgatgtcttgatggttgatctggactctactgatccaattcacggcatgactgctcctccggttgagtttgtggctaaagatgtgttgctagctgcaagaactgttcttgttccttctggggttttcattatcaatgtcattcctccgaacaagacattttaccaagagcttcaagaccagtttagacatgtctttgccgagttgtatgagatcgatgttggaaatggtgagaattttgttctcatcgcaaccgttgcacctagaaagagcggtttcaacagagagaatctaacacccgctgtctcgggaaagtatcttgatgctatacagaaaatctgaatcattgaaacagaagttttcattgcaaactttaaagtttagttattgatccaatatcaagagtacaacagaacagatttctattcaaaaaaggttatcggaaaagtgttgttcagcttcagcttttagtcttcttcactaaacttgatcctcttcgggactggctgtgtgtttccaacctgaagcagtgacacaaaacatgcagttattagttcaatgttgaagatgtagtgtatagaattgtgtaatcggaaacttacaagctcagggcattcgtattctattccagcggctacgattctcttcctccttttctgatcctttttaactatcttctgcaacattttcctatgctcttccaatgtcctttcctgtatacaacagtgacataaatcaaagttagagccacttgttcaagagaaatggcatattgataacaagaaaagtggagagaataaccttattaagttgtcttcgctcaatctgaaccgaatccactggtttgaagttacatttaaaccctctccacctataacattcaggacatagatacattaagatccacaactacttgaaaagaacaattctcaaaataggtcatgcatgttctcttctggaaacacttgagagtctcgcacatcttttagagtatgga

SEQ ID NO: 146963 - DNA, 1239 bp, Arabidopsis thaliana landsberg
aaacattccttattgttgattccttcgactcttagaccagtcttgatcacttcttactacagatcagttttttccaacaaggtactttgccctgcgttacaaaggatggaaagtttattatggagacacctttcagtgtatgtacaattaaaaaatgacaagcactcacttttgttttcagtactcacttaatgagtttaattacatatcattaacagctagctaaagctccagatggtaacggcggagtctatgcaggtatgtttactaaattttgattctgttttttactatcatacatatgttctattcaaaccgttgctgatgctgatccgagatttttacagcgctaaaatcttcaaggttattagaggatatggcttcgagggggattaaatatgtggattgctatggcgttgacaatgttctggttagctctctagtgtaatctttattcgagaactttctcaattcttctcaacgttgttataatatggaatcctggaaggcaggttcgagtagctgaccctacttttctgggatacttcatcgacaaaagtgcagcttcagctgcaaaagtagtgcgcaaggtatattcagatacctttctaattcattggttccatgaactattctatattcagttttcaccttcctgcaattagtttctcccgggccaaatcatagttaagtttttaagcgagtagcttgttatgaaaacaggcatatccacaggaaaaagttggagtatttgtaaggaggggaaaaggtgggcctttgactgtagttgagtacacagagcttgaccagtctatggcttctgcaactaatcaacaaacaggacgtcttcaatattgctggagtaacgtaaactcctccctctttataagttttcgaagttatacttagatcattatttccggtactattgcgattgttccatttttgtgcaacttagattgcttatttcaaatatttttaaggacagtgagtgtttttgtggaaaaggcatgtgtttaaagttcataatgtaagtcgaaaacgatgtttacttttcaggtgtgcttacacatgttcactctggatttccttaaccaagttgcgaatgggctggaaaaagacagcgtgtgagatgctttttactgaaattttatcctgcaatatgcaaacatttgacatattcaataactgatagcgaatctcttgcagttaccatttggcggagaagaagataccgtc

SEQ ID NO: 146964 - DNA, 2038 bp, Arabidopsis thaliana landsberg
atgaagggttcttcagaatctagttccagaggattaaacaacacctctggtgtttcagagttttgtacagatggttctaagtctttgtctcacattgattatgtcagaagcttacttggttcacataaagaagctaacttgggaggacttgatgatgactctattgtcagagctttggaatgtgaggatgttagcttgcgtcagtggttagacaatccagaccgatccgttgatgcctttgagtgttttcatgttttcagacagattgttgagattgttaatgcagctcactctcaaggcattgttgttcataatgttaggccttcttgtttcgttatgtcttcgtttaacaatgtttcgtttatcgaatccgcttcttgttcggattccgggtctgatgaggatgcaacaacaaagtctcgagagattggtagctcgagacaagaggagattctatcagagagacgaagcaaacaacaagaggaagtaaagaagcaacctttccctatgaaacagatattagcaatggagatgagttggtatacaagtcatgaagaagataatggttctctgtgtaattgtgcttctgatatttaccgtcttggtgttcttctctttgaggtttgtgcgtaagaagatttgatttttgttcttaactgctttgttttcttgagaaaactgatttgatgaatgttagtctttgtgcagctattctgccctgtctcctcaagagaagagaagtcaagaactatgtctagtttaagacatcgtgttcttccccctcagatattactcaattggcctaaagaagcttccttttgcttgtggttactgcatcctgagcctagctgtcgaccatcgatgaggtgatgattgattctctctttgatgtttttagtttcaattggaaaagttttgtcctttaattaagagtattgtctcctttgtctttacttttgcagtgagttgctacaaagtgagtttatcaacgaacctacagagaatttggaagaacgtgaagctgcaatggagctacgggatagaatcgaggaacaagagttattactcgagttcttgtttctgattcaacagaggaaacaagaagctgcagacaaattgcaggatacaatatcgcttctctcttctgatatcgatcaagtcgtaaagcgacagttggttttacagcaaaaagggagagatgtccgttcgttcttagcctcaagaaaacggattagacaaggagctgagaccactgcagcagaggaagaaaatgatgataatagcattgatgaggaatctaagcttgatgatactctagaaagtacacttcttgaaagctctagattaatgagaaatttgaagaaactggaatcagtctactttgcaacacgatacagacaaatcaaggctgctactgctgctgaaaaaccgttggctagatattattcggcattgagttgtaacggtagaagttcagaaaagagttcaatgagccaaccatcaaaagatcctatcaatgattctagacaaggcgggtggatcgatccattcctcgagggtttgtgcaagtatttgtcttttagtaagctaagagtgaaagcagatttgaagcaaggagacttgttgaactcgtctaaccttgtttgcgcaattgggtttgatcgtgatggagagtttttcgccacggcaggcgtcaacaaaaagatcaagatattcgaatgcgagtcgataataaaagatggccgggacattcattaccctgttgtggaacttgctagccggtctaagcttagtggtatatgttggaacagttacattaagagccaagtcgcatcaagtaactttgaaggcgtggttcaagtaagttcagaagaaaactctcaaccttattaatcaatgaaaagtatgaaaaaaaatcttataactaaggctaatattttcataggtttgggatgttgcaagaaaccagttggttacagagatgaaggagcatgagaagcgtgtatggtccatcgattattcatcagcagatccaaca

SEQ ID NO: 146965 - DNA, 1545 bp, Arabidopsis thaliana landsberg
aacggtatgacaccgttgcaccttgcggtatggtactcaattaccgctaaagagatctcgactgttaagacactgcttgatcataacgcagattgcagcgccaaagataatgtatgttcctcctctgtgattattggtttcttttgttttagggaattatgatattgtttgtgtaatagctgtgggagtttgtatttacaggaagggatgacacctttggaccatctgcctcaaggacaaggcagtgagaagttacgtgaattactgcggtggtttctccaagagcagaggaaaagaagtgcgcttgagcaatgcggtaagacaaaagccaagatggaactacttgaggatgagttatcaaatattgttggattaagtgagctgaagacacaactgaggaagtgggcgaaaggaatgcttttagatgaaaagcgaagggctcttggactaaatattggaacccgaagacctccgcatatggcatttcttggaaaccctggaacaggtgaaaggatagtggtttatgattatacttctctgtctttaaatcaaaccaatacatgactgcttttgttgatccaaaacacaggtaaaaccatggtagctcgagttctcgggaagctgcttaacacggttggaattttaccaactgataaggtaacagaagtacagcgtacagatttggtgggtgagtttgttggccatacaggaccaaagaccaggagaaaggtgaaaacactgttcataatcttctgattttacttgtgggtttggtttcaagaatctaaaactttcaatttctggacccatcccagaagctgagggaggaattctgtttgtgcatgaagcatacagattgatcccgatgcaaaaggcggacgacaaggactacggtctagaagctctggaagaaatcatgtcggtcatggacacagggaaaatcgtggtgatatttgcgggatacagtgagcccatgaagcgtgtgatcgcatcaaacgaagggttttgcagaagagtcacaaagtttttcaatttcagcgacttcagtgccaaggaactggcgcagatactacacatcaagatgagcaaccaaggagaggacgctctgttctacggtttcagattgcatgagtcctgcactctgcaggagatagcgtcactgatagaggcagaaacaaccgaaaagcagaggaaagagatgaatggaggattggtggacacgttacttgttaacgcgagggagaatcttgatcttcgacttagctttgagtgtgttgacactgaagagatttgtacaaacaagttggaggatctagaggccggtcttcgagttttctcgcagtgaaaagaaacttctgatggctaataattggttagtattacaaattgtattgattcaattctttacatcatatattctttatgtttttgtccccctcaagatcttgaaggagaagaggctttggtttcaacttccattgtttgatcaaatctatttctgttgtataaaactatattgatattttgtcttttcacttttctcat

SEQ ID NO: 146966 - DNA, 648 bp, Arabidopsis thaliana landsberg
tctaccaaaagggcacacacacgctaactcttcttcgggtttcattcttcaaatccttccaaatcattaagtaaaatcaatcctctttttttttttgttttgaaaatcaggagtttgataagatgaaagcaaaggcccccgagaacttcagggtggattacgcgataagcagagaacaagcgaacgataaaggagagaaaatgtatatccagactcggatggcacagtacgcagctgaattatgggagttgttgaagaaagacaacacttttgtttacatgtgtggactcaagggaatggagaaaggaattgatgacattatggtctcattggctgcaaatgacggtaagaagagctaataaataacactccaattcttgaaacatccattgcataagcaataacactctaatgactttgtgatggttttaggtattgactggtttgattacaagaagcagttgaagaaggcagagcaatggaacgttgaagtctactgatcaaaaagcctttgacatttctgtagcaaagtatagctgaacaaaactgtaattttcgcttccgaatttctgtattttgaagataagttttttagatatgttatactaaaaaaagagttctttaatcattatcatttacttcttccca

SEQ ID NO: 146967 - DNA, 1130 bp, Arabidopsis thaliana landsberg
  unsure (1)..(1130): unsure at all n locations
tcttttgtgttacaaacaggatcaatcatacagagattctgtggtttatcatatttttctccctttttatgcactgatgtgttgcagccccccagactcctgctgctgccgcggcggttcctgctaagaaatggctcacccttaatggtaagtatccttctcaatccccatattacataacctgctctttgtttgtttctaagaatccgtacctgtcttttatcttccaggacaagagcctgccgttgtggccagagggggcttctcgggtcttttccctgagtcaagcgcctctgcaaacgacttggctattggcaccagctcgcctggcctcacaatgttgtgcaaccttcagatgactaaggacggtgtgggcctttgcttgtcagatatcatacttgacaatgcaaccaccatatcttcagtcttccctaaagcccagaagacctacaaggtcaacggtcaggacctcaagggatggtttgtccttgattacgatgccgacaccatcttcaacaatgtcacttgtatgtcttcttctctttcatttcatcccttcaatgctcaccaccacgaccacacattttcatcttttatgttattgtgcagtggtccagaacnnnnnnnnnnnnnnnnnnnnnnnnnnnnnnnnnnnnnnnnnnnncgcagtggaggacgtccttggaaccaagcctcccaagttttggttgagcgttcaggtatgttttcttctctttgagaacatgattaaccaacatatggagcttttttgttgattcatcaaaacaacaaacaatgcaaatgtgcagtacgatgccttctacatggaacacaagctgagcccagccgagtacctgagaagcttgcgattccgcggcattaatgtcatctcatctccagagattggtttcttgaagagcatcgggatggacgcgggcagggccaagacaaagctcatatttgagttcaaagaccccgaggcagttgagcccaccaccaacaagaagtacagcgagattcagcagaacctcgcagccatcaaggcctttgcttcaggcgttcttgtgcccaaagactacatttggcccattgactcagctaagtaccttaagcccgccaccacttttgtg

SEQ ID NO: 146968 - DNA, 3338 bp, Arabidopsis thaliana landsberg
gttgatttgctgagagggcagaagacagacagagtggatgtcagcttacagccagaagagctggatgctatggaaaatgttttacctgccaagtatgaggaggcaagagaagaggagaaattgcgcaataagccagtggacttgagtgacatggtcgtcgaggtaatgactttctttatatttatatctctatttttttcaacactattgatatgaatgcggatgaataatcaaacgtttacttggtggaatgtttaacagcatgtgcagcagaatagtaggaagaggaaaatgcatgacaaggaagggaagaagaagaaagatttcaaattctgaggtgttctggaagagacacggaaaaggattctggattctggacatgagagagatagggagagattcttgttccagagttattagtctttgagtcagagatcttgagttttagtcttaatgcttatgagattctatactatgttgttatctgaaggcttaagtaaaactttgtttttggaatttgaacaaattcaaagcctgagacttggaacaaaaaaagtggggaaaaaaggctttgttttgtaagcgacgtcttgtttttcaaattgtccgagtactttcagcgtttatggtttttaaaagattgatcattcggtctacagaataaaccgtcgatgtgatctatttcagtgcaccttgttatctttaagcgaggcaaaaatatgtacattttcacgacattcgctcctgaaaccaaattatgttcatatgttactgtcatatgcatagtgtgaactaattcataggcatgatccttgggttgttcaatccctgcatgtgatgaaaaaaacttaacatactgtggattttttcaatgatgtattctattacttttccaatattaggcgacaaatgattcgaccacacctcattccgggagagtaatgaaacagcgacaaatggccaattatgccactcattgtcctaccgggctaccaccatttgcatgagcatgatgactcgtagagtcgtagggttcctaaatcgcctttcttcacctttctttcaacattatctatttatcttcttttcaaatctcgcttattaatcattatacataggcctctacatggtagacacatttagaaacaacaagaagtctctccaaatatgaatggttattcagcctacaagcgatgtcagaatttttttaacacgtagttaaaagtttaactttgctagacaaaagaaatctaagattaatataaacataagaaagtatatatgcttgaaatgagacaaatttagctttaccacttaaaggttttaagctaagtggattccgcttctacaatgattaatgtttgtcattttggtttctgtttacaatgagtttcacatacatactaattaaactactaagtactagccattataaaacatgctgaaaaacgagtcacatatggttcatcgtaccataacacctttggattcccactactaaagagattcaactatgggtggtcactatctattttatctataaagtgtgaaatcctatttttcattcaaatcttaataattataacaaaagtaccattacgagaggattggttttagtttggtaagttttttttgaaccaaccaaaattgaatacaatgtacttcagtgataaaaccaaatattaaccgaaagaaaaactgaaacaaagtgagattgttttgagtttgacactactctcaattattaagccgaaccaatccaaatccgagccgaaattcgaatttaacccaaaagttcatcccaaatggtggtggagtcatgaaacgtgaattgaaagatgaataatagatgaattatttactatatatacaaccatagaggcttctatgccaccacacacttctcacttaagaaaatgaataactctttacaaagttctaaacttgtgcttctattggctattgctttggtcctatttcttaacacggagctggattttcttacagctgctggagccttagacagtgatagcaaagtattcaactaaaaatacctttctctatttgcaaaaatctctaagagttaacggattttaaattttgttggtactcttgtttcgcggattttataggtttatatagtgtatcttggcgaaagaaaacacgatgatcctgaacttgtcacagcttctcatcaccagatgcttgaatcacttcttcaaaggtattatacttgaatcatcttttaaaaatttctactaataatgatattggacaattacctattgaatttgtttatatgtacagtaactattcattaaacttgtcatatatacatgtttaatgtttattagttaaaacatttattcaggcatctgttaggttgataataatatattacatacgtttcttgtcacacaagaaactcattagcccatactctgtttttcttcacagaattgaaaccctcctctgttttaaactttgtttgttatgacttatgagctcatatttcacttttacatatcatgttatatacagcaaagaagacgcacaaaactccctgatctacagctaccaacatggattctctggtttcgcggcgcttcttacatcatcacaagctaagaaaatttcaggtactcaacaaaactcaaactcacatttaaggaatattcgtatctttgactctgaaaacaaagtttctaaaccagaatcttgtaaataaacacagagcatccagaagttatccatgttataccaaaccggattcggaaacttaaaaccacaagagcttgggatcaccttggcctctctccaattccaacttctttttcttcattatcatctgtaaaaggtcttcttcatgacaccaacttgggcagtgaagctatcatcggtgtcattgattccggtatctaactctctccttctctaactctaactccctccctctttccttggctcacatcatgtatgtatgtatatgcagggatatggccagagtcaaaggcagtcaacgatcaaggccttggaccaatacctaagcgttggagaggaaaatgtgaacctggagaacagtttaacgccacaatacattgcaacaacaagctaataggagctaggtactatctaaacggtgtagtcgccgcaattggaggaaaattcaacagaacaatcatccaagatttccaatccaccagagatgcaaacggtcacggtacacatacagccacaatagctggtggctcatttgtccccaacgtgagctactttagtttagaaacaaggtactgatatatatatatatatatatattatttcaccacagaagttag

SEQ ID NO: 146969 - DNA, 677 bp, Arabidopsis thaliana landsberg
ggacaaagttaactttgcgatgctaaatgtggacaacacgaaatgggagcaagagttggatgagtttggtgttgagggtattcctcatttcgccttcctcgatagagaagggaacgaataacgtaatgtggtcgggaggctcccaagacagtatttagttgaaaatgtgaatgcgcttgcagccgggaaacaatcaattccttatgcccgagccgtgggacagtactcaagctcagagtctcgtaaggtgcatcaggttactgatcccttaagccatggataaagagagtggcatcactatcatgcttctggcagatgatagaagttgtttctaactctatagtgcacaaaaaaagtagacaggaaaggaaagtcggaaagtggcaatgtttcaaattgatcaaaagaatcccattggaactataaatgttgatatcggtttgttcttgtttgacaatgcttctctcctatgcctccaatatcaactctctcaagccacttacacaaagaagataagtcaatcaacaacgggtttgaccataaagtttcaaaccaaaccagaaaaaatctttaaagatgatacaacatattcgttttaagacataactaatctgactccgaagattcgaaaaactgaggattcagctcagataccatttttgacagattctccctta

SEQ ID NO: 146970 - DNA, 617 bp, Arabidopsis thaliana landsberg
ctgcatgtatgtaaaaaatggatctccatgtagtgggcttgtgctttcgtagctctttgatccaatcattgtccccgttgtattggttcaaggtcttgctaatcttcaccagttggagacttggttcccttttctaaaaggaatattaaatatgtaagtaaagccctatttagataaagatggttcttcgtttcaattgaacaattacaaaatcttcttttttttcttatgattgcaggaaaatcgtgagtcaagtgattacgggatatcttccgagtctcattttccagcttttccttcttatagtaccacccattatgcttctactttcctcaatgcaaggattcatttctcatagccagattgagaaatctgcatgtatcaagcttctaatctttactgtatggaacagtttctttgcaaatgtactgtccggatctgccctttatcgtgttaatgtgttccttgaacctaagactattcctcgtgtgcttgctgcagctgtgccagcacaggtaaagaacacaaaattcagtattgaggtttaaaaaattcccttttcgtaccacgagtcatgtttattgtttaatctttggtgtaggcatcgttctatgtat

SEQ ID NO: 146971 - DNA, 1005 bp, Arabidopsis thaliana landsberg; identical to SEQ ID NO: 32999
  unsure (1)..(1005): unsure at all n locations

SEQ ID NO: 146972 - DNA, 1070 bp, Arabidopsis thaliana landsberg
  unsure (1)..(1070): unsure at all n locations
ttcgtcatggacctagttccagagctatgtatatagatcgatactctgattttccacttttttgcataggncgattgcgtgggctgctgatcctggaagccttccaagttttaaatatatggctttatttggttgcggagcattacttcttagaggtgctggttgtactataaatgatctgcttgatcaggacatagatacaaaggtcagtttgtttttaagctatcttatggtatggtgataaagtgatgtcaaatttatatatccctttagtatgttggtttaggaaacatgttttgtgtaactatggtttctgtaaccatggtgggaaagtgttattgctttgacatctggaactggtcttgatttttctatgttggatcaatttacgacaacatttccagtcatatctctgttttgggtaatagcttatctgcatgttctgatgacttcgttcaaaaagtgaaagacttcaggtgttagatatggtgaaggtggaatatgtttttcgattgaaatatgtgtttagtagttagggtagatacacagcattcatgtaactggattcattcttccataaacaaagatgggttgcttgtatgtaaagctcaagattttgtatggttgttttgttttagattatgttgtcttacaaatttcttttatatccaggttgatcgtacaaaactaagacctatcgccagtggtcttttgacaccatttcaagggattggatttctcgggctgcagttgcttttaggcttagggattcttctccaacttaacaattacaggtttgtttggattttttacttgccctaaagtcgcgtatttgcaagtgtttgtttaaaaattcacatacacatatggttcacccttatgtagttggcccaaattctgaagatatgttctcaggtcttgtctttagttttgtgatcaaattcttttctacttgagctcatttcagtatgtatattctgcagccgccttttaggcccttcatctttgttacttgtctaatcctaccaacttatgaagaggtttacattttgggtaatttaagtcttttc

SEQ ID NO: 146973 - DNA, 350 bp, Arabidopsis thaliana landsberg
atttattgaatgttctttgaagaagaagaatgcgacgacacaaaaaccttgcatttgcatccatggcgtcgatgccgagcaaacttcttccagtcctagtctgctacgtttttcttttcccctttgcatcatcatctgattattctggggtatctcttccatcttcgtcgcctaaagtctcggtgggcctgtactacgagtctctctgtccctactgctcttccttcattgttaaccacctcgcgaagctcttcgaagacgatctcatatcaatcgtcgatctccatctctctccgtggggcaataccaagctccgttccgataacgtcactgccgttgccaggaactcc

SEQ ID NO: 146974 - DNA, 440 bp, Arabidopsis thaliana landsberg; identical to SEQ ID NO: 30909

SEQ ID NO: 146975 - DNA, 580 bp, Arabidopsis thaliana landsberg
caaaaactccggaacttatcaacaagattgaaagttacctcaaagtacactttacttttcctcatcaacaaacagagaactcatcaaagacattaactcttcccaagtctcctgagaaactaaaagctatgaatttcccaatctccacgatcaagattggcgactgtgtcttcgttgccaaaaaccctgatgacattgtggccaaattctattttgcaaagaagaaacttttatgggagtttctcttcggagaaccagaggctaacatgccgaggctgaagagtaagatcgagattcaatggaatgatgtctcatcttttgaagagagtattaattcacgtgatgaaactggaatcctcaaaatcgaggtactatttaaagatacttgtacatttcgaaggttatgagctttgactaatgatctttgagaatgtttatgtgcagttgaaaaaacgttcaacattcttcacagagactaatccacaggcaggaaaacacactcaatggaaacaattggattacgatttcaccggagatcaggcttcttattacaggtttcctgctttaactgaaatcattt

SEQ ID NO: 146976 - DNA, 628 bp, Arabidopsis thaliana landsberg
attattaactaactatcaaattaccaatataattattcacgtttaaggtacgaccaagccaatagccaacggagttgtgtaccgagaccggaccggtcaggctcacagagcttacctaaaggaaggcgccttgagtgagatcatcctatcggccggaaccctagggagcccacaacttcttatgctaagtggtgttggcccatcggctcaattacaggcccaaaacatcacggtggtgatggaccagcctcatgtgggtcaaggcatgtatgacaaccctatgaatgccgtgttcgttccttctccagtccccgttgaggtctcactcattgaggttgttgggattaccggggaaggaacatatgtcgaagccgccggtggtgaaaattttggcggaggtggtggtggttctagtggatcgtcctccactagagactactatgcaatgttttcaccaagggcaacattattagagtcaaattcaatgaccaaattatcatcagcccaaccttttcaaggaggcttccttttagagaaagtaatgggcccattatcaacgggtcatttagagctcaagacccgaaaccctaaaagataacccggattgtgactttcaactatttccaac

SEQ ID NO: 146977 - DNA, 986 bp, Arabidopsis thaliana landsberg
gctgtggacagactttccagagctctgaattctttccgacactaaaatcggctgaacatgccgctgcaaaaattgcagttgcttctttgacgccacaaagtccagaggctagttcctcacactctttttggactacaagttatgtgctttttcaacatttgtttaaattttgattttcaaatttttgttgtttcagggaattgatgttgcctacaagaacctgttacaagaaattgcacagaaagagagttctctgttaccattttatgcaactgctacatctggtccatcgcatgcgcctacttttacttcaactgttgagtttgctggtaaagttttcagtggagaagaggcgaaaaccaaaaagttggctgaaatgagcgctgctaaagttgcattcatgagtatcaaaaatgggaactcgaaccagaccggatcgcctactttgccttgtgagagacaagaagatgtaaattcaaatgtgaagagcagtccacaagagatccattctcaaccttcttccaaggtggtgatgacccctgataccccatcaaaggggattaaagtgaatgaagatggttagttttctttgaatactacactacatgaataatccgttggtttgtttgttaaaggaaaaactctctttctttgttataacttgtggtccaatcagagggacgtattttcctgagataggtaggaaacagctatgaaataagaaagccaaccttactttaactgcatgaaatggattccaatttcactttaatgctaaatggtcaagatggttaattcattcaaaactcatgctctacagtcttgattctgtgcagaatttccagatcttcatgatgcaccagccagtaatgctaaggagattaccgttgctttgaatgagcctgagaatcctacaaaaaatggaactcttagtgcactaactactgatggtacgaagatgaacattgcttcttcttctttgccta

SEQ ID NO: 146978 - DNA, 1462 bp, Arabidopsis thaliana landsberg
  unsure (1)..(1462): unsure at all n locations
gtatggtgaagaaactaacaggtggctataagatcaaataccacgctaatggttacgataaggagccaattgaaatcgacttcactcctccattcaggttagtgaaatatctttgttggtcaagacagagttcttcttggtggatttgggaatgatctgatatttctttatttctgtaggaggattgacatgattgtagatttagagaagatggccaaccttaatataccaaaagacttggctagcgaggaagctaacaagtatctggttgatgcctgtgagaggtttgatgtcagatgcccaccccctctgacgacagctcgtttgttggataaagtaagtttgttatccccttatagtattgaattggaagttatgtgattagttcatatgctcgtttaagatatctgtaatgttttcactgtgcagcttgttggacactttctggaagtgacgtgtgttaaccccactttcataatgaaccaacccaagattatgagtcccttggcaaaatgtnnnnnnnnnnnnnnnnnnnnnnnnnnnngatttgagttgttcgtcaaccaacatgaagttagcttttatataagaatcgagatatttttatttggttagtatagttcctctctactaaactgttttatttggctgcagctttgtaatgcctacaccgagttgaatgatcctgtggaacagnnnnnnnnnnnnnnnnnnnnnntcaaggtatatttgaatccttaacctccctctctatatatatatgtgcgtatgaattatcattttgaaaccttgatgattggtttcaggatcgacaatctggagatgatgaagctatggctatggatgagacgttttgcacggcgctagaatatggattgcctcctactggtggttggggaatgggaatagataggctttttatgttacttaccgactcacagaacattaaggtccctcttttttttctgaagccagtctagagaaatccaatggagtagtatatatgttgtcttactaatgttctcaattttgttgcaggaggttctcttcttcccaacaacgaagcctcaggacgagccagttgctgcaataggtaaaaccaaagttaattctcaaatatacttcacttgagtttatcaaaaggttaagccaaagatactaaacttaagtttcttatgatttcacagctcctgctgggggagagagggtggtggactaaggaaggagtttgcaaaacttatgaagaaacattgtgcatctctttttggtaaagccaaatatattagaggacgaggactccgtagttagtgttttagtttctgtctctgtttggagattgtgtagaatgttttagtgttattattaaacaagtcacttgaaagatttttggattcatactgagaagacccaaactatgttgcaagctctacttatcagaatgtttaagaatattgagtttgac

SEQ ID NO: 146979 - DNA, 639 bp, Arabidopsis thaliana landsberg
cattgttgacaactttcttgacatggcttggttatatccaactttctcagcttccttggcttgatcttttaaaattcgttttgttcgctaacttctctatcgttgggatgaacgtcagtctcatgtggaattctgttggcttctaccaggtctgtcctttttcatctcgatgcggatttacgttttccttcgtttaaagttttttttagtaagatcttgaaacgagtgtgttggcattgcagattgcgaagctgagtatgatcccggtttcttgtcttctagaagttatgcttgacaatgtcaggtattcaagagatacaaagcttagcattttgttagttcttgctggtgttgccgtctgtactgtaaccgatgttagtgtcaatctcaacggatttctagctgccgctattgctgtctggagcaccgcgcttcagcaatacgtaagtagtgcctgaaacgttaatctattgtcaaatttggtcagatcttggtcaaattcatcctgatatcgtgatcctgatcccacacattcattgtatatcatctaactttacttgtaaaccgaaaaggaaaatctgttttctaacaattgtaactacaccctgctgcagtatgcccatcacccaaaacggaaat

SEQ ID NO: 146980 - DNA, 1207 bp, Arabidopsis thaliana landsberg
caaacacaacaatggggttttgagaaattccggaagactcaaaaaacgtgtttttatatttatttgtaaaaggatttatttgtcccaaaacaatttccatttttgtaatttgtcataatgggaaaaggcgcaatcaaagaagaagagagcgaaaagaagagaaaaacatggcgatggcctttagcgactttggttgtcgtgtttttggcagttgctgtgagctctaggacgaattccaatgtcggtttcttcttcagcgatcgaaattcttgtagctgttcacttcaggtttttgattctactctcttaaattctcaatctttttgctttgatcacagatgaaagaatttgactttaagattctcaagtacattttcgtgatgttaagtttgttgggtattgagaaaaattgtggatatttgttatcttatggattcatgataataaatattgaatctttttgatcacattgtttagccaatggattcagggtaataaaaattgaatcttttgatgacattgttgagcgaaagctttgaatcgttgtccctgaaatgtgccactgatttattgcaggatgtgtgattatcaatgttgttgtaagattcactctttcagtggacttaattgtattgatcaggatttgattttttcgtctttctgattttcctttgggatattatacagaaaacaggtaaatacaaaggtatgattgaggactgttgctgtgattatgaaacagttgacaatctcaacactgaggttttgaatcctttgcttcaagatctcgtcacaactccatttttccggtactataaggtcagtgagatgctttagaatccgattatgtcgaaaaactatgaagttgtgttctgtagtgtagttagtgacttttggctggctgtttttttttttaaatgttgggtaggttaaactatggtgtgactgcccattctggccagacgatggaatgtgtcgtttgcgtgattgcagtgtctgtgaatgtccagagaatgagtttccagaaccatttaaaaagccatttgtcccaggtcttccttctgatgatctcaagtgtcaagagggaaaacctcagggagctgttgaccgtactatagataacagagcattcagaggatgggtcgaaaccaagaatccatggacgcatgacgatgacacagatagtggtatgtagttaccaaaacaa

SEQ ID NO: 146981 - DNA, 657 bp, Arabidopsis thaliana landsberg
  unsure (1)..(657): unsure at all n locations
gtcgaagttggattgtcgtgantcacttctttatcagctctctcgcctttcagtatctttgctgatatatgcaacatcatagcaatgtgttttgttgtcaaagaaaatgtggaaatggtgattgaaggagacttctcgtttagtgatagaactgctatttcgtctaccattggtggtttaccttttgctggaggagttgcggtgttctgttttgagggttttgcaatgacgttggctttggagagttctatgagggaaagagaagctttccctaaattgttagctaaagtgcttgccgggattacgtttgtctatgtgttgttcgggttttgtggttatatggcttatggtgatcaaacaaaggatatcatcactcttaacctcccaaataattggtctgccattgctgttcaggtaaaattatgccaattctaatgtttttacttcttctgggaacctatgtttctcgcatttcattatgattatagattcatatgctctgttcttgcttatgataaccattttcaatagatttgtgtggaaacttgttaatcatttgaattcaacactttttctgttgtttttggtttaaacagaatgggttatgtgtgggattgacgtttacatttccgatcatggtacgtccgcttaacgaaa

SEQ ID NO: 146982 - DNA, 660 bp, Arabidopsis thaliana landsberg; identical to SEQ ID NO: 58339

SEQ ID NO: 146983 - DNA, 1021 bp, Arabidopsis thaliana landsberg
tcagatcaactatcaactatacatagtgaatgcatgtcactgtcagaataatgtacgtcgacaaaaattttatagtactgtcagttttatttgtgaacatggaatttgcaataaaacaatacaatacttaatggggtataaatgtataatattaattaggatacattttcaaggaacaataattttgtgtgtgggaatatttaggaaattgaaacctaacatttggcatatatatggctagatccttacagcttttgctatcttcttccgtgtctgccctgggttcttcttatcttaatatttgtcgccttgtctgaacaaagatgtatacgagtatagaaaattagagataactctccttgctattatttaatttataactttttcatgttcgattgtttttattctaattttttgtggttgtttcatttttgtgtgggcatctagatacaagaaaactattaacatctagatacttaatttacgtgaactattgtagtgtccgtgtggcgaacgaattaggagctggtaatggtaaaggagcaagatttgcgacgattgtatcagtaacacaatcgttgataatcggcattgtttttttgggtgttaataatgcttctccataaccaaatcgcatggatcttcttcttggagtgtagccgtcttagacgccgtcaataaactctcacttctgctagctttcaccgttcttcttaacagcgttcaaccggttctttccggtacgtaacaattttacttacttttataaaccgagtcaacgtttttggttgacttttttctttggcttactgagtaggtgtggcggttggatcgggttggcaatcgtacgtggcatatataaacttggaatgtaactattgcattggtgttccacttgggtttctcatgggctggggttttaaactcggtgtcatggtaatattcccgattttcttcaactattcattttatatttaaatagttttttttattcagtggaataatgatttgtggtttaatt

SEQ ID NO: 146984 - DNA, 965 bp, Arabidopsis thaliana landsberg
  unsure (1)..(965): unsure at all n locations
tgtcctccattaatctaagggatgacatcgttatcttgcacaggatgatgccagtaaaaccccggcttctgcacgacacaaacgtggctgcaactgcaagaaatcaaactgtatgaagaaatactgtgaatgctatcaggttttcctttcatcgtctattcatattgtattcaatatttttctgtgtaagttatattcaatggtctgatttagatactttgttcctaatgatcttgtagggtggagtcggctgttccatgaactgtagatgcgaaggatgcacaaatgtattcggcagaaaagatggttagtattcgtagctccattttccattactgtttataaccccagacccaaagtcttttgatttaacgttactttaatctcagggtctttacttgttatcatggaaagcaaactagaggagaatcaggagacatatgagaaaagaatagcaaaaatccaacacaacgtcgaggtgtcgaaagaagtggagcagaacccaagttctgatcaaccttcgacaccactgnnnnnnnnnnnnnnnnnnnnnnnnnnnttcaaacaatatacaaacaaggcagctactgatttgctgtttacctttgttctgcagacatttggtggttcatcagccattcttgtctaagaacagactgcctccgacacagttttttcttggcacaggttcttcctctttcagaaaaccaaacagtgatttggcgcaatcacagaatgagaagaagcctcttgaaactgtgactgaggacaaaacagagattatgcctgagattctcctcaattcccctatagctaacatcaaggccatctctcccaacagcaagagagtctctccccctcaacccggctcctcggagtcaggctcaatcctaaggagaagaggtaatggccggaagctgatactacggtctattccagcatttccttctctcaacccaaatcag

SEQ ID NO: 146985 - DNA, 883 bp, Arabidopsis thaliana landsberg
agccatgcacaaaagctccaacggtaagtaaacacatctccatgtatatgtattgattgattaatttcttcacatctaaactacgtgaacgtttgatattgatatttgcaagtgggtgtgtttatgcaaacgcaggctcttactttatacaatttaaagaatttgaatgtgaagaatctgagggtgaaaaatgcgcagcagattcagatttcaattgagaaatgcaacaaagttgaagttagtaatgttgagatcactgctccgggcgatagtcccaacacagatggtatccatatcactaatactcaaaacattcgagtctccaactcagatatcggaacaggtaatgattcatatattgttaacttagtggtgtatatatgtataacaaatgcatgctaaggctaaactaaggatgttagctatcatttattgattcgtaaataatcagaatgttcttggtttgcttctatataggtgatgattgtatatccattgaggatggaacgcaaaatcttcaaatctttgatttaacttgcggccccggtcacgggatcaggtaaatcaaaacatatttttttttctttcaaatcctaatataagagtagtgaaactatattatattttaaagtattgatgttaatttgatggttcttacaattcaatgaagtaagtatataaactaatatattgatctttgtttaatctttatgatgagaagcattgggagcttgggggacgacaattcgaaagcttatgtctcgggaattaatgtggatggtgctaagttctctgagagtgacaatggagttaggattaagacttatcaggtggctgattttgattatcttctcaaacactccactcaaatttgcaccatatg

SEQ ID NO: 146986 - DNA, 1322 bp, Arabidopsis thaliana landsberg
tttttttttcctataatggatccttgagttttataatttatttttatattcggaccattctctgaggtatataaaatgacaggcaacccaacttgacggcattaggtactagagtgtatgtgagaattaaatgaattaggtgcacacacaaagcgacgttgatattaccataaatatctttttgttgactatttgatcgttgaccagggacgtgagaaaccggaagacacgaacccgcctaaggcgtttaacatatgcaccataatgtacaccagcggcacaagcggtgatctaaaaggtgtggttttgactcacaaagcggtcgcgacttttgttgttgggatggatctctatatggaccagtttgaagataaggtaacccataattacttcaaaggaacagtagacacttttcaaccaaaattcaaataaattctgagacatagaaaaatttagatattttgacatttataatgataactactaataaaatcgtagagaacaaatattatctgattactattgattaatcctctgtttacttatgactaatcctctgttttctttgggcggattagatgacacatgatgatgtgtatctctccttcttgccgttggctcatattcttgaccgtatgaatgaggaatacttctttcgcaaaggcgcttccgtcggctattaccatggagtatgttaacctctctttttttgatggagtatggagaaagaatctaagagaattcatattttgatttgtgtagaatttgaacgtgttacgtgacgatattcaagaactgaaaccgacttatctagctggagtaccaagagtgtttgagagaatccatgaggggattcaaaaggctcttcaagaacttaatccaagaaggagattcatcttcaatgctctctacaaacagtaagcaacttttcatcttttttgctctgttttcttctaacttctctgttttctaatagcttaaccttgcaaaacaaaatgaatgatgtagcaagcttgcgtggttgaatcgtggatactctcatagtaaagcttcacccatggctgatttcattgctttcagaaaggttaatagcagttgatataatggttttttctttgtatttttggagcttttgtttaggtttatcgtcatcacataaacctgacttttagaggttttgtttttctgttaaagattagagacaaattgggaggtcgcatccggttgttagtatccggaggagcacctttgagccctgagattgaagagtttttgagagttacttgttgatgctttgtcgttcaaggctaccggataatact

SEQ ID NO: 146987 - DNA, 645 bp, Arabidopsis thaliana landsberg
gcaatggatagttggggtgattgggttgctaacaatgtttatcttaacaaaaagcgagttttcttcggggcaaggtctcctacacatcaatggtaacaaaaatacttatcccctgttctccatcaatatgattgattctactctctttattattttcgcattaaaaccgagctgttgtaactggtcaggagccgagaatggaacccgggaagcgaaggaaactgctacggggagaagaaaccaatataggaagagagttattggggaagtgggtcggacattccgacaatgaggatggtgaagagagttttggagagattgggaccaaaggtctcagttataaacatcactcagttgtctgagtatcgaaaagatggtcatccatcggtgtaccggaaattctgggaacctctaaatgaagaccggttgaaaaacccggcatcgtattctgactgtactcattggtgtgtacctggagttcctgatgtctggaatcaattgcttttccattttttgtgaaaatgaaatgaatataaccttaccttgatggccgaatatcacccataaattatataacggggtgattttagctagctataaggatccaaatttgttacatcccttgcctatagtcaggcgtcatga

SEQ ID NO: 146988 - DNA, 3051 bp, Arabidopsis thaliana landsberg; identical to SEQ ID NO: 30176

SEQ ID NO: 146989 - DNA, 858 bp, Arabidopsis thaliana landsberg
gatggtcaggaattctaaatcagagcttcgacagcttttgtttgtctggtaacatagatctttgctttgctaacgaggacgaagcagcagagctccttaggtaattgatgtttcttcatcccctgcaatgatctactcagggtttcttttaccctttctcttgagtccatgaaatactcttaagctctggattgtgagtttcaggggtgagcaagaagcgggtccggaggcagctcttgagttcctaggcagacattgcagatgggctgtggtaactttagggtcgaaagggtgcattgcaaaacatgataaagaggtttgtctttcctaaaaaacgtggtagcttataatgtagctttacatttcacttagccttaatttaactctttaaagttcatagcgaattagtattttcatctccttacgtgtgatcaggtggtacatatatcagccataggagagacagtagcaactgatgccacaggagccggtgacctattcgcaagcgggtttctgtacggactaataaagggattgtctttggaagaatgttgcaaagtgggatcatgcagtggtggatctgtcatccgtgctctcggtggagaagtaaccccagaaaactggcaatggatgcacaaacagttgcagttgaagggcttaccggttcctgacatccacaactgatgatatcaccatcagattgtagaatttcaaacaatttcgttgaagggccggttctgattcaagcagctcttagcattatgttgttcacagagattctcacagcatttacttcaatacacattgtgttgttttcaatctttttttgtgaaaaataaaaatgcgtttgtcagggtt

SEQ ID NO: 146990 - DNA, 758 bp, Arabidopsis thaliana landsberg
tctaccactgattaaagaagttgaagaaattctggtgagagacgaagatgtgtgtgagtgtgagctcgaagccctatccgacgaaatgtatccgacgagtttcgatcctaaatctgttcttgaagaatctgaatatccccaattgtcgtgaatctcaggaacatcttcgtctctgttcaggtacctgagcaccattctcatcagcggccgagattccggtttgtggtgacaacagagcaaaccgacggcgagagctagccttgcctctccttcgtcgtaaccagatccgagtctcgggtcgatcgcactgaggatctcaccgctcgcttgtagctccataacccagtcggctataaagaaggtcccagagtccgtcggtttcctcccggagacgatctctaacagcaaaacgccaaacgcgaaaacgtcggaagctgatgaggagtttccgttgcgggctagctccggcgccatatatccaatcgtgccgacgactacggtggtgcacgattgagatccgcgttcgtaaagcctcgcgagtccaaagtctcccaatctaggattcatatcggagtcaatcagaacattgctaggtttcacgtctctgtgaatcacgatctgttcccattcttcgtggagatacaacaaaccagacgcgattcctttagcgatttgaaaacgcgcgttccacgacaaaacggctccgcttcttctgggtttactggaaagcagcgagtccaagcttacgttgggaatat

SEQ ID NO: 146991 - DNA, 801 bp, Arabidopsis thaliana landsberg
catacagaaggtcgctgaagacttgggcaaaaatgatcgatcagaatgtgaatcccaaagagcagggtgtattttatcgcggatactcctctgcccattttcggtaaaccctgatcttttagttaccacccgaaagtgagttcatttcggtttcagcacttaggttcagattaaatttgttttttttatacgccacccccatagtatttacttttgctgcggttttcttacagaagagttaagttcttccgtgtattctgtgtcctgacttgaacaggggaggtgagtgggactcgggagggtcatgcaacggggaggtagaacctgtgaagaagggttcaatcatcgattcctatcctttgaaaatgaagatagtccaggaagccataaaggagatgcaagttcctgtgattcttctaaacgtgacaaagctgactaatttccgcaaagacggacatccatcaatctacggtaagaccaacacggatggtaagaaagtgtcgacaaggcgacaggattgcagccactggtgcctgccgggagttcccgatgtttggaaccatcttatctacgcatctttgctccttcaaccacattcttaaagttgagctcatacatcaacaaaattagatagaaagagaagagcagaaacaaatgaccagtccagtcttcactgttgtagtagtgatgtcaaattttgtgtaatttattgcccttggagctgataagtagttttttgttactttcatgtagaggtgtgaacaaacggaatcaggatgaaattttcagggttttttaatg

SEQ ID NO: 146992 - DNA, 307 bp, Arabidopsis thaliana landsberg
cgaaagctctcttcctttccctttttggcgctcaatacaatcatgacgttagagagttacgccggcgatgttcacacggtaccacaatcggagaactcgatggaggagagaggcggcggtgagcttttcgtgccacctcttaacttcgctatggtcgataatggaattttccgttctggttttcctgaacccgtcagtttcagctttctccaggctttgcgtctcaaatcatcatgtaatttctcttaatttcattctctttgtccttaaataggtcagcttcgtcgtcttaatcgcaaatagtcgc

SEQ ID NO: 146993 - DNA, 601 bp, Arabidopsis thaliana landsberg
agccgtcgaaaaacttgcatgctcatttcttacactagcaatactttccctactgtaaatctttcctctcctatttcaatatctcttcggtttcttctttttttgttgagctcgttgcaagagtagattagtgatctgcaaggtttttgcaaattggattcaggtgtagattttaggtcatggagctgtacactagaaattgatcaatttcgttacaactttttttgttttaagactttgagaatctaggccaaagtattgatcttgaagctactgtgttttgtttttgctttttataaaggatgattttgattataatgcgtaaatctgtgacttgtgattggtgtttcaggattatgtgccaactgttttcgacaacttcagtgctaatgtggttgttgatggcaacactgtcaatcttggattgtgggatactgctggtaattctttcgtttcaccgtttgggattttccttttgtttcggttgtttttgacttagtttgtgtttgtggggtttgttaacaggtcaagaggactacaacaggttacgacctttgagttaccgtggtgctgatgttttcattcttgcgttatctcttat

SEQ ID NO: 146994 - DNA, 980 bp, Arabidopsis thaliana landsberg
  unsure (1)..(980): unsure at all n locations
agaggaggagcatgaaagaagcttcaaaagaacaaagcttaagctttttcccccggaaaatttgttcccctttttcgaaaaactaataattcgtaacttcatagccaacaagatcaataaaaggaggcaacttatttctttcattctctcttttaaagagtacttgctaaaccctagcttttgttctatagagaatccaagaaccaatcactttaaaaagatgagcactcttgaagaatctttgagatctctatcgttggatttcctaaacctactaatcaacggtcaagctttctccgacgtgactttcagcgttgaaggtcgtttagtccacgctcaccgttgtatcctcgccgcacggagtcttttcttccgaaaattcttttgtgggacagactcaccacaacctgtcacaggtatagacccgacccgacatgggtccgtacccgctagcccaacaagaggctccacggccccagctggaattataccagtgaactcagtcggttatgaggtttttctgttgctacttcagtttctttatagcggacaagtctccatcgtgccgcagaaacacgagcctagacctaattgtggcgagagaggatgttggcacactcattgctcagccgccgttgatcttgctcttgatactctcgccgcctctcgttacttcggcgtcgagcagctcgcattgctcacccaggttctctctttctccctctgctttcactcttcttactccatgcacatcacaagaaaacaaaattgaaagtttccacttttttgttcttgttctgcttcttttagagtgttttctttcatgtgcttggcttaattttggtaaattacgaaacgcttttgattcgatttttatttgtctttctttgggtttgggttaacatttattacacatcgcgaaacccttttggtctgattattttctttcatgggggtcatntcgcttaaagatcttttaa

SEQ ID NO: 146995 - DNA, 258 bp, Arabidopsis thaliana landsberg
ttcttcttctctgcgtctttgaggcaagaaaaaaagagaagatgaaagcacccaacatggagacgataacggagtctctagagaaatcgatgatgaattgttctctgaatgatcggagaagaagggtcgtcggagatgggtttgggagatcgtcgagcaacgaacacatgactccgatctcagatagaacattggagctcaattctcacttatctcttccttgtcactgggaacagtgtcttgatcttaaggtaacct

SEQ ID NO: 146996 - DNA, 883 bp, Arabidopsis thaliana landsberg
ctttctcgcttatagcgagtttagatcttcttatcctctttggttttaatcatcgaagtcttcgattgtcttccaacttctctccgatatctccaattgctcgaggaataatatcttcgtcactctctttttgctcaaaatcgatgagcaacgaaggatcttagtctacatcaaattgggtgtagctggtggtggagcctccccggagttggtgcttcccggagaaattttaaagcgatttcatctaaacccggtagatttcggtgctatctcatacatgattgaagatcggcagaaggaatgaagaccccagcgttctagggctgacacgcgacggctaatcagcgcttgggagatgagcggcgaattacagacggtggtgcttcatgaaaagacgcgtggtttcaagggaaatacgtcttctccacgtgtcatatgctaactcataattatcatgatatgttaatgttaattatgtttttagtttgggccgtttaattcgcttgtactcttcttggaccctctgtatgtttccccttgggcaaataaatgaatttggtcgacaaaaaaaaaaaaaagaagaaatgctttttttgggcaggacagaacgtttaagtttttggatctgaccatgtaatggatggataaagctaaatatgtgggtggtgcttcaagagggaatactgggctagcagctgtgaggggagtaatgaggaatgaggcagaagactggtgcaagtgtttttcactcaaccttgggataagctttgctctggtaaccagacctttaggaagtatattatgggatgaacattacatgggaaaagggagttcaaaggctagaactcgaggtcgattcagagattgtagttggttttcttac

SEQ ID NO: 146997 - DNA, 1252 bp, Arabidopsis thaliana landsberg
cctttagctttgttatagagccaacactacagagagactcacacacttgtttcaataattaaatctgaatttggctcttcttataaactaatgtctgcaggtcttcttatctctctcactcaccaccatcttcttcctcgattgtcaaaaccctagatcgaaatcttatctctctaatctgttgttacagttcgtagagtcatggcgttagcatcaaccacgttgccgacgaagtccggattatctctttggtgtccgtcttctccgtctctcgctcgccgatttcccgctcgtttttctccgatcggttctagaatcgcttccagaagcctcgtcactgcttctttcgctaacgagaatcgcgagttcgtatatataattcttccaattttgattcttgcgttgatgaatttctatgcgattgattgtgtgattgtgttaggtttgtgattgttggtggaggaaatgctgctggttatgctgctagaacttttgtggaaaatggaatggctgatggtcggctatgcattgtgaccaaagaggtgattcaaatcgatcccttagtgttttcttcatcagtaacactattggttttactttgtttgattgttggatttgtggttgttattgttaggcttacgcaccttatgagagaccggctttgacaaaagcttacttgttcccaccagagaagaagccagctcgtttaccagtaagctttgccaactttaatgttttgattcgatcaatttgagtggttcttttagtgctattgctcttaattggctacatgaacattatggaatgagtaccggtagattgtttacagtgttacgattgttactgatatgaagatttgtatgatttagttttgtgatctctgtttatattgagggtggtcgtatatgcagggatttcatacttgcgttggaggtggtggagaaaggcaaacaccagattggtataaggagaaaggaattgaggtaattcatcttctgatacatagttttgttttctaaaatatatgaatgtaagtgaagtgtctttggtttgattaactgtacagcttggaatgtacgtcggtgaatttgtggtcttctcttgtgtcttactaatgcattttgtttggacaggtaatatatgaagatccagtggctggagctgattttgaaaagcaaacactcaccacagacgcagggaagcagttaaaatatggatctctaatgatcgcttcaggcagtacagccagctg

SEQ ID NO: 146998 - DNA, 1438 bp, Arabidopsis thaliana landsberg; identical to SEQ ID NO: 3462

SEQ ID NO: 146999 - DNA, 1916 bp, Arabidopsis thaliana landsberg
attccttgtcaaagagtttaggaaaatgattatgatactctgtttttatatgcttggatgagtgtagaaattttgcctactagtgttgcggatttcggtttgatgcaacgtttgcagatagagaaatctgttttaggactactagatgacataggtttgggaaccatctcttgtaggcagtacgatttgtatcctgacctagttagataattcatggcttctgttagggtctactatgtgaatgaaaagaaacgcaatgctcaggaaggagctctaatcttcttcatccgcggtgtcagatacagtctaccactcagagcattatgcgacatttatggctttgacattgatctcactggagtttcactgcctggacagtttaaggatgctcaggttttctagagcaggtttggtaatggaatttatgattccaaggacgcagtacactcagtgattcgtcaccctgttttgcgatatttggttacgctgatcaacagcacactcttatgcaagatggagcctggcaagatgagactttctgagttgttgttactttatcatgctattccaaatagcctcggatttgaggaggttaaccgtgatgtcaactttggcgttgtctttgctcatcactggtttctctcaagaacaagccctttacgggtaaaaggaaaaactctaagatagttggcagtcttctcactcctatatttcagcattttagcatcagctttgaaggagagaaggtcaacaccatgagattcaatatggatgagacttatttgaagaactctcactggcttaaaggcaacttactatggtgcttcagagatgatacatggcaacatatgatttagttaccttgccctgcgctttcagagattataggagagcatgaggagattagttttcatctcgatccttcccttctgcatttcgcgccacgctctaggagatagagaggttcagcttcaggatccgcaccaactcagactgaggataagtttatcgaccctgctgggggtcctcgagttggatcttcctcttcagctctcccatatgagctgccttctcctcctcctatcccgatggagccatatgtctttcagcaatacatcgtcgacaacttcaagagcgtctggaacgccatagctacactctctcgatacggttgtgttgcttccactcgtcgccgtcgtcgctctcccgcacccacctccggctcagagcatgaggactagccatcctccttatcttgctttgttttctgactttgtttttgctttatttcagactatttgttatttgttttgaaacttgttgcacttattttcctatgctttgttggacctgttgatgtgtgttttagtgattcaacagtctaactggaggatccatgtgaaaacactaaccaaggctctacaacaatgacctgaattcgcaaagctaagcaaaatgaccagagtgtcgatcgacacaaccatggtatcgatcgacaccactctcaggtggcaactcacgtttctctaacttttaacttttgattatttttctttcgattcctctagtttaataactatggggacagtgttatctaagtctgggggagtcagttactaacttcatcttttcttttcttatgagtcagttgtgtcattctaacttagatagtcgttttattgagtcaaaacttttgtctgaaattatgatctatctctcgagtttattgcatggatggtttaagtactgcagattcaaatcaatccgactaatggaaaatccagaaagccaatcaacaaacttaaggacatccattcccaacataatccacagaggctggagctaatctcactgctcttccttttacctcatcaaaacggttagtgtacataggacttgactgcttgttcatacct

SEQ ID NO: 147000 - DNA, 1850 bp, Arabidopsis thaliana landsberg
  unsure (1)..(1850): unsure at all n locations
caaaaatgtaacaaaaaaaacaaaacttcacaaggcaaaaaatccaaaattgagttttttttttcttcattttttacaatggtgtctcggtttcgtcttgctctagagtacttctaagtctctctgttcttacttcgatttcgatttttattctcttttttttttttttttttgaagacggatttggttggtggtttttagggctgttttgggttcgagacgacgtaagaagatggcgagtactagtagtggtggtggtggtggtggtgataagaagaagaagaaaggtttctctgtaaaccctaaagattataaacttatggaagaagttggatatggtgctagtgctgttgttcatcgtgctatttatcttcctactaatgaagttgttgctatcaagtctttggatctcgatcgctgcaatagtaatctggtttgttctaaatttgatctcttttagcttcagcatcaaatttgagtatgtgtattttgagttggggatctttgattttgggatacaaaattgagatcatgtgtagcttcactaaaaatcgaaactttgcttcgttgttgcaataaagctatcatcttttttgatgggcgatgaccaaattgtgttatcatcttctcattttgcgtttgcgtttctgttagcttcactaaaaatcgaaactttgcttcgttgtagcattaaagctatcatcttttttgatgggcttatgaccaaaattgtgttattatcttcccatttgcgtttgcgtttgtgttagcttcactaaaaatcgaaactttgcttcgttgtagcaataaagctgttatcttttttgatgggttatgaccaaattgtgttatcatcttcccattttgcgttagtgtttgtgttaacttcactaaagaatcgaaagtttgcttcgttgtagaaataaagctattatcttttttgatgggttgtgaccaaattgtgttatcatcttcccattttgcgtttgcggttgtgtttgtgttagcttcactaaagatcgaaactttgcttcgttgtagcaaaaaagctgttatcttttttgatgggttgtgaccaaattgttaccaccttcacattttgtgtttaggtttggttggtttaatcatttaagatcaaatgggattatgggagagttattagatctctctcttctttccctttttgtatttgtttcttgttcatgtgttttcgtttctgcgaatttaatgcattgttttggttattttagaatgatataaggagggaggctcagactatgactttgataggccatccgaatgttataaagtcgttttgttcattctctgtcgaccatagtctatgggttgttatgccattcatggctcaaggttcgtgtntgcatcttatgaagactgcgtattcagacggatttgaagagtctgctatatgttgtgtattaaaagaaactcttaaagctcttgattatcttcatagacaaggccatatccatcgggatgttaaggttagtgaaagtgaaaaaaattcagcttcatggatccatgtatgtaatgtattcaaaatttgttgtttctttgcaacttaggctggaaacatacttcttgatgacaatggtgagattaagcttggcgattttggtgtctctgcttgcttgtttgataacggtgataggcaacgtgctagaaacacatttgttggtactccttgctggttagttatttaacttctttctttttgtattttaaccatcactcttagattcaatggtttacatttaacctctttgcttctgttttgtaggatggcaccggaagttttgcagccgggaaatggatacaattccaagtga

SEQ ID NO: 147001 - DNA, 468 bp, Arabidopsis thaliana landsberg
gcacgcagaagcttcataacaaggcttaggctcacaaccaatgtgtcgcgttgaagctccagcaccgccgagctcaaaggttctctctttttgatttatgttcattctcatcatcacatttcattttcattgcttgatgtaatcgacttgtagataatataagaagatgtgtttgaacatcatgatcatattttgatgtattgttccaaacacagcaagtgaagaataagaaaagtagtgatgccaagtatgatgctatgggttgggtgattctagccattggtgttgttgcttggatcagtttcgcgaaagctaatgtgcctgtctctcctcctcgttaagtagactcgttaggagactttgatgaagtttttcaatttttgaggttttgacagttggagcttgttgtgtaagatttttagttgtactacgagtactttattattgaaagaagataaatgtcttttt

SEQ ID NO: 147002 - DNA, 581 bp, Arabidopsis thaliana landsberg; identical to SEQ ID NO: 68852

SEQ ID NO: 147003 - DNA, 1131 bp, Arabidopsis thaliana landsberg
tctttaagaaactaccatgctatataatgtcaagtgaaatggtcaggaggcaggtcactcactgcacaatttgtctgcaggtttgtctgcttcttggtttttatatgaattgattgaactatcatggccctttcttcatcttataccttggcatttacaggacatcaaaacaggggaaatcacacgaagcttaccgaaatgtgatcatacgtttcatctggtatgtgttgataaatggctcatcagacacgggtcatgccccatttgcagacaggcagttaaagattaaaacacgactgttgccgagctgtgtacatagcaaaaacacattatccttatatgttgttgtaacttgtaagtctaaaacccctttcttctgtatttttcctcatttcatttagagcaatctcagcttgagccataggtttcgacttttgaatgtatattgttgtagacatgaataagaatacctacagatgtattgaaaaaaatatagaactcgatcaagtcatgaactgatacatagttaattctaatattccttacgtgtctattgggcaactctgaaattcttgaccgtacaacatctattaaaggcaaaaaaagccctcgagactctattcatgtttcaatctttacagccatggaacaatgtcgcttgggaacagggctctattgatcttgctttcacacagtaaggctcatgggcagtcccattctcagctttgttcaacacccatggcttcaaccctccaaggccatgagcaacctccacgagtgaggaccataaacctgtgaccaccagcgcatcagaacaactcagaaggtatatctcagcccatgctctcttactttccatgttcctcggggttttttggtagtccttgtagctcggcttgtgaacgctgattatctctcccatcactgttgggttttcccaatatacgtccctgatactcttaaaataccctggagaagaagatgagataaacactgcctttgattttcggttcagaacttggcttgaagggagatttctttgtttgtcaacttcaggaagcagcttatgtctagttccacaagctaaaatctgatctatcaaatgctggaactgatcatttccagactcag

SEQ ID NO: 147004 - DNA, 696 bp, Arabidopsis thaliana landsberg
tcttcttcttcctcctctgtactctctctttctcacataaccagagcctctctctctctctctctctttgcttcttttaatctctctgtttctcttcagtctctgtgtatacccctttctctcctcctctgtccctctctctagcggcggactgatgcacatacctttgtattctccgccgtaactaacttacataatggggtgcatggtctctcacctcgtcggcaaattcgccttcttcccaccctctcctgccacttaccacctcaccaaaacccccgacggcaaactctccgccgtatcctccgcttactcctcctcctccacttttccctccgccggagacccatctctcgacgtcaaagtagtaaagacaagacgcggcaacaaagtcacagctttttaccttagaaaccctaacgcaagactcacacttctctactctcatggaaatgctgcagatttgggacaactcttcgatctctttgttcaactcaaagtcaatctccgagtcaatctcatggggtctctctctttctcgctcagatgttcataactcctaatacgtcgccgtttcgtatttagcatttatcttactttataaattgcttattgagatttcttgaaaatgattgttttaatgcttattggatcgttacccagattatcaagactatattaaattagcagatttgt

SEQ ID NO: 147005 - DNA, 494 bp, Arabidopsis thaliana landsberg
tggttcagtggaagctaaagatgttgctctgattgagtatgctcatttaactgaaagacctatagggggattcagtttggatacagggagattgaatccagaaaacatatagactcttcgataccgtggagaaacattacggtattcggattgagtatatgtttcctgatgctgttgaggttcaagctttagttaggaacaagggtttgttctctttctatgaagatggtcaccaggagtgttgccgtattagaaaggtgagacctttgaggcgtgcgttgaagggtttacgtgcttggatcactggtcagaggaaagatcaatcacccgggacaagatcggagattcctgttgttcaggttgatccagtgtttgaaggattagatggtggagttggtagtttggtgaagtggaatccccctgccactgttgaagggaatgatgtttggaaaatcttgaggacgatggatgttcctgtcaacacgcttcacgct

SEQ ID NO: 147006 - DNA, 1877 bp, Arabidopsis thaliana landsberg
aaatgtccgataggtatcgtaatcccccaacttctcgattcatcgaactcttcaattttgtgtctctttgattggtgataaagattgattctttcgtttctggggacgatgattcatttgatttcttttttgtaggatactgtgcaagttctttgtccatggctcgtgcttgaaaggcgaaaattgcgaattttcccatgactctaaggatccgcccaataatgtaatctaatctcttctcaagtttccttcttttgattcatcagtcccaaatatttgactcttggttgtataaattaggtttgcacattctatcagaaacgaatatgtttgtacggaagtagatgtagatacgatcatgtcagagctgcttccaatcttcctcttagctcagattctgagtctttagatcgctctatatccaccaccccctctaggcatttgctacaacaaggcgataataatgacggtgacaaatcctctaacgtctactgtatccaccctagagagtacccgatctgctcttttgctgcagctggtgattgccctcgaggtaaccagtgtccacatatgcatggagacctctgcaatacttgtggcaagaagtgtttgcatccttttagacccgaggaacgagaagagcatacgaaagaatgtgagaagaagcagaagcacattgaggctttgaaacaaagtcaagatattgagtgtagtgtgtgtttggatcgtatcttgtcaaaggctactccaggggaaaggaagtttgggctgttgactgagtgtgatcatccgttttgtatacaatgtattcgtaattggcgtagcagtgctcctgtttcgggaatggatgtcaacagtacgttgagagcttgtcctatatgtcgcaaactctcttattttgttgtccctagtgtggtctggtactcttctcctgaggagaagaaggaaattatcgacatatacaaggctaaactcaggtatagttactaactgcaataaaaacttgattttgagctggcttcaaatttgattttgcttagtagatacaatttgtgttccattccaatcttgcagatcaatcgactgtaagcacttcaactttggaaatggaaactgcccatttggagcaagttgtttctataaggtatgtattttcctctattctttattgtcaggcaaagcagcagacgaatgatttttagtcttactcatttttggtgttgctatatagcatgcatattctgatggtcacttggaagaggttgttttacggcatcttggttctcaagaaggagaaactgtaataacagacagtatcaggtctttacccaatatgatcaacttcagtcatcattcattgtcattagccttatcctctgataataataatgtgttactgatttcaggctatcagagttccttggtggcctgcagattttctaaaatattttttcccagataaatcgaatgtaagttccaaaatctatttgtaattattagagataagtgttttttcatgttttaaaaacttgaaatccatgaaaagtcagcttattggcttctcttttgtgactttctctcctaatacagaacacaaggtggtgatgacaacttaatattcttatcaaactcattttgattctgagttttgacaatcctcttaaataaggtgaagtaatgtttatttatctttatctttcagattatcgtactagaattttccttgttggctgattcaagctatcttcttattatagaaatgtagacatgctcagagaggataatagttaaaaagagataaggacacaggagaaactcaatgtaataatatttagatagggaatgttactctactacacaataatgtaaaaaaaaat

SEQ ID NO: 147007 - DNA, 1410 bp, Arabidopsis thaliana landsberg; identical to SEQ ID NO: 36926

SEQ ID NO: 147008 - DNA, 985 bp, Arabidopsis thaliana landsberg
  unsure (1)..(985): unsure at all n locations
cagttctcttctatcctctctttctccgcttctgtagcaatgtcaatgtggtaccctctaccttcttcttcttcctccactcactaaccaaatccagaatcaacaataatagaaaaagccctaactttctccgtcgatggctttcttcttctactttttctgcctcttgactctttcttctccttcttcttctgcttcctcttcaaactccttgacttacatcgtccacgtcgaccacgaagctaaaccctcaatcttccccactcattttcattggtacacttcctctcttgcctcactcacctcttctcctccctccattatccacacatnnnnnnnnnnnnnnnnnnnnttctccgctagactcacttcacaagacgctagtcaactcttagaccatcctcatgtcatctctgttatcccggaacaagtccgtcacttgcacaccactcgttcccctgagtttcttggtcttaggtccaccgacaaagcgggtctactcgaagagtctgatttcgggtcggatctagttatcggagttatcgatactggtgtttggcccgaaagacctagctttgatgaccgtggtcttggtcctgttcccattaaatggaaaggccaatgtatcgcttcccaagattttccggagtctgcttgtaaccgtaaactcgtcggagctagattcttctgcggtgggtatgaagcaaccaacgggaaaatgaatgaaacgactgagtttcgctctccgcgtgactccgatggacatgggactcacacagcttcaatctccgccggccgttacgtttttccggcgtcaactctcggctacgctcacggcgtcgctgctgggatggctccaaaagctagactcgccgcttacaaagtctgttggaactccggttgttacgactccgatatcttagccgctttcgacaccgccgttgccgacggtgtcgatgtcatctctctctccgtcggaggcgtc

SEQ ID NO: 147009 - DNA, 458 bp, Arabidopsis thaliana landsberg
aaagattttctgagtcaatatgtcccgggaggcaaaaaagagttcataagccgcgcagaatctgaagccaagagactttcagatgcaggtactgtattttctccttccttctttttcttttacttttacatttcctctcattctgaattgaagtcttatgaatgaagcttttggagcggatatgttgcatacaattggatatgtatacacaagacaagcagctcaagaacttgggaagagagctctttacttaggagttccatttgtagctgaatgggttaggaacaaaggtcattcttggaaatcacagattagtgcagctaaaggagctttacagttacttcagctgcaagaagagagtaaccggagattaaagaaagatgggactagtccaacaaatgagttagagtctcatattcagaccaacaaagaaacattgatgtgatctttgggaaact

SEQ ID NO: 147010 - DNA, 318 bp, Arabidopsis thaliana landsberg
cacaagttactggttttgaatttcagtgtgataatggacatttggcttgttcttcttgctgtcccaaactaaataacaaatgccctgcgtgtacttcgcctgttggccacaatcgctgcagagcaatggagagtgttcttgaatcgatcttgatcccgtgtccgaacgccaagttaggttgcaaaaagaatgtatcttatgggaaagagttaactcatgaaaaggaatgcatgttctctcattgcgcctgccctgcattggattgcaattacactagctcatacaaggatctgtacactcactatcgtattacccata

SEQ ID NO: 147011 - DNA, 232 bp, Arabidopsis thaliana landsberg
gagatggatcatcacaaaaagatggtagatcaagagggttttctcaaacaaagaatcgcgaaagcgactgaaaatttgaggagacaaagaaaggatagtagggagctagagatgactgaagtcatgttccaatgtttgattggaaacatggagatgtttcatttgaatattgtggatcttaatgatttgggttatatgattgtgcaatatctttaagattgtaatctgcatg

SEQ ID NO: 147012 - DNA, 850 bp, Arabidopsis thaliana landsberg; identical to SEQ ID NO: 32530

SEQ ID NO: 147013 - DNA, 886 bp, Arabidopsis thaliana landsberg
agggaggacacattacgggaagatgttgccagattttatattgctcaaagtgtcctggccattgaatccattcacagatacaactatattcataggtggcttttggaacttgcatgcttctggtgtaaactgtgatatttacatacaatttgattgacgttctgtcttctcacttttgcagggatatcaaacctgataacctacttttggacaaagatgggcacatgaaactctcggactttgggctctgtaagcctcttgattgtagaaatttaccttcaattcaggagaatagggccacggatgatgaaactatgtcagaacctatggatgttgatagatgctttcctgacactgataacaagagaagctggcgcagtccccaggaacaacttcagcattggcagatgaatcgcagaaaactagtatgttaatcttttgttggcgtatataaaattctcctctccccttcttttgtagctttatctccatttctctgatccctttatataccaaatgtgactggagcatgtagatagataaatcaaaaaggggaataatgaaaaccaaacatggtattcttcatattgtaggggagcggagaacacttttcaattatcacctgtactgtctgtttattaatttgtgtggcaagttggcgacaactgatgatagtgctctctgattggtttctcattttttgaaaggcattttcaactgtgggaacaccggactatattgctcctgaagttttgctgaagaaaggatatggcatggaatgtgattggttagtctttttcttgaacgtttatcatgtttagaatgaactataaccatggtgcatggtattttactctgttgatagtgctttagctatttcaatctc

SEQ ID NO: 147014 - DNA, 796 bp, Arabidopsis thaliana landsberg
cttccgaagatttttcttcctttctttcttgcattctcctccatgcaaaattggaaagccctaagacgacccccccccatccgccatcgtgcgacgtgaaaattggagaatctgattggctgaaggattattgaaattgaaagttattgtgatcgagttttgttttttcctgatggtggaagaagcacaattggatcctaaatcgaaatcgattccgaatgagaatttgaaatttggagaaagggctttgtctgccggaggcgccgcttttatatcggcggtcatagtcaatcctctcgatgttgttaaggttcgaaagtaaacaaatttccacactttttggctttggaaacttgtctgcgaaaatctgattttgagcttctttttattgtaataagcagacgagattacaagcacaggctgcaggagttccgtatcaaggctcgtgtcgtcttggttgtttcgacacgaattccacggtatatttgctaactgattcttagttttgaaatggattctggattgctaaagcattgatttttatcttctggttattgcatttgcagttggtacatgatttgagaagtaattctgctccagggatgtgtagaattactggctctgcatctgtatgctcagataatcagtacaagggaactcttgatgttttctacaaaattatccgccaggttagaacaattgctctgtttgattattgttggatattgaaattaagatggtattaagagctgcagtgtctatatatagagatatgtgtgaattccttttgtttttt

SEQ ID NO: 147015 - DNA, 811 bp, Arabidopsis thaliana landsberg
aagatggaatctgaaagactcgaatcacatcttctgaataagcaagaagaagaagcttcttccttcacttctggtcttcttctcagcacatccgtcgttgtcgctggatccttctgttatggctgcgccgtgagatctcttcctttctctctcaatttgctatccactgattttggatattacagttttagaatcctaatttcttcgtgcataattttcataactataacatactttgtagatgtcatattcgtcgcctgctcagtccaaaatcatggaagaactgggactttccgttgcagatgtaagcccacctgtgttcaatgttcatcatatagatcaaaatcatttttttcttttaagactctcaaaccggttcaataaaccagaccagtaacccggtttgaatggtctacttctatgttggccagtattcgtttttcacttcggtaatgacattaccaggaatgattccctccgtgttcagcggtaaaatctctgctctcgttggtcgtcgacaggtaattaaattatgtttcgtattcaaatgttattatgccactgtttttttttttttgtttttgatattgtaggaccttctaagatgacgtaatatacacgttatgatttgttcatctctttgatcgcagacaatgtggatcgcggatgttttctgcatctttggttggctcgctgtagcctttgcacatgtttgtttctccaaatctccatcttttaaatttatttttcacaagtttagtatttttaaataaagtgaacatttcaaaaaagtcgtttattttcaaggata

SEQ ID NO: 147016 - DNA, 1849 bp, Arabidopsis thaliana landsberg
gccattattggataacagttattcgtctgggttcagtgaagatggagcagaacgagttcatggaggcaataatgtacgttaatggtgttcgtagagttttgcctgatggattagctcacatgacgcttctcgaatatctcagaggtgcttttaactctatattattgatttcttcaaatgcttatatctaatctaagtttagatagagtagagaagccacaaattgtacaatgcagcaaaatttagagggttaggttgttgtgtggtgggattcttgaaaacgttttttgtttcctttagatttaggattgaccgggacaaagctcggatgcggcgaaggtggttgtgggtcttgcaccgtgatggtgtctagttatgaccgagagtcaaagacatgtgtgtgcgtatctttttctctcataggttgcatctgctttgcttaagtttaggccttcttatactgttcataccggaaacttttattgcaggcattatgctgtcaacgcttgcctagcacctctctactctgtagaagggatgcatgtaatatccattgaaggagttggtcatcggaaacttggcttgcaccctcttcaggtggggtttacttcttccagattttttttttctcatttctgcgatcctaattctccctatttctctcaggagtcattggcatcttcgcatggttctcaatgtgggttttgtactcccggttttgtcatgtcgatgtatgccttgttgaggtcaagtaaaaactcaccttctgaggaggagattgaagaatgccttgcaggaaatttgtgtcgttgtactggttatagacccatcattgatgcgtttcgggtttttgcaaaatctgatgatgctctatacagtggtttatcttcacttagccttcaggacggttcaaatatttgtccatctactggcaaaccttgttcttgtggatcaaaaacaacaagtgaagcagctacttgtaatgaagatagatttcagtcaatctcttatagtgatatagatggagctaagtatacagataaggagcttatttttccccctgaacttctgctgaggaagttaactcccttaaagttagggggaaatgaggggattacctggtatagacccgtatgtcttcagaacttgcttgaactcaaagcaaattttcctgatgcaaaactactggttggtaacacggaggtgggaatcgaaatgagactaaagaggttacagtatccggtgctaatctctgctgctcaagtcccagaactcaacgcattgaatgtcaatgacaatgggatagaggttggttcagctttgagactttctgaactcctgaggttattcaggaaggtagtaaaggagcgtcctgcacatgaaacatcagcatgcaaggcttttatcgaacaactgaagtggtttgctgggacacaaatgagaaatgttgcttgcattggtggaaacatctgtacagctagtccaatatctgatttaaatcctctttggatggcttcaagagcagagtttcggataatcaactgcaatggagatgttagatctatacctgcaaaagatttcttccttggctatcgtaaagtggatatggggagcaacgagatcttgttgtcggtattccttccatggacaaggcccttagagtatgtgaaagaatttaagcaggcccatcgcagggatgatgatatagctattgtcaatggtggaatgcgtgtgtttcttgaagacaagggtcaacaattgttcgtttctgatgcatccattgcatatgaaggtgtggctcctctttctttgtgtgcgagaaagactgaagagtttctaatggaaagaa

SEQ ID NO: 147017 - DNA, 1342 bp, Arabidopsis thaliana landsberg; identical to SEQ ID NO: 37388
  unsure (1)..(1342): unsure at all n locations

SEQ ID NO: 147018 - DNA, 1708 bp, Arabidopsis thaliana landsberg
  unsure (1)..(1708): unsure at all n locations
attttttttttgttaattattcatcatttcatctgttcgaatcgggcaattttcgtctggagaaatctggagataggattttgatcgatttctaagctctaatctcagttttttgggtagctccggtgatccttgagatggcgggtcagaatcctaacatggatcaattcgaggcctacttcaaaagagcagatttagacggagatggtcggatcagtggtgccgaagctgttggattttttcaaggatctggtttgtctaagcaggttctcgcccaggtgaacatttcttcttggatctctctgctttctgattgtttctcgctagaaagatctgatttcgttttctacgcagctgatttgggtttccaaaatgccgtgattttgattgttccatttgaattgcattctatttctgagattttgaattgcctatgaacttaataagaattcacggggtcagatttgagtacatttgtgtggaaataagctttaaatctttggtgtaccagtaattatgtatttgaatctggaaaaaatatctggcatacagtttccttgaaggggttctatttagcggtgtttgctatataaaattgtttactgatcagttgtgttttgcatttgtagatatggtcgctttctgatcggtcacacagtggtttccttgatcggcaaaacttttataattctctgagacttgtaacagttgcacagagcaagagagannnnnnnnnnnnnnnnnnnnnnnnnnnnnnnnnnnnnnnnnnnnnnnnnnnnnnaccacctcccaaaattaatctttcagctatccctgcaccccgacctaatcctgctgctacaacggtcggtccagtttccgggtttggaggaccaggggctccaaatgcgattgtcaatcagaattattttccacctcagcaaaaccagcaaatgagaccaaatcaaggaatatctgggctgacttcacttagaccagcggctggtccagaatatagaccaagtgccttaccaggtcaattccaaccagttcctgttggtagtgttacgcgtcctcctcagcctgttcccactagtgtatctggtcctggtagttcaacgttcaatcttaatagtttgtatgctggagctggaaacaccagcggatattcgtcaggctttggagggggcagcttagcagcaccttctcctggcttaaaacaagagtcacacattgatccaaaggcgcttgttgtatctggaaatggaggtgacatgttttcctctttccagcaaaaacaagaacccactctgagtaattcttcaattagttcagccattgtccctacttctgctggaatccaacctccaacaaagcctaatgctctcgattccctacagagtactttctcaatgctaccttcaggaaatcagcttcagcagccaaggccagcagcaagctcacagcctgcagtgtcctcacaaggtccatcctccggtttgccacctggaagtgcagttggatctggccattctactcctgctggaaataatcagcctccgtggccaaaaatgaaaccatccgatgttcagaaatacacaaaggtatttatggaagttgatagtgacaaggatggaaaaatcactggtgagcaggcgaggaatctatttttaagctggaggttacccaggggtaaggattttcaatctcgcagtctactttacataaa

SEQ ID NO: 147019 - DNA, 591 bp, Arabidopsis thaliana landsberg
ggaatcggtattgaagcttgtggtcatctatcatgtttttggtgcgtacataagtccatgaatggctttcgggagtctcattgtccgatatgtagagacccgtatgttcactttccctctgtgtgccagaagcctttattttctgttaaagaagatgtacccacttgctcataagaagagagaagaacaagttttaagtgagttcttgcttgcagtttctttgtagttgttctatgcaagtgtcatttttgttggttattgatttgttaatgtcatgtttcagaggaagagcaagaacgagaatgtttttctcctcagattgatcttgttttggatttgtctgtgtgtagtggagattctctcaatgtctctggtgagagttccacacattagatcctttttctgtctagtaaaatgctttctgcttacaatttgatgtgtgtagataaacagaaggtgaaagagtgttcgaatgcagcgaacttattatctagttcatcaagtagaggtgacataaccatgtatccccaaaaatcaagaacccacagatgcaaaagctcttaatgttcatgaaaatgaattacttaagcg

SEQ ID NO: 147020 - DNA, 630 bp, Arabidopsis thaliana landsberg
cttatcatatcatgagaatgaagatacaaaatattcatgcttgatgcttctatatagatgtactatattttcaatggaaatattcttatgaaaggttgtttttcttttcccgaatttcacagcggattatataggagtaaaaccagttgtaccggcatatttgagaccgggactgacccaggaagatttgctcactggtgtatcctttgcttcgggtggttctggctatgatcctttgacaccaatcgtagtagtaataacatcattgctttgaatttggaaattatctccttcatttttaatgtttccatttgatttgatttggttttatatctgttatcaatgttataagtagagtgcgataccgatgtcaaaacaattgacatactttcaagaatacatagagaaagtgaaaggctttgtgggaaaagagaaagccgagcacataatatccaaaggcctagccattgtggtagcgggcagcgacgatctggccaatacctactatggtgaacacttagaggaattcttgtatgacatagatacatatacctcttttatggctagctctgctgcaagttttgctatggtacgtgaaaccaatcctccgatttagttgtttataatatg

SEQ ID NO: 147021 - DNA, 1260 bp, Arabidopsis thaliana landsberg
aattcaccttctctctctctcctcctcatctcactcagcgcgttacgccggatctccggtgacttttgttgagcttttttgttgattcatgattcgatatagagaaaaaagaatttcctatgtcagctctttgttcttagatttatctttttgtttgttcttatggataaaggattaggttgggggattaaaggagtagtttttgtttggttgtgagattacttgactttgttaaggggataaattaggcgactttgtagggacactgtaccgaaaaaccctagttctgatttggccatggaagtatcatagcacttactattgtcggctttacttcttctacttttgtataatccttttttttcttaggttctgtgattagatattttttttgtgtgggtttagttgttaatctgatcatggatttgaacggtgagtgtaaaggaggagatgggtttattgatagaagcagagtcaggattttgctttgtgacaatgattccacgagtttgggagaggtttttactctcctttcagagtgttcttatcaaggtatgatttataggtttgtccttgtcttgttcccaaagtttctctttttactttgttattttttgctaagttgggattactactttagattgcagatctcttataggttcttgtcgtctggctttttgagtcagtatggtcagatgtgatcaagatgacatttttaacctttgttgattttagtaccttattgatagtttttgaatgcatctctagtgtgtattgctttctatttttacactatgctcaactgtttgttgttcaagactcaatgatgatatattggatgaattgtttttattctttttggaatgcagtgactgcagtgaaatcagcaaggcaggtgattgatgcacttaatgcagagggacctgatatcgatataatactggcggaaattgatctcccaatggctaagggtatgaagatgctgaggtacatcacacgagacaaagatcttcgcagaatccctgtgataagtaagctgtgttctttgttgctcttctcgttttattatctattcgtgaagttgtatcttctctgcttatcaaagtgcttttgacagcatgatcattagctttatactgactaatcttataatattctcaatttaagtgatgtcgaggcaagacgaagtccctgtaattgtaaaatgcttgaagctaggtgcagctgactaccttgtgaagcctcttcgcaccgcctttg

SEQ ID NO: 147022 - DNA, 4140 bp, Arabidopsis thaliana landsberg
agattcttctccggagcgatcagatttcaccgacgacggttgtttttgcctcctctttcaatcggaggaagccaaagcttagagcaacagttgtaaatctatatatagagagggagagagagagagagagctcctctcgtccagtattagggttttaaaggcaagaactactagaacaagagaaggttcaaaaaaaaatgtcgggcctccatcgatcatcaagttcatcgaagaacatcggaaattgccttccctccaaagaactccttgatgatctttgcaggtaatttcatcaatcgagtgtttttcttcttttttctgtggatagtgaagcgattgggctcgaattgattttcggtaactgatgctttgtgatggggttttgtttcagtcgatttgttttgaatgtccctgaagaagatcatcagtcaaaagagagaaataatgtttctggtggagtatgctaattggtactatgaagataatgctgtagagaatgatccaaagcttaagtccctgtctttgaaagagtttacttcgctctgtatccttcattgccttctgattcattattctgtgttcaatttcttgtcttcactgtttagtacaatgctcgttaatgataggactatgatctcatatgctcgaagcataaatgatttgtgtttgccacatagactgggcttctctttgtcttttccattgttttctgtggatatttttccttgacgtggcctatagtattcaacagctgtgatgtgttgagaccttatgttactcacattgatgatatctttaaagacttcacttcttacaagtgtcgagttccagtcactggggcaattatcctggatgagacatatgaaagggtaagaaccctgtggggtgatatttaggtttacttattagttaatgcttaccctttttgtttcattgtcattttcagtgcctgttggtgaagggatggaaaggatcgagctggagctttccccgcggaaaaaagagcaaggatgaagaagaccatgcttgtgccatacgtgaggttagtatcaattctgttgtttcctgtctcttttgtgtttcatttattttacacttttgtagcaaaattgatatctccaacaaccgccactcattgatcatagtgcatattaataaagaacactatgtaattagaagaagaccgcttattgggttagattaacctcacttagtggatgcattggttctactttagtggttgttgacatatgaaaatgtgtcaacataatgtgcgcatgaattttttttagtatagatgacggaggtcaaagaatagcaaatagaacgtctcttatatcttctgctcttgaaacagagtaactcattttcacactaatttaacagtttgatcataacacatacaccttacgtactgaaaatagattctcctacgtgataattgaggaagaaaaaatgttcttaggtcaccagtagacagaatcttttgcaaatgagaatagtgctgctgtcaatggtcaactatataggctctctgtatctttttactatttcattggtatggaaatggtcaaaggtttaattgtagctctctagtgctattctcctggtgaatgtagcatttcaggtgctgtaattcttcttctgattgtttgtatagacttggaatatgggttaatgttgaaaaaaaactgaatattttgtcacacttcttatgtattgttcttccatgctaaattacaggtcttagaggaaactggatttgatgtctcaaagctactcaagagagaagaatatatagagtttgttttcaggcagcaaagagtacgactttacattgttgctggggtgacagaagatacagtttttgcaccacttacaaagaaggaaatcagtgtgcgtatttaacaattaacttgtggatctgatcttgtctgtgtatgtatgatgagtctcttatcttcttttgttgtggaatacttgtaggaaatcacatggcatcggcttgatcatcttcagccagcaagtaatgaggtgataactcatggagtttctggtctcaaattgtacatggtggcacctttcctttcgtgagtagtggctctctaatttatacacatagatttttgggtgattttcgtgttttggttcataacaagagagattacaaacttgtgcaggtcattgaagtcgtggatattaaagcatccttcacctgtagcacggagacctaacaagccccttaaaggtttgacgtctttttctcaagcattcattaaaagagaggtttttggcagagatctgactatatatgctttgtacagcactctgcgtgtggaatgcaaggactagtgttggagggaacgggacagcaacagtggaaagccaaaatagaaagtctgaactcaggacaacaacaatggaaagcaacagtagaaagcctgaactcaagagaacaacaatggaaagccacagtacaaagcctgaactcaggaaaggaacaatggaaagccacaatataacagcaacagtagaaagccacaatacaaagcctgtagtcgaccattctcaggacataaaacctggtggcagtttcataaacttcaagttcaaccagtcagttatcttacaggcgttggaatctggtaattcagcttgactggtcagtttgtcacatatcggttggattggtgttgggagtaatgatgcggttggattggtgggtttgtctatagcaaaaccgttggatatgttcatacacgctggtagctttctatttctttttcatttggtttatatacctctcgtttcttctagaatgaaagggttgttgtaaatgatgttagtagggaagtggtgaatcctttggatcatggctttagatgacaatgttacgaccagctataaaggttaaaagagtttcttatccgagtagtgaatcgatgatcttctttatagcgccctctaactgcttaatcgaagcagaaagtgtttttctttttagaataaaaaatgaactcacctataaaacaaaaagtcgcacctaaataagtgaagtttatgtaatactatgattaccttggaaacaagagatatctcgagattgtttagtttttttcacattgtaatttgttagtataaaaggtgggtgggggaatggtggcctaaattcggcaagggtggcctaaaaaatacatttgattgctatacgaaaacattttaaagaaacagaaactgacaagtggcattttgtgttttacacttttacttgcttgtgtttaggtttggaggttcatctacataagcatcagcattgtgactttgactctccccatcaaaattcatcctaaaaatcaaagcatgttaaacagcccaaccacattgagaattttatctataaatagaaatagaaattaaatccttggttaaacccataactcttctttcctcttttcttctccggctaacggtagttttgacgccgttagtttttcctccgtctattgatttttcccgcttcacaatcgcaacaaacccaaagaagaatgtctcgtgtggtcgcagcggacgacaatatggcgttgccgttcttctcgccggagtttggcaatgtctcaggcgcgtcgtcttctccaacaacgttcgcacagctcttgcaaaacgtcgacgactccacgcgtcgtagtcaccaccagcatcacgttgatgtggatctcgcctcgccggaccaatccgtaccgttcgttctctcgttcactgatctcacttacagcgtcaaagttcgccggaagttcacatggagacgcagtgtttcttcagatcctggagctccgtctgaggggatcttctcttccaagacgaagacgctcctcaacggaatcaccggagaagctagagacggagagatactagctgtgctcggagcaagtggctctggaaaatcgacgctgatcgatgcgttagcgaatcgaatcgctaaaggaagcttgaaaggaaatgtaactctaaacggagaagttctcaattcgaaaatgcagaaagcgatctcagcttatgtgatgcaagacgatcttctttttccgatgcttacagttgaagaaaccttaatgttcgctgccgagtttcgtctcccgcgaagcc

SEQ ID NO: 147023 - DNA, 917 bp, Arabidopsis thaliana landsberg
ctgtaaggtaaacacctccatccagatagatgcctcgggaggttagttggttagatggtatatgctgttcgtaccagtaggcaccggtttagaatcaagtactgaaggaaaagtaatttaacgtatgcaatgtttacattaggatttattttcttatgaggtaatgtctccgaatgttggattataaacacagagttacggtggtgtttctgggtgtggagatcgtaactttcatttgtttcctccaggagctttaatgtctcccaccgttcctaaagatcatgaaggcgtcaaggctcaagtcctagtaatgttcatggcattcttgatgacgcgttttcgcagtctacggcactgtaacaaagatacttccagcgactactacttcttccccagcagaaacccaaggaaacgcaatagaacttggttctaacggtgaaggagttaaagaggagtgtcgtcctccttctcctgtaccagacctcacggaaactgatctactaaactgtgtgacgaagaaactgacagagctggaaggtaaaatcggaacgctccaatcaaagccaaatgagatgccatacgagaaagaagaactgttaaacgcagccgtctgcagagtagacgcacttgaagcagagctcatagctactaaaaaggccctttacgaagctttgatgagacaggaagagttacttgcttacattgatcgtcaagaagaagctcagttccagaagatgaagaagaagaagaagaaacatctcttttgcttctgaagcaaagccaagaaaaaccagcaccaggcatcaaaatctccctctttcgtaattcgctgttctcaagtataaacaacaaaacaaaacaaaaactcttatatctgatttgatgttaaagctaatacagagagctctgtttccttc

SEQ ID NO: 147024 - DNA, 1000 bp, Arabidopsis thaliana landsberg
catatcacatagaaacttcttatttgcttttttaattcgtttaatataaaactgtaggagtggtcctatatcccagttggtggttccttgccaaacaccgaacaaaagaatctcgcctttggtgctgccgctagcatggtacatcccgcaacaggtagtaagagcaagaagccttgacccgatgtacttttattcacatcttgaatctgtaccatctctgacttagctttcccccaattaaacaggctattcagttgtgagatctttgtctgaagctccaaaatatgcatcagtcatcgcagagatactaagagaagagactaccaaacagatcaacagtaatatttcaagacaaggtgagctctatataaaccacaaagttaactatgctgttctttcacacaatgagaaacttttaaaacttgtgattttctattttttggcagcttgggatactttatggccaccagaaaggaaaagacagagagcattctttctctttggtcttgcactcatagttcaattcgataccgaaggcattagaagcttcttccgtactttcttccgccttccaaaatggtaagcaagacactgattcgtgattcataacaatgttaccgtaaacaagaaaattgattcttcttttcacttactggggatgtggcaagggtttctaggatcaacattaacatcaggagatctcgttctctttgctttatacatgttcgtcatttcaccaaacaatttgagaaaaggtctcatcaatcatctcatctctgatccaaccggagcaaccatgataaaaacctatctcaaagtatgatttacttatcaactcttaggtttgtgtatatatatgttgatttatctgaataatcgatcaaagaatggtatgtgggttactaggaagttggaaacaaacatgtatagaatctaaggagtgatcgaaatggagatggaaacgaaaagaaaaaaatcagtctttgttttgtggttagtg

SEQ ID NO: 147025 - DNA, 2019 bp, Arabidopsis thaliana landsberg
  unsure (1)..(2019): unsure at all n locations
gcaggcgctttatgtcatgaaccctaacaagttcagagcctgtgaatttttgatacgtttccatgaacaacaacgtggggataaaatcatcgtctttgcagacaatctttttgcacttacagagtatgcaatgaaactccggaaaccgatgatttatggtgcaaccaggttcgttgaagaaccacctattgagagcacagttttgtatgtttcactcagtttccaatctgatagttctctttgttcaatatgtagccatatcgaacgaacaaaaattctcgaggcatttaaaaccagtaaaaccgtgaacactgtattcctgtcaaaggtattaccgttgtttcctttccattaacctgggaatatatagagatttgttcattccattttcatcaaggaacttagtttcggttttgtttatttgactacaggttggtgataactccatagatatccctgaagcgaatgtgatcatccagatttcgtcacatgctggttctagacgtcaagaggctcaacgtttgggtcgtatccttagggctaaggtgtgattttcagtattataactcatcacattttgcgtctcacctagagttcctcttggttgttggatccaacannnnnnnnnnnnnnnnnnnnnnnnnnnaaagctttatttctccgtgatcaaaaacagggtaaacttgaagatagaatggctggtggaaaagaagagtacaatgcattcttctactcgcttgtttctaccgatacacaggtaaatcactttattgttgaagtagccataaaaactgaaattcatcagaccaaatcagaaccaaaatataattcagttctagtccgcactcgtttccaaaacacagatttttttttgctttccagaacccgtgacttgaattcctgaaccgataaaaatcgaatgactgattgaatggagaatgactgatgtaaggatcgtgaatgttgaaatgcaggaaatgtattattcaacgaaaagacagcagtttttgatcgaccaaggttatagcttcaaggtaataacaagcctcccacctccggacgcgggttcaagcttgggctaccacagtcaagaagaacagttgtctcttctcggaaaggtgttgaatgctggagacgatatggttggtttagaacaacttgaagaagacacagatggaaaggctctaaagacgcgacgaagcatgggatcgatgagtgcaatgtccggtgcaaatggaagggtctacatggaatacaactcaggtcgtcaaaaatctggtaaccaatccaagaaacctaaagacccaaccaaacgacacaatatcttcaaaaaacgttatgtttgagacaagagaactcatattcggctatatgttttgagttgtaactttggtgcaaatttgtttcaggcacaaaatcaagaaaacctaaacgaagcaccctaccttaaaagaccgttaacatttgatatttgttttattatgtgaattgattaattgatattagaaagttctttccttttttttgaaaattattttgttattgtcaactgtcatgatatctcgctgaaccaacatataaaacacgattataatttggttgacagatcctgaacaacagtaaaacgtacttagttttcgaggttaaaaaataattacttgtcatgatttcgaattaaaaataataatgggctcaacttgagattaaagaaagcccacgctaaaagaggcctactaaatgcccatattggatccgttattgtagcctttctatatatgaatcgagtttgcatttctgctataacgttctctgcattcacatgatcacatcaactcagtaacggactcgacatacccggacctggacccgacactgaatccgaatcataatgcgacggagacgcagctcgcttctcggtctagcttacaacggaaaattttcacggtaccgtttgttttccctctgtcgtagaatttctgtcttcacgaatcacggcaccggattgatataatcgattga

SEQ ID NO: 147026 - DNA, 856 bp, Arabidopsis thaliana landsberg
aacagtttaaactctctttctgtggagtttggttccaaatgtttagtctatgaaagctataatagtctatagagtcagcttattagaaagttcttcttttgaacaggtttttgttagcatctaagttgtgtactctgtgacctttattcagtatttgatctctctatcggcacataaatgatagatgtaagtgtaggaaccgatagctatagctaaccaggacattccttgacctacttaaccactttcattatggattttagcttcatctgttttttcatgaaaacggaaatctcttcaactctacaaattgtaatggtgtctcttgtcttcaatttgattcatctctaatccttgttagaatgtctgcttaaagctctcttgaatatcttccttttcgcaatctcaagtatcgaaattcattcctactttttgtgatttccacagccatgagtataaagacattactgaaattttattttctacgttcttctactgacaaaacctctgtttatcctttaatgcaggaggccaacaccggttgaggagattttgacgatagaaattaaacccggttggaaaaaaggaacaaagataaccttcctggaaaaaggtaatgagcatcgtggagtcataccatccgatctcgttttcatcgtagacgagaaaccgcatcccgttttcaaacgagacgggaatgatcttgtggtaatgcaaaagatttctctagtggatgctctcacaggttacaccgcacaggtcactactcttgacggaagaaccttaacagttccggtaaacaatgtgatcagtccgtcgtacgaagaggtggtaaaggagaaggcatgccgggcct

SEQ ID NO: 147027 - DNA, 426 bp, Arabidopsis thaliana landsberg
ttatcatcactggctccagaaaccttggaacgaactcaggccattttgggacggttgagagatcaaatagagaagggaataccaataattgggggaggtgctggtactggaatatctgcaaagtttgaggaagctggtgggattgatttgatagtgatatacaactctggacgttttcgtatggctggaagaggatccttagcaggcttacttccatttgctgatgccaatgcagtcgtgcttgaaatggcaaatgaagttttacctgtcagtttcttatttcattcccacaatacccaagaaacttgcattctttttccagttgcttctgttagttattcatgcattttctttctaagacccgtcttcatatgtcaaatttaacttgcaagtagtgaaggcggtgcctgttctggctggggtgtg

SEQ ID NO: 147028 - DNA, 1439 bp, Arabidopsis thaliana landsberg
actttcttttttcaccaagcaataagaattttgtttgcgtaaaacttctctgtaattttttttataacagcatctcttccagctgcaaatatgaaggttgagccatgatatttcgtcctgttagatagaatattaaattattgtaatcttttttatttttatttaaagttgctatatgtactatattgtaatgatgttactattaccgaatacgatacttagactaaactactactaagcgtttgagattagtggaagaagagtataaactgtgaacaccaacaatgcaaaatagttttgtataagtcataacattttagtttggtctgctatctcaatctttgtattgtggattcgttgttacgacggaaaatgcctgatgcggctatatgaaaatataactcgttataaaattttgccaaataaatgttatgatgtataatagaatatccaatggagtatagtgatgaaacgatttttgacgaatgtttgagaaaaaagtcttaacaacgaaaccagaaatgttttaagaagattccttgttttcttacaacccaaagaggagacacacacacagatttggaacgctttgacttacaagcttcttctaagacactactctagtagtctctcggagattctatcttcactctctggtttattcaattaaaccggttggtttagttccatcaattttcttttctcttttatttttattgctagttttgtttgttattttgagaatggcgtcgaactactactctgttcagataaagcaatgcattgggttgggagctagaaatcagagtcgttatgtgaagatgatccacgggaatatcatcagagctcttccatatccagagacgtttttgtataacaacatcgtccacgcgtatgcgttaatgaaaagctccacttatgcacgccgagtgttcgacagaattccccaaccaaaccttttctcctggaacaatcttctcttagcttattcaaaagctgggcttatctcagagatggaaagtacctttgagaagcttcctgatagagatggtgtcacttggaacgtgcttattgaaggctattcattgagtggattggttggtgcagctgttaaggcttataatacgatgatgagagatttttctgctaatttgactagggttacgttgatgacaatgttgaaactttcttctagcaatggccatgttagtttggggaagcagattcatgggcaggttatcaaacttgggtttgagtcttatcttttagttgggagtccattgttgtatatgtatgcaaatgttggttgcatctctgatgcaaagaaggttttttacgggttggacgatagaaatacggttatgtacaattcgttgatgggtggacttctagcatgtggaatgattgaagatgcactgcagttgtttcgaggaatggag

SEQ ID NO: 147029 - DNA, 669 bp, Arabidopsis thaliana landsberg
ctttctccttcttcttcttctttttcttcttcttcttcttcttcttcttctttttctttagaaacaacacaaaccccaaaaacttaaaaaataactctacagagatggctgttggaatccttgaggttagtctgatcagtggcaaaggtctcaagcgctctgattttcttggtaatgatctctctattctctcagatttcgtatcctttgatcatttaaaaaacccttttacaacaatttatatttttcttggttttgtatgattgtaggtaagatagatccatatgttgagatccaatacaaagggcaaacccgcaaaagcagcgttgctaaaggtaatttaacttgctagtttccttctttccatatttccaaatctctatcagcttaattcgggttatttcgtttgactttttttttcgttttatgcgagagagactatttctccaatttcatcattttcttttctatatacttggactttaggaataaaaagcccacatgctggtgttagttgatggttgtacataaagtaaataatagttgcaacttgcatccattggtatttcaactatcctcatagccattacatggtagcttaggctatactatttatacgcgttttgataacattcataatctttcactcagttataacattcatcaggt

SEQ ID NO: 147030 - DNA, 434 bp, Arabidopsis thaliana landsberg; identical to SEQ ID NO: 19712

SEQ ID NO: 147031 - DNA, 515 bp, Arabidopsis thaliana landsberg
ggcaatgccaatctaaaaggagtaggtgaaaaaagattcaatttttgtatgcctatcaattagaaaggagaagaggggaggtggttagattggtttcaatgggtgagacgcagaagattttgcaagggccacgtcaccacacatctctgaagaagcccttatgggttgttttgacagtctcagtgaccagcatgcttctaatctgtactcacatgtatccaaaacatggcaagagctcctcgtgtcacggcctctatagcaccagaggctgtgaggatgctctctctaagtggctacctgttcatgtcaggaaattcactgatgaggagatagcagctcgagcagtggttagagacatactaagaacgccttccttcataaccaataactcctaaatcgcgttcttgttcttgactcccggtactttgccatttgagaagctttgggatgaatttttcaaggcaacaaacaccttgacgaaatttgcaaacttctagctccatttcattgatttt

SEQ ID NO: 147032 - DNA, 528 bp, Arabidopsis thaliana landsberg; identical to SEQ ID NO: 3111
  unsure (1)..(528): unsure at all n locations

SEQ ID NO: 147033 - DNA, 653 bp, Arabidopsis thaliana landsberg; identical to SEQ ID NO: 43801

SEQ ID NO: 147034 - DNA, 1540 bp, Arabidopsis thaliana landsberg
cttccgttgcttttttttttcaatccgccgccacttttcgtttctcgagcgttaaaatggcggtatcgtacaatgcattagctcagtctttagcgagaagtagctgcttcatccccaaaccttattcctttagagatactaagctgagaagcagatccaatgtcgtattcgcgtgcaatgataataagaacattgctcttcaagctaaggtaaacatcttctgtgtaatcttaacttatagatagaatgttctgcaatggaatcgtgttaagtttaattgttatctaagaacgattagaatttagattgaatattgaaccagacattgtcaggtgcttactctttgacatatgagtaattactgttacatgtcgggtagagaaaaaagagagaagggaaagcttttttgatggtttccatttttagagtttggatttcttttttaagatgctcatcgtttgcttggtcatctgcatttggtgatgcctgagctacatctgttcatcacattttattaaagcatttaagtatattgttatgccaaaagtaatttagttctatgaacattgtctggagtaaattgtatatgtaaagtttggatttttgccagagatggtcaggttcctaccctttgacatgtgggtttggactgttacatctctggtatagaaaagagagagaaggaaaggctttttgatggtttccatctttaggtttggatgtctctttcaaggtgctcatcgtttgcttggtcatctttgttacgtgatgacttggctccatttgttcatcacagttgatatcttttcaaggaaatatgtattgtcttgcgctctcagagttggattaattcatcactgaattactgtgatgccttccgaagtagcttatgttttaatttagagaaaaggaggttcatgtaagatgtgtcatttgttaatctattttagttacgtcatgtacaattgagatttggccagagatggtcaggttcctactctttgacaaatgagtttgaactgttacatctctggtaaagaaaaaagagagaaggaaaggctttttgatggtttccatcttttggtctggagttttctctaaaggtgtacatcgtttgcttggtcatctgaatctgtgatggcatgggctacatctgtcctccacaacctgaataatcttcattgagacatttctcttttggctttaatatctagtccgataatgcatttactgtttatactattagagaggggcttgtttgattgaaatgacaatgtttttttctgtgttggtagtgttgccattgtgccttttattactgtctcaataagcaatgtatatgcggctgttgtgttccctggtagctaatcattgtttctgttgttttcttgtgttaggtagataacttgttggaccgcattaaatgggatgacaaaggattagctgtggcaatagcaccccacgttgatacgggagcagtatttattcaagcctttgttaatagggaggccctatccacaaccatcagttctcggggagc

SEQ ID NO: 147035 - DNA, 2180 bp, Arabidopsis thaliana landsberg
atttctttgtctgactgcagaataaaagctattggctcttctctcaagtcatgctctgatttgaaagagctgcggctcgcgaacaatgaaatcaaggtgatctttcttacatttatgcaatctacagaacaaacctgcctcttctcacaatcttttgtttatattgctaatcgttatttcatttacgcttaactgttcaggctctcccagcagaactagcagtcaacaaaagactactcaatttggatgtgggaaacaatgtgattacgcaactctctggtttagaggtatagtctaattcatataggtgaaagcaaatttgttagccttccctagcttgtggcaagtttttgtggtgatcgtgtaataaaccatcaaatttgtgtgctcccaaatgataggttttgggtacactatcttgcttgcgaaatctgaatattcgaggaaacccgatttctgataacgataagtcagctaagaaggtaaaacaactttttctacttcttttttccattgtgattagtgtaactgcgtgaagaaatcgtataagaatgaggaaaattgttttgatgtcgcaggtgagaacgttgcttctcccttcagtgaatgtattcaacgctcaacccttagaaaaaagctcaaggaatgcaaagcatattcggcttgataccgatgatgaaacctttgatgcctatcacaataaatcagcagaaggggaacaatctaaagaagatcgaaaacgcaagaagagctctaagagaaataagtcagaagaagaagaagtcaacaatgaggatcacaaaagcaagaagaagaagtctaagagcaacacaaatgtagatcaagttgaaacaaaaaagaaagaagaacataaagagaagacaatcccaagtaacaatgatgatgatgatgatgctgagaagaaacagaaaagggctactccaaaggaggaactcgatgctatagatgatgctgaaacctctttcgcagaaatcttttcccgggaaaatgtgccaaagggttctgaagacggtattgagaagaagaagaaaagcagcgtccaagagacaggtttagtaaaagtgatagatactaaagctaacaagaagaagaagagtgaaaagaagcaaagcaagagtgtagtgattgatcttcccatggaggttgagatcgggttaggaggagagtctaagtgggagtaaactgcaacagagggagtgttttactctttaaaagaagggacagctatgtctgtaacatccaacggctagggagtattttgatatggttaaagaacataggagaggaagaaagtggtttcgatcttctttataaattgttttctgcactgttgagaagctatatctaattttataaaatgtttgtgtcattgaaaccaaaacaaaaaaaggagaataggttctaccgagaattgaactcgggttactggattcagagtccaatgtcctaaccgctagaccatagaaccatttgcttcgagtcctaccgttttggttctagacattcaaggactacaccatcgtggtctccgccgatacggcagtctgatcaaaacgattcaagagaatcaggcggaagtttttttctgaaattcataaaatcgggtgatctttgcaatatgcatacgtatatccttggtaaatgtattggctttgtttggttaacgatgttgataggattaggttgtgatcaaattagaaaaaaattgggtcttttctgattttttttggccaattctctgattatgagttttggaatggttggaatggtagaggagggtttaggcgtaaggtaagagaaaatgggattgaacccaatttgcatacttcaaattctctggtgagcttgatgtttcattgatttgacaaagcatgtatttgagattgtgggcagttgcaggatcagactacatgttacttacaacaggcatgatcaaggagtattgtaaggtagggtagagaaatgatatgacaatgatgcaggttttgagtattgcctagctttgtatcaagatttggatgagaagtgactttcaggcttgtagtttagtgattggagattctgcaagaagggaaaatttcatgaaggttatgtggtttttctgcaatatgattcgttaaggaggccaagccaaatgtagtcaaatacaccacgttaat

SEQ ID NO: 147036 - DNA, 2413 bp, Arabidopsis thaliana landsberg
ataagaaagaaatttgttcactattatcttgcatcactcgatatctacatttttgtgagttctcttgttacgtcattgaggtgacgtatatgatcgttataatagtctatattgatcatgaacgaatgtgaatggtaatttggtatacgaggaaaaagaagtatggtacgaccgtacgagcacaagttgtaactttttttttgtttaaaaagaaacaatacagtagttacctacgaacataactttaatgttatgatactttttatttgtaaaaacagttaaaggaacttaaaaactatggttcatcgtatatattttcgatctgccacccaatgagtgagcacggcctttgactctggactaaaattatattgaatattcatatacttgatatccaagtaaatatgaaattatatacatgtcaagaaaattgtttatcgtttttggattatttatgttatcatctagtagttttattgaaatagtaaaactcgagatacacaaatgagaaaatgtaaataagtagtctgaatcaaggactaattgacgttgaaatttttggaaataaatgtatatttcaacatcaaccaatcaataatcacgacgatatcaaatacacatatccttttataaaattaataatgaatatttccccaaataaagagttttgcttggtctttcctctcttcttctcagcttcttcctcctcaatctttcaattaaaatccccagaaaagaaagaaaaaagggacagttggagaaaaagattctctcaatcttatgatcgttaagggtgaaacaaagattactaaaaacagaggaaaaacagagtaaagattactcaagagtcaagagctggtttgatcttaatgggaaacatctgtcctggctctggatcttccactgttaaccacgaacctgtctccaccaaacccctcccaggttcatacacacatctctctgcttttttctttttttttggggccgaatccaaatactttagatctatttaccttttttttttctttggtatttttgacgattcttgagtttctttaagttcttgcattaaccccccaaaaaaaaaaaacgctttcctggatttttttgtttgtttcattgtgccttttcaattatgaaaatgtcaatgcttgctctgttttaacttttctgttaaagtctcaatgtttttattttcattaaatcaaactttcgtgtgtatcaatctatacagtgagacgtgtgcagaccccagagaataaaaagtttcctccgccgctggtggcgatgccggcgttacatcccacgtttccactgccggaaacaggacataaactgagacccgccgctaccccgcctcgtgaaaaaccgcaacataggacgacgagatccgtcgagaacccacctcgtgaaaaaccgcaggagaagacaagatccgtcgagaacccgcctcgtgaaaaaccgcaggagaaaacaagatccgttgaaaccccacctcaggagaagacgagacccgtcgataatccgccgtcaaagccggtagaaaaattgggtttaggaaggaaagcagtgccaccgagtgggaagatagtgacacctaatctaaagatgtttacattagtggagcttaagacggctacaaagaactttcgaccagaatctgtgatcggagaaggtggattcggacaggtttttaaaggatgggtggatgagaaaacattagctccgtcgagagctggcgtcggaataccagtcgccgtcaagaaatcaaaccctgatagtgagcaaggcttacatgaatggcaggcaagtaactcctaactttcctttttttaatttcgttaaaatcattaaaagatactaattggagggaaaatatcattgaaagatctaattgtagcaaaaatttattttggtttgtctctgtttcttcaacataaggaataatggcatgagtatttggtttaaatagttatataacctacgtatatgtgcaaattaggaaaattttcagcttattgaatttaatgacagaaaaacgaatatactagactggtcattttaataacagtttttactttaaaacacaacacgccaaaaaacagtaagcacaaatttgggtaaaaacagaattatgcatactctttaaatattttcttgtcacaatttttgtcgtttttttgctccataaagtgagtatatgaactggtcttcaatgaattttagtaacccttactaaaagtttgacaatatatccttcttcactctagattttgtagtgtttatgattagttttcaaaataatggtatatttgaaagttttttttttaaaggtgataatttagagcatttctttacttaaaatggaataacgttgtatcaccgccggtctcgctagcattagaaggtattt

SEQ ID NO: 147037 - DNA, 512 bp, Arabidopsis thaliana landsberg
tacagaacaaagttgaaaatcatgaagacgaaacggtgtcgttttacatcaattgtttcggctctggtgcttttttcatccatgccgtatccgattctgtttcggtaagcgatcttcttcgacctgatggctctgttcctgactttttcaggattttctatcccatgaacggtgtcaaaagcatcgacggcctctcggagcccttgcttgctttacaagttaccgagatgagagatggagttttcatcggttttggttacaatcacatggtcgcagacggtgcttccatctggaatttcttcaggacttggtcaaagatttgctctaatggtcaacgggagaatcttcaacctcttgctctcaaaggatggttcgtggacgggatggatttcccgatacatattccggtttcagacacagagacgtcaccaccaagccgtgagctttctccgacattcaaagagagagtttttcacttcacaaagaggaatatctcagatctcaaagctaaa

SEQ ID NO: 147038 - DNA, 266 bp, Arabidopsis thaliana landsberg
aatcaataattcaacaaaccaaacctcttcccaatcccaacagcttcatcgttttatcttccaatcaaagcagctcaaatcaagctcgcaaagatgatgcacatgaccttctactggggaatcaaagccacaattctcttcgatttctggaaaactgactcatggcttagttacatcctcactttaaaagcttgcttcgtcttctccgctttctatcaatacctcgagaatcgccgcatccaattctaatcccattcttcctcggt

SEQ ID NO: 147039 - DNA, 995 bp, Arabidopsis thaliana landsberg; identical to SEQ ID NO: 4952

SEQ ID NO: 147040 - DNA, 1844 bp, Arabidopsis thaliana landsberg
  unsure (1)..(1844): unsure at all n locations
agactngaggttaagtttggtgagaaagtggctgtttgtggtgaggttggctctggcaagtcaacacttatagctgccattctcggtgaaactccatgtgtctcaggaacagtaagtcttatcattagctttagatttgaacaactttagatactcgaaaattatgtttctaatcatcttgatttgaatcattcaacagatcgatttttatggtaccatagcctatgtttctcaaacagcatggatccaaacggggacaataagagataacatcctctttggaggtgtgatggatgaacaccgttaccgtgagacaattcaaaaatctagcctagacaaagatcttgagctcttacctgatggagaccagactgagattggtgaaagaggtgtaaatctaagtggaggacagaaacagaggattcaactcgctcgtgcgctataccaagatgcagacatttatctccttgatgatccatttagtgctgttgatgcacacactgcttcaagtctgttccaagtaagtacttactaaagcagagacttcacactgtcattctcttgaaaatgttgaagctaatgtgcatgaaatcaggaatatgttatggatgctctcgcgggaaaagctgtgttgttggttacacatcaagtggatttcttgcctgcttttgattctgttttggtaatttgatcttgaaatcagaattgattcttttggttttctgtttttggcttggttgtttattgtacttgtttctctagttgatgtcagatggagaaatcactgaagctgatacataccaagaactcctagctagaagcagagactttcaagatctagtgaacgctcacagagaaaccgctggttcagaaagagtggttgcggtagaaaaccccaccaaaccggtgaaggaaatcaacagagtcatttcatctcaatccaaggtcttgaaaccgagtcgtttgatcaaacaggaagagcgagagaagggagacacgggattgagaccgtacatacagtacatgaatcagaacaaaggttacatattcttcttcatcgcgagcttagctcaggtcacatttgcagttggacagattcttcagaactcttggatggctgcaaacgtagataaccctcaagttagcactttgaagttgatcttggtctacttactgattggattgtgctcagttctctgcttgatggttagatctgtctgtgtcgtgattatgtgcatgaagtcatatgcttcattgttttctcagcttcttaactctctttttagagcacctatgtcattttatgactccacacctcttggacggattcttagcagggtaaatgctaatgaacttgatgaatatttatgtttacattctggtattcaacttctttaactgtaattactttggatttgcaggtctcatctgacttgagcattgtagaccttgacgttccttttggtctgatctttgtggttgcgtcttcggtaaacacaggttgtagtcttggagtgttagctattgttacttggcaagtcttgtttgtatctgttcccatggtttatctagcttttcgtttacaggtcagattcttgtttttgaattccttctaatagattttctgttttcttgaaaaagaaaccaacaatagtttttgattgttttacagaagtactacttccaaacagctaaagagttgatgcggatcaatggcacgacaaggtcttatgtagcgaatcatttagcagaatcagtagcaggagcaataactataagagcatttgatgaagaagagaggttttttcaagaaagtcttacactcattaatacaaacgctagtc

SEQ ID NO: 147041 - DNA, 1210 bp, Arabidopsis thaliana landsberg; identical to SEQ ID NO: 31951

SEQ ID NO: 147042 - DNA, 1272 bp, Arabidopsis thaliana landsberg; identical to SEQ ID NO: 59104
  unsure (1)..(1272): unsure at all n locations

SEQ ID NO: 147043 - DNA, 461 bp, Arabidopsis thaliana landsberg
ggtttataccttcaatggagaaacagagtactcaaccaatttgcggccaagaggctctccaacttctcaattgcgtcgcggagtctcctttcgatcaagagaaatgcgtccgatttttgcaatctctcagagaatgcgttctatcaaaggttggttttttatcgctctaattactgatctacgagctcgtgattcattttttttttataagtcagttgaagttttaggacaaggtatctaaattttaaaattctatcatcgatcgatcaagatatatcgaatcgttattgtcacttatgctttatgacaattttggagctgctcttggtctctcatagaaaacttttgagaaattatcacatttttttctactactgagtaatgaatatgtaaatgccaagttattggtggagcatttggagctttacttgatacatctgtgttaataactctgtggttac

SEQ ID NO: 147044 - DNA, 414 bp, Arabidopsis thaliana landsberg
cgggcaatacacaaaccgcacacttccaacgcgccaggttcggctctacactagttctgaatatgcagctaatcgtaacttacaccttctttaatttgttatatgcagtggggttatataatgattacaactcccgatggcattttggatcatgaagaagctattaaacggaatgtgggtggtcaagctcttggtttctttcattgaactgcaatacggaaagaaactctgatggagggactttgatatgtcaaaccctgccataacatgacatttgtctggctttttcgacatgtgttagattgttggtttgttttcttgcactgcagtttcagcaagatggagaattagagaacaaaatttatttctattatgacaacatttcgaatggtattataaaatctttctcttcgc

SEQ ID NO: 147045 - DNA, 440 bp, Arabidopsis thaliana landsberg; identical to SEQ ID NO: 48856

SEQ ID NO: 147046 - DNA, 550 bp, Arabidopsis thaliana landsberg; identical to SEQ ID NO: 75736
  unsure (1)..(550): unsure at all n locations

SEQ ID NO: 147047 - DNA, 571 bp, Arabidopsis thaliana landsberg
ggataagtggtcatctgcttacgatgtgaggacgatactactatcgattcagagcctcctgggaggttttctatggtgcataacttttgatttcttgttagccctttttgttggttaatccaatatctgatacatgttttcgttgatcagaaccgaacatcagttcaccattgaacactcaagcagctcagctttggagtaaccaagaaggtaaacagacaggggatttaacagtcgttatgaaatcaaacttctttggagtaccacagttatgagtttcttagagtttcttatgtctcttttgtttctccatacgcagagtacaggaagatggttgagaagctttacaagcctccaagtgcatgatttctgcaagctgttctgattcataaatctccaatgcctctgatgatttcacataaaacgatttttcagaagaaaacactgtcattcatttgctttattctttgtttttgaacatcagaagttctatctgtaacgttaccttgagttcaaataatgagtagtatttcagagattaatcaaaaggagaagatacttattattattc

SEQ ID NO: 147048 - DNA, 1173 bp, Arabidopsis thaliana landsberg
  unsure (1)..(1173): unsure at all n locations
gaaagagagattaaaagatagtcaaaacaacaccccactaaaaatgcccataaaagtgaaacccaccacccttctaaactttagcctcaaaatattcttctctctgtctctctctaagtcatctctttgaacatcaggtcagttcatcttcttccctttttctcttatctccttgtttcttctgcaaattactttctcttttctttttcttataaatttcttttgctttttggtttttgtgtttattagggttttcttttcttttcttttgtttttacttttcaatggtctttaatttctttgaaattttgttccctttctttaaaagatgtctggctttttagagatcaactcctaatacctttttattactctcttgctcgatccatacgttagaaagtgattatttgttcccactctctcagatcttttattgattaatctagattcttcttatcttatacatatatagttccatgtatagatattctctatagtttttgtttcatggacttcaactttttatgttctctcaataagttttattaatttacttatttatttgtatgtgctactttttattagatccacttttgctagcatgcctttatatgcttaattcaatggtttgatcatacgtatacttattacagggattaattactgtaattgaagctcacatcatggaccatcatcagtatcatcatcatgatcaataccaacatcagatgatgactagtactaacaataattcctataacaccatcgtcacaacacaaccaccaccaacaacaacaacaatggattcaacaacagcaacaactatgataatggatgacgagaagaagttgatgacgacaatgagcactaggccgcaagaaccaagaaactgtccaagatgcaactcaagcaacaccaagttttgttattacaacaactacagcttagcacagcctaggtacttgtgtaagtcttgtcnnnnnnnnnnnnnnnnnnnnnnnnnnnnnnnnnnnnnccccgtaggcggaggttctagaaagaacaagaagcttccatttcctaattcctctacttcttcttccaccaagaacctcccggatctcaaccctccttttgtcttcacatcatcagcttcatcatcaaactctagcaagacgcaataaaacaataatg

SEQ ID NO: 147049 - DNA, 1427 bp, Arabidopsis thaliana landsberg
cttccggcaacatcttcaagtgcgttagcgcaagagccgttactcttgacggtaatggccaagttctgtacaaccgctactggcaaaaatgttaagatcgttcattatgaccctaaagccaatggggttgacgccaagaaggcttttccattcagaaacatggtaaacgaaaccctgtagaagctcttctcctacttcattcattagtagctttacaaacttgtctttgtatggtcgcagcatttctacacagagccaagggccgctaaggacttattagggtgggagagtaaaacgaatctgcctgaagatctcaaggagagattcgaagagtatgtgaagattggcagagacaagaaagagattaagtttgagttagacgataagatgctcgaagccctcaaaactccagtggccgcttgatcaaatacgccataaagtttgttcttcatttgtaacttcttatgctacactgtgctctttcatttcccacggttcatatgagatgaacatgatttcagctaaaagatcatttaaatattcataaccaaaagaccaacaacaattctggtttacacgaagataacaatttcgcttcaaggaaataaatctgaagacaatcttagatccttagatacctacttaactatgtttaccgaatccagaaagagagataacactgaacctacctacatagcaacaaaagcatcacatcattcctccccttgcttgattttcagacttccaagctttgattccaattcattgccatcttcgccttcctcctcttcgtcttcatcttcaaaatcttctccttcagggtcattgtcgtccaaaggaacaagcttgtccagacagtccttaaacatgtcatttacctcgtcaataccttcctcagatatgaagtttccattgatgttcagaagcttgaaagtatttttcttcacaacagtttgtgccaaggcccttgccccagctcttctgatcatgttggtgctcaggtcaatttcaactaactgatcatgaccttcaactgcctttgcaattaagatagtcccttcgtctttgagttcattctcagataaattcagctttgcaagagactgtttggaggcgatgcaagctgccaaatttccagtggattttacagtaatgtcgttaccagccaattctagaacttcaagagaaggggcggacttaagtagagcttcagaaagtgcctctgttccctcatcctccaagttcaggtaactcatatagatctcggttaaatgagtcaagactgataaagtcttcgccagggcaattccaccttcgactccaaacatgttgtcacgaagatcaagtttcttcaagtggctacagtgttcaagtgcttcagctagtgcaacaccaccttctgaaccaatccttgtagatgaacaccg

SEQ ID NO: 147050 - DNA, 594 bp, Arabidopsis thaliana landsberg; identical to SEQ ID NO: 36836

SEQ ID NO: 147051 - DNA, 1121 bp, Arabidopsis thaliana landsberg; identical to SEQ ID NO: 60106

SEQ ID NO: 147052 - DNA, 1726 bp, Arabidopsis thaliana landsberg
gaaaataaatagttttttttttgtttgggcagcatcaaacataagttaaagctatacgttcgagtacctttgtctcagttcatcagagtaaaggttagaacttttacagaatcagatagcttcttcacagaagaaacgttggagttgattcgcttgtcactgtcactctcaacaatagcttctggcagcggcgttctcgagcttctttgtttgcgtctgttaccaatctcaagcacccaaatccggtttctcactgttgaagctagaaaacaatctagaagaataagatgcgagcgctccttcagcccttttccagtacttattcaatcgaaccgtcgtcttcgtcatggtttctcagagctcaattcgagttttgatcgttccaacagtggagaaactggttccgataccactgtaagtctctctaatgagctcggatttctcagattgtgttatatcaggaaaataacattgattataggttaaaggttaatgctttgtgtattctgattactatactgaacgatgatgatattgtttgttggtgtataagcttagcttaaagatggtgaagaagtgaggagtgaaagctcttcaggtgttggtgatagctatgtgggcttgtttgtgggaatgctcggtttggacaacgatcctcttgatagagagcaggcgatagagacgctatggaagtactctttgggtggaaagaaatgtattgatgcgataatgcagtttcatggttgtttgaatctaattgtcaatcttctcaagtctgagtccagctccgcctgtgaagctgctgctgggcttatacggtctatagcttctgtgaatctgtacagagaatccgttgctgagagtggagcgttggaagagataaccgctctactgagccgaccttcgctagctacagtggtatgaaggattatgattccaaagtagtatacttttgcttgttggatttgaattgtgatgtatgattattcgatgttttgtttttttcaggtgaaagaacaatgcatatgtgctctgtggaatctgactgtggatgaagaaattagggagaaggttgctgactttgatatccttaggctactcattagtttccttgaagatgatgatgtaaacgtaaaggaagcagctggtggcgtcttggccaatctagcccttagccgctcgactcacaagattctggttgaagtaggagtcataccaaaactggtaagaccttgcttttcaccttatagaatttaacaatatattagatatgttagattgaaatgattgctaatagtcaagggtgagaattgaaattactgaaaggatgtgaaattggctgagaatcacttaggctttaggacaatgatattatatatggaaaaccgtagaattgttggtcatgcttcagcttgcttattaccttcccaattggaatccaggcaaaattgttgaaagccgataatacagaaaacaaagggtctaaagttattagaaaagaagcaagaaatgtgcttttggagctagccaaagacgaatactacagaattctcgtcattgaggagggagttgtacccattcccataattggtgcagacgcttataagtccttcagaccggatttgtattcttggcctagtttaccagatagtataaatattaagcagacagcaaaagctccttcaagatttggtgcctctgagctgctccttggtttaaatcgtta

SEQ ID NO: 147053 - DNA, 1126 bp, Arabidopsis thaliana landsberg
  unsure (1)..(1126): unsure at all n locations
ttacaattcttacatataagcgataagaagaattgaagacgaaaattggaaggaggagctgatggaaaacttaaaacaatctacacgcagtgacgagttaagccgttctggtccccctcaaattccaaatcctgactggtaaatttcgtttcatcaataccttctgcttaatattaataatattgattatgaaatattattaactaatgtaaaaaaacgcaactatataatacgtaactgttttcggaaacaaaagagtttacgtcatcaaacagaaaatctttacctcaatttttcttttggccccgatgttttttatactagccatttcctaggaacgacatttccactattgcgtactgttttgtttttcttttgacttcaacgtatatttgcatgtgccaatagaatttatatataaataacatttcatatgatacaaaaaaaaagaagataatatctactcgatcgtttctatggtctaaattggtttgtttataataggaacaatttgtatcaccgaaccacagtggcctcatgtttggtgcaaggagtttacgcaaaggaaagagacagggaaaacaaccgaaatggttccgagtcattagccacaccttggtggaagagtttcaacttcactttagatgaaagtgaaatcctatatgacgcatttgacgactccatatacggtgctgtcttccaaaacatgatcaattatgagaataccccggactcgatagtaggacctccgcgttacatgattgcgttacggggaactgtcccaagtgatgtgagtgattggatacataacagccgtattgtacttgagaaactccatggcggnggtaagcatatgcttgtcattagaaaaatctattcttttgtggccacatatggaaacacagctatctggatcgctggacactctctaggagctggccttgcactactcgcggggaagatcatggccatgtatggatgccctgtcgaggcttacatcttcaatccacctatctccttgattcctctagagcagctagtggagagtgaggatcttaaatgtgcggtccgactcgctagggatatcctcaaagccggcatagcaagagtcctagaccttaaggag

SEQ ID NO: 147054 - DNA, 670 bp, Arabidopsis thaliana landsberg
atggacaagtatgaggttgtgaaggatttgggagctggaaattttggtgtggctcgtcttcttagacacaaaaagaccaaagagctcgttgctatgaaatacattgagagaggtcgcaaggtttgatctttttcctctttggtttctcagaaaaagttttgatctttctttgattggttagaaattagatgaaagtcttcaacttttgggataattgaggattgtgatttgatggtaatatgttggattgcagattgatgagaatgtggcaagagagattatcaatcatagatcacttaggcatcctaatatcatcagattcaaggaggtttgttgatttgttgcataatctgttagtactttaattgagattaaggaacttaaaaacagagaaacttttgtaggtgattctgactccaactcatcttgcaattgtaatggagtatgcttctggaggagagctctttgaaagaatctgtaatgctggtagattcagtgaagctgaggtgtgtgatatatatgctcctttctcaaaatccttacttggttctcttattcgatttttctacaaattcttgattgatgtttctccatcttgctatttttttcaggctagatacttctttcagcagctgatttgtggcgtggattactgtcattcactggtatt

SEQ ID NO: 147055 - DNA, 1176 bp, Arabidopsis thaliana landsberg
aatggtaaatctccaccccacagtagtaaggtattgaaccaaaacgacaagatcagagactgcaagtggaaattgcctgtgctaagttttcaaatcatttgttgtccttgtagagagaagatgaaaacaaaaagcagaatagggcgttcctcacgcaatttttctctccaatttttctcaaggtaactaaaacagaatttgctcacaaaagcagtagacttttctgaactaacttcatatttcccctctctacttgcaggctttttcgattaatttctttggagaatggggtgacaagagtcaggtaacttttacttactcgaattgattcaatcttaaatgcttcacatactcaccataactctcttgtctagcttgctacaattggtttagctgcagatgaaaatccatttggggtggtccttggtggagttgtgtaagtttcactgcaaaactgctacaatcattttgtgtctgcatcacaaaagtaatatgtttgaagcgacgttactgactaaatagtatgcctatacagggcacagtttttgtgcaccactgctgctgtaattggaggaaagagcttagcgtctcaaatttccgaaagaatagtaaatatctctcattatccctttctacatttgagattaaacgactcatcaaaagctaaaactcgggtcgtgtaatgttgttgttgcaggtggctctttctggtggaatgcttttcatcatttttggcatccaatcgtatcttacttctgttgaggcttaatgctttcttatggtaatgtttctaaatcttaatctatttctgatgttcatcaatttcttttccaccacagtcttctgtcttacgctatagtttttgttaaaaaaagtgcaggtttgtagggagactgatgaagaggaagaacgttactatccatagtttattagacatttaattttgtttattagacatttacacaagtgattacaaaacaaatctgagagtttgattgtctacagtgaaaacattgaaatgtgctgaagcagccatctgacttcaataaagtttttttggtaatcagttttaatcctcttttgttttttggagtcatttggattttgaaatgttttgcaaggatttgactcaatgagatacaaaatgcggctttgttttattatcgtataacaaaa

SEQ ID NO: 147056 - DNA, 218 bp, Arabidopsis thaliana landsberg
ggttgacagagctttagttccgtacaaatggcaccgccgaagagtaagaaggttgacggagaaggaaaagggaaagctatagcgaatacgaggatgcttcgaagcatggatcgaaagacccgaagcgatactaagcgagatggttcttcttctaagatcatgaagatcgaatctccggagaagaagaaacggaagacgacgaaagcgaagaatgtagg

SEQ ID NO: 147057 - DNA, 915 bp, Arabidopsis thaliana landsberg; identical to SEQ ID NO: 24113

SEQ ID NO: 147058 - DNA, 706 bp, Arabidopsis thaliana landsberg
gcactccctcaggaacattacttagaggtttctaagatgactcctcctccggatcgttcctcctcttctctctctctttctgtgttttctctctatgtctcgtcttaggtacaactgaaatttcagtactgttacttaaaccctagcttagctgctgcttcctccacttagggtttatggtgggatttacagatttttgattgattttgcagaaagtgagtcctccgtcaccatttgagattgtgaaaggatcgcttgaaggaagtactggtgctgttctgaagaaatctgttggaaatgaagagatcaatcttttcgttatgcgcttggctcacggaggtgatgaagaagacgatggtgggatcaaccagttgttccttcatgttgctgtatcaaagccaaatcagcctgattctttgcatttcctttgtggcctttaccctgatgcattgggtattcattctgtttccatgaggccaaaacttgaggctttggagatgtctgatgatcctactcaatacacaggcccttcttttgagtgagtttctctctttttaacttctttttagtgagtttagagacttactcaatatatgcttgcctttctagttattcagttgatggttgagaccttataggtgattcatttctgttttgagctgtctcgtcttgctacactcagagctctcaaactaagaataggcca

SEQ ID NO: 147059 - DNA, 739 bp, Arabidopsis thaliana landsberg
cacaatgttttacagttgcgcggatggtttacccgcttttatccaagaaagatacattttcttaagagaaaccgcgcataacgcttaccgaagatcttcctacgttatatctcactctttagtaactctgcctcatctcttcgcactttccataggctttgcagcgaccacgttctggttcgttggtctaaacggtggtctggcaggttttatctactatcttatgatcatcttcgcgtccttctggtcaggatgctcgtttgttacatttgtctccggtgtgattccaaacgtgatgatgagttacatggtcacctttggctatctctcatactgcctcctcttcagcggattctacgtcaaccgtgatcgaatccatctttattggatatggattcattacatttctctgctaaagtatccctacgaagctgttctgcacaacgaattcgatgatccctcccgttgtttcgtgagaggaaaccaagtgtttgataatacaataatggaaggagtgtctgaaacgacaaaggctaagcttctggagacaatgagcggttacttggggatggagttaacggaatcaacgtgtttgacgacgggctctgatttgcttaagcagcatggaattgagcagctggataaatggggttgcttgtgggtaacgttagcttggggattcttctttaggatcttgttttatttttcgttgttgcttggaagcaagaataagagggcg

SEQ ID NO: 147060 - DNA, 567 bp, Arabidopsis thaliana landsberg
tgcaattcttcagtttccgtttctctcctgagaaatttattgacttcaaaaaccctaaaaagacttgtgattgttcgtttctctaactcgaatgttgatcgtacgacggtgagtgatcgtagtacaatgacgaagaaatcacagccgcagattccgcctccattgtcccgtcgcggcggcgtcgtgtggctgggatggaaactcgtaatcgctttctccgtcgcgctttgccttcttgctcttcttcgaatccaactacagtacaattccttcacgacattgtcgtttccactctccgtcgcgagatctcagacaccgcttcacaaatactccggtgatcgtcccaagctcgctttccttttcttagctcgccgtgatctcccacttgtttttatgtgggatcgtttcttcaaggtcgaaaaagtttcttagtcctcttcatacttgtccgttattctaaatttcgatataattgctgattctggtgcttttgcagggagtggttcatgcgcatttctcgatttatatgccttctgtacctggtttcgcgttcaatgcagtctctgc

SEQ ID NO: 147061 - DNA, 824 bp, Arabidopsis thaliana landsberg; identical to SEQ ID NO: 54325

SEQ ID NO: 147062 - DNA, 1437 bp, Arabidopsis thaliana landsberg
actttgccttgcaacgtactcactgtctcaaactttaacatttagggtttggctgttaacactcattccttacatggttctgtagtttttttttttttaggttctgtatttatttgtgctctaacatattccttttgaaactttcatggttgcaggacttgaaatgtcttgttttttcgctcatctctctgcacttcaaaatcaagcctatctagagaagaaaatcagtttgtgacatgtcaagacgcgatgaatttgttgggaacatgaggactttgtgactgaagtttggttgtttttatgtctctggttctctgttttttttttttgttggatttgggtgaaagtgggtatgtaagatgttctacctcaacttttggtccttttttgtgtcaacatcccatgtgaagaacctttcatgaaccacaacctatcttctaaaaaccatatacttgctgttttcttatcacaaatcattcactctccctaatgtacatctacatatgatgcatgtttcttttccctcaagccaatttaaactaaggaatgtgatctatctaaaatacaaagtatcaaaaactagctggattagtcgataattaggattgtttccattctaaaaaaacgccctcggaccattcaaactgctcctccaaaacccgtaaatctggttttgcattgaagatatcaagagtagctttttatgaatcgggaagaacaatggaggattcatttgtcagtgtcaggcggattactcacagcctagacagaggacgcacctgccattcatcctcaggttaagcacgcactagtctcctttaccttgttgtagtgtgttgcagagagtcacatgcatatttcatcttgtggcaggatcaggtgcatggttagggcggggactggcttgtgtttgtgcacagaaaagggatcaccactctcgttattcctttgatctcacccctgctcaggcaccaactagcatcagctagttagaaagtaaaacttttaagatggtcggggaaacattagtagctggttagttagttagttacagcagctttgggttaagagagataaacgcgaagccatatatattgtcaattggatggtgtataatttattgttagaaaacgagtccgcatttgatatttgatattgcattgcgttcaaggtgatggatgataagtggctcacaatgcgggattcctacatggatttttttttttttttttttacatggattttaacgtagcctttctcctccatatagctttgactttaagagatcaactcagtcttcagagactgagtgtaagtaaatttgtgtttgtttggcagacggtgctgaaatcgacaaggcatcaactggagagagagcttctactggaagatgggacccgagtccaagccttaccttgttttaacctcctcctccag

SEQ ID NO: 147063 - DNA, 1639 bp, Arabidopsis thaliana landsberg
aggtcgactctagaggatccccattttgaaaccaaatcttgtagctcctggaaattccatttggggcgcttggagttccgctgccactgaatccactgagtttgaaggtatacaaagcatgacattgatatagttgatgacattcccatttaaactgttgtgttccttttgctcattttaggagaaagttttgcgatgatgtctggtacgagtatggctgctcctcatgtagctggtgtggctgcattggtcaagcagaaattcagaaagtttagtccttcagctattgcatctgcactttcaacaacctctgttctatttgacaataaaggcgaggcgataatggctcaacgtgcttatgctaatcctgatcaaaccatatctcctgctaccccatttgatatggggaatggctttgtgaatgcaaccgcagctttggatcctggcctaatctttgatactagtgagttaaacacttaacataaccttggcagttttctacattttcaaattaccaaatgtagacaccattttaacggtctttctatgcaggttttgaagactatatgtcatttctttgtggcatcaatggatcagctccagtggtattcaactacaccggcacaaattgcttgcggaacaatgcaacaatcagcggatctgaccttaatttgccatccatcactgtatcgaagcttaacaacactcgaacggtccaaagactaatgacaaacattgctggaaatgagacctatactgtcagtttgattactccttttgatgttttgataaatgtatctcctactcaattctctatagccagtggagagacaaagctacttagtgtaatcctcacagcaaagaggaacagctctatttctagttttggagggatcaagctgctaggaaacgcgggacacattgttcgtattccggtgtctgtcacagtgaaaatcgcctcgaaacaatgaagctggtaatatatacacagagcttggtagataagagaaactgtattcatttcatttttccatgtaaatgtcacatagcatttataatacatggtacattttatttgatacaatatgtaaaactagaggaaagattccacagtcattaaaacacaataaggttctagtagaaaacatattgattcattacgcattgcctccatctctgtttcctttgcttggcgcagaaggcaccttctcggtttcctcttcctcagcagcagcagctccagaagacggtgttgaagttacaggaacggaaggattcgtaggtgtacccattgggaaaggagcatacttgtggaaaggccatccctggaatggtagtctatacctgaaaaaaccggctattgcagactttgttgcaggctcatcaatatgtgtcatggaggatgatgaatcaaccttcgggaattcagaaaaaagcattgccggagaatgaacatgttctttcccatgcttcttccctattgctgctgatgctgctgcgagtttcgggctgcgagagcagagcacaagtggggaactgacgaatgtgagaaagattagacagagataaactcttgaaattgacattgtagctgattttggagtgtttaacaagagatggttcttctttttgttttgaa

SEQ ID NO: 147064 - DNA, 530 bp, Arabidopsis thaliana landsberg
gttcgagcttgagcaataaatgaagatcgagcctctcatcgtatatgtcatttaccaggtacacctttttagatagaacctttcatcaaataatggatctctaaatctggtttgaaatgtgaaaaaaaaaaaaaaacaggacgagagagcaaagcagtggagagttcaagcagtggcggtcgcaccagacaggtttgagaaccgaaagcctctccctgagaaatggagaggccttagggatgaggaactctcgaaagctgctgagattcccggttgtgtctttgtccacatgagtggctttatcggcggaaaccaatcctatgacggcgctctatccatggctcaaaccgcactcactctctgagcatcaaaagaatcatttacccattactcatagagagagaccgagagttttgatattgccattatcttctgcaatttctgtttcattgagtcttctcgtgacaaaaaatttaagaactagatttgtagtctcaagctgattagatcatattatatgtttgcttcct

SEQ ID NO: 147065 - DNA, 694 bp, Arabidopsis thaliana landsberg
cacataaatcaaattcaattcgtttaaaaatggagagtcaaaagcaagaagataatgaatacattttccgcagtttgtatccatctgtgcccattcctgacaaacttacactggtaattaatatagctaagaacagtttttcatttccggtttcggtttattataatttaggttaagattcggtttataaatactaatggaattaactaatggctatgtgaaaaaagcctgaatttgtgctccaaggagttgaagaatacacagagaatgtagcgtttgtagaagcggtgaccggaaaagctgtgacgtacggtgatgtagtgagggacacaaagaggctagccaaagcgttgacatctctcggactaaggaaaggtcaagtgatggttgtggtcctaccaaacgttgccgagtatgggattattgcccttggtattatgtctgccggtggagtcttctccggtgcaaatccgacggctcttgtttccgagatcaagaagcaagttgaagcttccggtgctagaggaatcatcactgatgctactaactgtgaaaaggtaattaaacattactgtttttttttatgatttagaacactttttaaacaacaaaagtatgcacatgataatttcgttcggtttggttgctgcaatatatggtgtagactaaaaaccaaaccgacataattccgcag

SEQ ID NO: 147066 - DNA, 1251 bp, Arabidopsis thaliana landsberg
ctgcctgttgaaactttttcaatctggcaatcatgccaaccgttctcattggaacatccggtgttggtcagactttttcaaaagaagttgtcgaggccatggctaccaacaacgaggtttcttcttgttcttactctctgctttttcagaaaacaaggtatttatgctatttttctaatgctggtcttggtgttggcttatagaaaccgttgattcttgctctctcaaaccctacttctcaagctgagtgtactgctgaacaggcttacacatggaccaaggtataatattgtctcatatgacatctgaatgtgattcatgtcctcactcccgattatacaacaaaattataatttggttttcatgctgctcctcgaatctaatcatatattgtgcttaaaaaaagggtcgtgcaatctttggaagtgaaagcccatttgatcttgttgtgtacgatggcaaaacctacttgcctggccaggttcgtgctatttcaacaacttcttctctctcaactttgtatatctgacaatcttagagctcacatcatatttccactatcctacttaacttcaggcaaacaattgctacattttccctggtctgggtcttggtttgatcatgtctggggcaattcgtgtccgtgatgacatgctcctcgcagcttgtaagtaaaaataaacttcagaaaatcaaacatggatactgataaagacacttaaagattctcaatgtcatctctctctcatgttttcaacagctgaagcattggccgcacaagtgacagaagagcattacgccaatggtctgatctacccgccattctcaaacatcagagagatctctgctaacattgcagcctgtgtcgccgccaaaacctatgacctcggttagttgaatgaaactgtcttaactcttttaatgagactgtctgaactctctaatctcaagttctaaaatcgatgtattgtggtgtaggattggcgtcgaacctgccacgtgcaaaggatcttgtcaagtttgcagagagcagcatgtacagccctgtgtacagaaactaccgttaaaaaagttttgttgaagaaacctgcagattatactattcacaacccttgatagtttcttaaggcttgtatttaagttttttgtttgtttgttgtttgttttctcttctacattatgatgctgtttgtgaactctctctctgtctttgctgataaataataaattgttactaatataatctacaaa

SEQ ID NO: 147067 - DNA, 402 bp, Arabidopsis thaliana landsberg; identical to SEQ ID NO: 49867

SEQ ID NO: 147068 - DNA, 484 bp, Arabidopsis thaliana landsberg
agcgatgaagatgcacatctttttcatgaggttgttaattccaatcctgaaacgtgggggcagaatttttggaggcactgggaagctgcattttgttcccgaactcagaaagagattgttagcttctacttaaacgtatttgtcctcagaaggagagccatccagagcagagcttttatattggacattgatagtgatgatgatgaatggcatggatgttatggaggctcttctggtactcgttatgtagaagaagatgaagaagactctgcaatcgagtctcctcttcatcaagggactaagaaagtgtatccactccatcatgaagaaggtgaagaagatgttagtcatagcagcaatgatgaagatgatgatgatactaaagaaggtggcactggtctgtatgacgagctcaagaagaattaaacagttgaatacatggatagattttctgggatcaatggagagggattgaacgtgaaga

SEQ ID NO: 147069 - DNA, 954 bp, Arabidopsis thaliana landsberg
cactcaatgatatgtaggatgtatgatagaaaattatgaccttatgtttgatagatctaacttcttccaatttggtagtcttggtagctaataacggatccttttgtcctctgtagatgttggtgaaatctgataagtattttggaaatgttccatatgagttgttgatgtggtgcgttaaacatcctcacctgactgtacacaggtaagtttgtacctattgtgtatcttatcagtgcaaacatacctaaaattctcacctttgactaaactctgacagtgagatggaccttgttgatggacttcttatttggcttgatgccggtggaagattgtctgacttaccagagagtagtcaagataacacaatcaacttgatggaacaggtaacgtttagaaggtctgcacctatgcatagatgaatttttctaagaaatttaggacaaaactggactatagatgtttagctttatggaacagtagttcttactttaggattattttttatttctgggaaattatattgcaggtccgttttagtcttttgccgctgtggtttattgcaggtaatgtcatgacagatgtgtgtgaaatattgattatatagcagaaggtcgtttagtttagtttgttcccatatctcaggaagaagcaagtctcatggtttctcaaagtttgctgatcaaagcattgaattggtgactaaactaatgaaaatgccatccacatgcttggtcgatagtctaaccgatggccctccaactgatgttagagttcggctgactgaatacagtgaggtatctattcttaaatgaattttcttcctggatttgagctaactagttgtatcaggagttgtatttcaagttttgatacaatttctacgagtatctgtgttggatatcttataaatctcacttatgtactgggttataatgattttttttgttcttt

SEQ ID NO: 147070 - DNA, 1510 bp, Arabidopsis thaliana landsberg; identical to SEQ ID NO: 59508

SEQ ID NO: 147071 - DNA, 590 bp, Arabidopsis thaliana landsberg
aaaaaaaataactctttatttctctctacaaatttcatttgttccattttctcaattttagaacttaagaaacccaaaaagcaaatttttagtacatttttaggtttaattaaagtaattaatttttgtgtgtttccatcaaaattccacttgttttctacagaaattttcaatctttttattattgtatctctctttaagacatgaactgtctgttcttgttcaaatcaaagaaacccagaaagcaacagaaagacaacaacaagaacaaaagaaaaggtaaagagttgttacaaaactcagctccagaactgacgaatcggagtgaaacgtcttcgtttaatctccagacaccaagatcgttgccttctccaagaagtatcaaagatttgtatacagagagagaacaaaatcttagggttttttcttacgaagaactcagtaaagccacttatgtgtttagcagaaagcttgtgatcggtgaaggtggatttggtattgtttataaaggaaagattctcagcaatggagattcttctgatcctccacttgtcgttgccatcaagaaactcaatcgacaaggtttacag

SEQ ID NO: 147072 - DNA, 1343 bp, Arabidopsis thaliana landsberg
gccaggtcggagagccaggggcacgggcccgcaaagccgcggcaggaggggcggcaaaccaggggcatcaacttacatagttggagttcaagaagacaaaggtttctaccttgatccgcatgatgttcaacaggttttcttgatcactccttataaatctttattttagaatcaaactagaattattgtagttccaagaaaaaacttaacacttcgatctgaagtttgagacatataaggtggtccatatatattttccttatattgtctccatcacattcatttatgtattgtctaattggtttggggactgatattactcagtccatgtgcttcatatcatatttcagtctcactgattgagccttatcggtaatggttggtaggtagtgacagtcaagaaagaaaatcaagatgttgacacatcgtcttaccattgcaagtgagtttgattgatctttttgcctcatttagttctctgtctctacatggttcatacttgttcttagtaatcctactaaatctgctacagtaccctccgttatgttccacttgagtcactcgacccgtcactagctctcggattctattgccagcacaaaggtattaccagtttataagagtggtggtcaatcctatttacgatttggctttggttttgggataaacaagttatcggtttgattcggttacttcttttttcataacgtggtcaatcctactttgtaacagatgattttgatgatttctgtatccgagcaacaaagctagccggagactctaatggtgctcctctcttcactgtgactcaatctcacagaagaaatgactgcgggattgcagaaaccagcagcagtacagagacatctacagagatctctggtgaggaacatgaagatgactggcaattactttgaacacttctcctagccattcttttcattgtgtgactttgttcaattatcaaaataccattctttttacatcgatactaagatttgatgttgtataaataaagaaaaccccagattaaagtatcacccactctcacttgatttatgtattaagtattaactattaacgttgacttaagtcaaagtgttctacaacagagattcttcaaacgtagattgaagaacacgagaaaggaagactcgaaaaaccagagggagtgttgacgtggctccacttcccgccattcttctccgccgtcgtcgtcaccatcatcgatccactttcttcaccaccaccgccaatcattgccaccgcttggccactcaaacttgcagcaaaaaccgaagtcatcgtcgtcaccggaagccgaatcgtatgcataattacct

SEQ ID NO: 147073 - DNA, 1722 bp, Arabidopsis thaliana landsberg; identical to SEQ ID NO: 29674
  unsure (1)..(1722): unsure at all n locations

SEQ ID NO: 147074 - DNA, 568 bp, Arabidopsis thaliana landsberg
cagattcaaagaggtaaaaaatgtcgttgtgtttggttatagcttgtatggtaacatcatggatcttcttacaccgatggggacaaagaaacaagagtggtccaaagacttggcctttggttggagcagcgatcgaacagttaactaattttgatcgaatgcatgattggctcgttgagtatctttataactcaagaacagtagtggttccaatgccattcactacttatacatacatagctgatcccatcaacgttgaatatgtcctgaaaaccaacttctccaattaccccaaggtgaaaaaagctctttatatcaatatcatgtatatgttttgttgtgactttgattttttgttgtatatcagggagagacttatcattcttatatggaagtattgttgggagatgggattttcaattctgatggagagctttggaggaaacagagaaaaaccgcgagtttcgaatttgcttccaagaatcttagagattttagtactgtagtgtttaaagagtatagtcttaaactcttcactatcctttcccaagcatctttcaaagagcac

SEQ ID NO: 147075 - DNA, 637 bp, Arabidopsis thaliana landsberg
aaagggtttactctgtcttcttcagacttctcagtgatcgaagctatgatgacgacaacaaccaatactatggctatgcttcaaaacctcgtcttctctgttccaatctctcgtatggtagttcggcgtcactccctcgctaccaccttctccgctgccgccacaaccgtcgtaccgtctcctaaaccggtatcagccaaaccggcgcgtactccacacgtcgactcacatgttctcatcggaatgtcagagcctgagcttcaagagcttgctatcaacctcggtcgagtaaagatctgatttttgcatataagattcgagaagaaggaatttggttgattaagctgataaagttctgatttttcaggaaggatacagaggaaagcagctccatcatcttatttacaagagaaaggttaataaagttgaagactttagcaattgtgagcaaattcttatcaagttctatgttttttgaagcgtcttcattgacagttatgcaaatgatttaccaattatcttccaattttcatgatgctaaaagtgccactgacgttttgtaaaggacttgtggatggtgaatatatagtggctagatcacccattcaacagactgtagcgtccaatgatggaccac

SEQ ID NO: 147076 - DNA, 768 bp, Arabidopsis thaliana landsberg
ctgacgcgggagcagcaaaacgatccagccaattttgctgattgcatacactggtgtttaccaggccttcctgatacatggaatgagtttctctatacacatattatttctcgaagatgagattctttcatcctcttttttggtttaaaaaaattcttgtgatgtatataggacagagattcaagggatttgaagttagccaagtaaggctaaaaatttgttgaataaagtgtacaattcacagggaaacacagatactataatttcagtaaatgacaagattagtaggtgtgtattatcagctacatgattgtaaaagatgttgaagtagttgaagttaaaacgttttgatagaccaactacgacccaacattcattaatgccaaaaccaattttctcatatcgccagaaaccgaacacaacgagatgaagcaaactgacggcagagaaaggaaagcttacctttctctgctatactttgcagtcattcttcttcccgtattccttctcggatgctatctgtacaacgagaagcagctgagggttggccagtttcaggaattcaatacacataacctgcaagaacacatcactccactacaacaaagcaaagaagataaagacaagaagactgatcttgttccattagaattctgtgatgttttcacaggaaaatgggttcttgattacgtcacacatcctttatacaaagaagatgaatgtgagtttctatcagagtgggtggcttgtacaagaaacgggaggcca

SEQ ID NO: 147077 - DNA, 1302 bp, Arabidopsis thaliana landsberg
  unsure (1)..(1302): unsure at all n locations
gtcgagaagagaatgaacaatgaagtgaactaataaaacttccttttgcaatttcacgacctccattttcgtgctgagattctctaagctcgatggatctaacgacgacgcgtcagaggcgtccacttgtatctgactcttcttcttcgtcttctacgaaatcttactcgaagaccgataaacctggccgatctaatggcggtgatgcggaggatggtggtctccgatggttcttgccgtttatagcgctttgttatcttcgttacatgagcgcgacttctaatatcattcatgactgcgatgaagtgttcaattactgggagcctcttcattatattctctacaagtccggatttcagacctgggaatacaggtttgcttttccgctacatttgattatgttactactgagctaaagacccgatgttagctcgagtgagcatgtactttgagctgtgattctatacttatgtatcggtgactactgattctcaacattttgtttcaatttgaaatcagaaatgtgaggttgggatttggttttagtggaacttcggtttcaacggaatctttattaggttatcgagctttgttttatatgaagatataatcatgagattgattactttttttttttgtgtgtgtgtgtgtgtgtgtgtgtgtggtatnntttgcagttccaaactttgctcttcggtcgtacttatacattctattccatgaattggctggacggcctgcttcttggtggtttggtgatgacaaggtaagcaatgcatacttactgatgtacattctaatcggtatagatataactgcatgtttcttatccagtttacgtctatcttttggataggttagagttttctatgcagtgagactctttctcggactggtttctgcagtttcagatactgtcctggttgttgcgctctccagaaagtatgggaaacgtatcgctacctatgcagttgcgatgctctgcttaaccagtggctgcttctttgctagtaccagtgagtgttttgttttgttttgatttgttgttacacttgcttaagctttctgtcatatttccttaatatgcatatataggctttccaagttattcttgcatccgataggttttagtttcaaatgcttgtataagttattccaaagacattgctctgaatttggctttgtgttctggtttctaactaattcatgtttctctaaaattttgataggaaacctccccaaatcattttctatgtacgccataagcctctcatctggtttattactttcgagaagtatgcc

SEQ ID NO: 147078 - DNA, 1582 bp, Arabidopsis thaliana landsberg
gttctctcacaatcaagatttgaagcaaacgttttgagaaaaatcttttgacaccatcaagtaagtttttatctttcttatgttttttgtggtgtacctgcattgtgcctagttttggtacttgaatcatctattttggaatctagagtattgatctggagtatgattagtcaaatctaggatttttaaggaaaatggtactgagagattgtattatttgcacatatcaggtgttcagtggtagtgatttgatatgatttggtcattgtttgaatgaaagttggattattgttcagatttggttggcggattgtgggaggaattccagagcaatatagcaggtgatggttgtacaacaatggctaagaagaagggcttgttcactgtattgaaaaggatttttatttcagaagttaattcagaaaaggtgaagacaaagatgttaatctcattctaatgctgattgttgtttctgcatcttgtttgattcttcttgtgtatttctgcagaaagagaagagaagaaaatggacattttggaagcttaggattaagaaaagattaccttccattacagcacctccagagcacaggacaagtcatgaatcgcatgaggaacagaaggaggaaattgtgtcagatgtgggtgagatcagccaagtgtcttgtagtcgacagttagattccatagaagagtcaaaaggttcaacatcaccagaaactgctgatctggtagtccagtatcaaatgattctaaatagacaggaagaagttcttgctgctactcgcattcagaccgcctttcggggtcatcttgtaagcttgtcttacccttttcttatgaagctactgaaagaatcgactcattttcatactggagttatgtagttaccttgtagctgtgttgactatagttgagtaggttaggtagagagctaagacgttgaaagtaagtttaggcagaaggatttggggattctgaattagtttaggatcttggtttgggcagtaatatatacattttgtctcctgtgtcagtcacctattaagtcttttgagaaccagatgtgaatcttttaaagcgatttctcttcttcttttattgctggattttgggttgatttttcaggtgacatgctgacaatgtttttgaacttcattgcaggcaaggaaagctctacgtgccttgaagggaatagtgaagctccaagcatatatcagaggtcgtgctgtgagacgccaagcaatgactacactaaaatgcctgcaatctgttgtgaacattcagtcacaagtctgtggtaagagaacacagattcccggaggtgttcacagagattatgaagagagcaatatattcaatgataacattctcaaggtatgtcttctgatctaaaaatgtaaactcgttgccaacagtgcagcagtttattagtatgtattggtttcaggtggacacaaacggtcaaaagagatgggacgatagtcttttaacaaaggaagaaaaggaagcagtggtaatgagcaagaaagaagcttcactaagaagagaaaggataaaggaatatgcagtcacccaccgg

SEQ ID NO: 147079 - DNA, 397 bp, Arabidopsis thaliana landsberg
atggcggccacgtttctgccggcgacatctctccgtctaactcaaaactctactctccgcttcttatcattcttcaccatttctaacccttcttattctctcttccgtcctctacgccgccgtgttctccctcccttcgatgcttttccggccaattctcgccggagatgcttttgcacagctgtttcggaatctctcggctccggtgatggaaataaagttgagagttacgagaaacgatttgggagtaaagttggagaattcaggaaaaagttgaggatagctgaagtgaaaggaggagcggacgaaggactgagtcgggtccggcccagccttaacattatgggttgggaagtaaacttcgatctcagagcagtgtcacattcattaggtgttc

SEQ ID NO: 147080 - DNA, 1900 bp, Arabidopsis thaliana landsberg; identical to SEQ ID NO: 59672

SEQ ID NO: 147081 - DNA, 734 bp, Arabidopsis thaliana landsberg
ttcatgtacaagtgttgccaagaagattgtgagtttaaaataaatgtgaagtgtgcttcttttgccgaaccattcgaccatagtatgcataaacatcctctttatcgggctatatactttgatgaatttatttacaggtgtgaaggttgcactcaatcttcaagatttgcagcaaaatgttacaaaggatgctggtttcccttggagttcaaatgcttgaatttaccaaaactggtaaaatacaagtatgactcgcactcactcactctatacagtgataaatattactcgaagagttttcagcttgagtggtggtgtgagatttgcgaagaaaatataaacaaaaagaaacttttctacacctgccatgaatgctgcacgactctacatgttgaatgcatcttagggaaatacccttatttgaagtctggccataggatcaaagttagtggtttggaggtcgagattgcttcaaacaatggtgtttctcggccggtgtgtcatacatgtcaccgtatttgccaagacaaaaaaaaatttaatggaaaagatgatgtatatttttgttctatcaagtgtattcattctaccaaatgagtcctgtataaaaatgcaatgcaagtgacgatgtaatgtggaaggaaataaatgatgtgttcttacaatttcaaacttataaaatatcaaagtctttcaccgtaaatgtttacttcgccttcatggcaacacaagca

SEQ ID NO: 147082 - DNA, 623 bp, Arabidopsis thaliana landsberg
aaagacgaatttatcagtaatgctgaagctgaagtagcaagactctcaagtgcaggtaacattttatgtagagtgcttcctgttttgtagttatgctttctctatcaatcgataccatctctgtgctaaaatgagtctcatccccttctatttgggtattcttcagcttatggtgtggatatgttgaatacaattgggtatatatatgtaagacaagcagcaaaagagctagggaagaaagctatttatctcggagtaccattcattgctgaatggtttaggaacaaaggtcacttcatcaaatctcaattaacagctgcaacaggtaagattaaagaagaaactaaaccaagaatagattttagaatctggtcttctctcttacgaagaaagaaatgtagtgattttgatttttgttcctggctgtttattgtcatcctaggcgcatatgcgttgttccagttgcaggaggaaatgaaaaggcagctaaatactgaaggaaattatactgaggaggaacttgaggaataccttcagccccataaaagagtgatgattgatacactgtaaaagctcaatgtcgctgatatcgaagccactctttgtcgtgtgttgtcaggtgg

SEQ ID NO: 147083 - DNA, 1643 bp, Arabidopsis thaliana landsberg
cgagttgatgggtcagtcagttctatctcctctatttttttttattatgctatcaaaagcttattggtgtgggggttcaggttgtacaaagttttgaacgttcttgagttcaacagcacgaggaaaagaatgtcagttatagtgcaggaagaagatggaaaactcttattactttgtaaaggagcagataagtaagtgacctttgactttagaaaaccatttcatatagattttgaacttatttgtttgatttgtttcgttttctagtgttatgtttgaaagactatccaagaatggtagagagtttgaagaggaaacacgggaccatgtaaacgagtatgctgatgcagggctgagaactttgatacttgcttatcgtgaacttgatgagaaagaatacaaagtattcaatgaaagaatcagtgaagccaagagttcggttagtgctgatcgagaatcgctgatagaggaagtcaccgagaaaattgaaaaagacttgattcttcttggagctactgctgttgaggataaactccaaaatggagtaagcaaacactgatgatagtcatataatcaatttatagttggtggattgaaatgtcttatcttctctctttatccttgattcctttcaggtccctgattgcattgacaagcttgctcaagcaggaataaagatttgggttttgactggtgacaagatggagactgctatcaatattgggtatcattttctgggtatcaccttaatattgtctactcttgagttcctgcatacagttttcttctacattctttccactctttgaaccctttgtgtgtttgtctttcacaggtttgcttgtagtttgctcagacaagacatgaagcagatcataatcaacttggagacccctgaaattcagtcactagagaaaaccggagaaaaagatgtcattgcaaaggtaaaaaagataccaaagaattaatattttgtggagtagtattagcagaagattatattagatgaatgtatcaatgtggctagttgttatcttgcaggcatcaaaagaaaatgtcttgtcgcagataattaatggaaagactcagttaaagtattctggagggaatgcttttgctttaatcattgatggaaaatcacttgcttacgcgttggatgatgatataaagcacatctttctagagctggctgttagttgtgcgtctgtcatttgttgccgttcatcaccaaaacaaaaagctctggttagttttaaacttattcttgaatcttgagtatacttttgctgctgtcaagattttcacaataagtaaatcgctatgtaggtgacaagactagtaaaatctggaaacggtaaaacgactttagcaattggtgatggtgcaaatgatgttggaatgcttcaggaagcagatataggtgttggtattagcggtgtggaaggaatgcaggttcagtttagatttatttaactatcatttgttgattttcattgtgtgtttgttttttttggtatgggcttaatcctgatcattgttcacaggctgtaatgtccagcgacattgcgattgctcagtttagatatttggaacgtttgttgctagtccatggacactggtgttacagacggatctcgacaatg

SEQ ID NO: 147084 - DNA, 440 bp, Arabidopsis thaliana landsberg
atgtacagagtagtggaaagtgttggtgaaaatgtgaaggaagtggtagaaggagacaccgtactaccaacgttcatgcctgactgtggtgactgtgttgattgcaaatctcacaaaagcaacttatgtagcaaatttcctttcaaggtatccccttggatgccaagatacgataattccagcagattcaccgacctcaatggcgaaactctctttcatttcttgaacgtctccagcttcagcgaatacacggttcttgatgtcgctaacgttgttaagattgattcttcgattcctcctagtcgtgcttgcctcctaagctgcggagtctccaccggtaaatcactaatattggaaaaacattatatattcaacgtttgttactctttgattttgatggagttagattaacttttccttaggtgttggtgctgcttggg

SEQ ID NO: 147085 - DNA, 740 bp, Arabidopsis thaliana landsberg
  unsure (1)..(740): unsure at all n locations
ctttctctcactttcccgggaaaatcggcgaccaaaattggaaaatgtactcagcgattcgctcgcttccactcgatggtggacacgttggtggtgactaccatggacctcttgacggaaccaatcttcccggtgacgcttgtttggttttaacgactgaccctaaacctcgtctccggtggacaactgagcttcatgagagattcgttgacgccgttactcagctcggtggtcctgacagtgagtactactttgtctacttatctctttgttcagtttcgttgctcggtccgttaacaaaattcgactntnnnnagggtttgatggattcttctctcaaagtttagatatttctgatttctgaagaatatgtctcgttacttgattcgatgaagtttatggtttgttgttctcgagacttgaattgagatctttataactgtagctctttatgtgtcccaaaatagaagcagattctgcagtgtataaatttgtttcctttttcgaaattagtcagttgtaattaagtagtgtcagtgtcatctctaaatattttgaagcttgtgaattgctttgtagctaagatttaactcctgtgttgtcttttacctcacacatgtttttgaagagaccgttctgactctgtctgttcaatttacagaagcgactcccaaaactattatgagaacaatgggagtgaagggtctcactctctaccacctcaaatcacatcttcaggt

SEQ ID NO: 147086 - DNA, 533 bp, Arabidopsis thaliana landsberg
tcttataatttggataatcttcatcatcagcttgagacagaagatcatgattttaaaggctttcaagacctactgcttaacccggtgctcaccgccggttgttccactgatttttccttgcaatcaactcatcaaaattatatatcggattgcaaccttggatattttttacagattgggtacgtaataatcgatatttttgcttctctactgatgaaatacaagtcatggttttatgaataaatttggccttattggatacatatataatatgaatatgatacatatgtaggtttcaacaacactatgagcaaggtgaaggatcttcggtgacaaagagtaatgcaagaagtgatgctgagaccaactttgtccaatgatgggtttcgttgtcttggtttggactcattgagtcacgacgaagcgtttaggtcatttactatcgggacatactctttttttttttttttctttttttttttcacaagacatactcttttctttaatttcaattatttgttagagttctcgtt

SEQ ID NO: 147087 - DNA, 604 bp, Arabidopsis thaliana landsberg; identical to SEQ ID NO: 24375

SEQ ID NO: 147088 - DNA, 508 bp, Arabidopsis thaliana landsberg
acatttaacattaatatttgaatatcatttactcatcttcatttgtgttttttcggacatgtacaatgggaccagatgccggcagatatggtagtaaattcgattcttgtatcaatggccgctcaagccggtaaacaagaagagattatttaccatgtgggttcttcacttagaaatccgatgaaaaattcaaagtttcctgaattagcgtatcggtatttctcaatcaaaccgtggaccaacaaagaagggaaggtcgttaaggtcggggccattgagatcctgagttctatgcgtagttttcatagatacatgaccatacgctacttgattgcattgaaggtaaatagtatctaatgatatattaactagtgtttttatatggttcctaaatatctatatggttcatttcagggacttgaattggtaaacataatactttgcaagttgtttgagaaggaatttcagtatttcaataagaaaataaattttatataccggcttgttg

SEQ ID NO: 147089 - DNA, 1208 bp, Arabidopsis thaliana landsberg
ggcaaccaaatctgaaaaagaggtaaagacgagaggtctcgcgcttatccttaaaggactgtggtgaatggtgagtgtgacttggagggaccccatcaccgcaacaatacagcttcttagatctcgataaccacaacttacctgtcacagtttcgattagatcttctcaaaaacttcacctttttttgtttttccagtttctcagaggagatcttccttcaaagctcaaatccttttgtctgaattgtgatactgctgtccccatttttctgcaagttgggaaatttctgtcaaagttttgtgggtctgttaaaaagatctgagctttgaacatggggagctcaatggaggagaaagtggtggctgtgatcatggtcggtggtccaaccaaaggtaaccgctaaatatgttcgctttttttctttctttctttctgattcctcctcaaaagcaaatgactgtgaaatctcgattgatcaaatctaattccgttagattttgatatccaatgcgtttctctcttgtttggttattagtttcgtgtatccgaatgattatggttctgattctgtgtaaatattggttattgagtgatgcacaggcactcgatttcggccattgtcgctgaatattccaaagcctctgtttcctattgcgggacaaccaatggtgcatcatccaatttcagcttgtaaaagagtaatattcttcactcatgatttcaacaattcagatcactggagagactgagagatgatgataccaatcccttattgtctgcagattccaaatttagctcaaatatatcttgttggcttctatgaggaaagggaatttgcactttatgtttcagccatctctaatgaacttaaagttcctgttaggttagtgaatctctcctctttttgcgttagcttcagctcaagtatcagtggctcattcgtgtagctctgatctttcttctctgttttttttttttgggattctgcaaattagatatctgcgagaagacaaaccacatggttcagctggtgggctgtatcactttagaaatcttattatggaagatagtccggttagtctccaaggatcttactatatagaatcattcttcttttgtgttttatggactaaatgcttcttctcacatctgagttcctatatctacttcttgcagtctcatatgttcctgcttaaatgtgatgttt

SEQ ID NO: 147090 - DNA, 751 bp, Arabidopsis thaliana landsberg; identical to SEQ ID NO: 15161

SEQ ID NO: 147091 - DNA, 645 bp, Arabidopsis thaliana landsberg
tcatatctctctcccacccctaaaccaccagaaacctttttccctttctcctcgtctcccgtgtaactaccaaatcactcgatcgtctcaagcgaaaattcgccaaatgtaaacccaattcgccattctcgtcgcaagtagccttagcagctattctactatcttcaatttcatcttcgccgctagctttagctgtagtgacgaaccagcttctccgtctgtcgttatagaatctcaagctgtgaagccatcgacgccatcgccattgttcattcagaacgagatacttaaggctcctagtcctaaatcatcggatctcccagaaggatcacagtggcgatacagcgagtttcttaacgctgtgaagaaagggaaagtcgagagagttagattcagcaaagatggttctgttgttcagcttactgccgtcgacaaatcgccgtgcttcagtcatcgtccctaacgaccctgaccttattgatatcttggctatgaacggagttgatatatccgtctctgaaggagaatcctcaggcaatgacttgttcactgtcattggaaacttgattttcccgcttatgacctttgatggactcttcttgcttttcaggcgagctcagggaggccctggtggtggtcctggtg

SEQ ID NO: 147092 - DNA, 852 bp, Arabidopsis thaliana landsberg; identical to SEQ ID NO: 51016

SEQ ID NO: 147093 - DNA, 554 bp, Arabidopsis thaliana landsberg
tgcgccatctgcgaagaggaattctcggaaactaccagtgatgttgcagtttcatggtgcaggttgggttagtgcaagttcttattcggctgctaatgacttcttttgccggagaattgctaaagtctgtgatgtcattgtattggccgttggttataggcttgcgcctgagaataggtaccctgcggcgtttgaggatggagtcaaagtgcttcattggcttgggaaacaggctaatctagctgattgttgtaagtctttgggtaatcgacgtgtcaatggcgttgaggttaagaagttgaatgttcaaggacagattgtggatgcttttggagcttccatggttgagccttggttggctgctcgcgccgatccttccaggtttgtatctgtgaccttacttgcttgttgcttgatgtgtatcttcccaatgaccagttgtataagctgtgatgcttaaagacaaaaggaaagtatgaaacttaatcagttaaatgaagctagaagaacacctggagttaagaatgtaaaacgaaccttagtatggtattgct

SEQ ID NO: 147094 - DNA, 797 bp, Arabidopsis thaliana landsberg
  unsure (1)..(797): unsure at all n locations
agatctgacgtaagactctattacggggctaggaacctgaataggatggcttaccaggtttggttctttctctcagttgttttgcaattcatgatgtcagtagatataaatgtgtgtgcttgaattataaaaatcttttgatgataagcgtaaagcctatctctcgctctcattttgatctacagaagaatcatcttggaaacgctcttgattttgtaggaaaagtttaaagagtgggaatcagcgggtgtcaaagttgtnnnnnnnnnnnnnnnnnnnnnnnnnnnntggaaaggggaaactggatatgtgcaggtgagattgagaaacgtgctccttagtcaagtctgctgtaactcaatgtggatcaaactaatatatacataatgtgttgtataggctgcttttgcaagggctaaacagctatcagctcccaaggccacgggagcggtgctgtgcggacagaaacaaatggctgaggtatgcactgtttttgtttatgagaacctaaatgctttagaagatgtgtatctttatcattgtttcgatttgtattgttgcaggagataacttcaatgcttgtagctgatggagtctcaaatgacaagctgctcaaaaacttttgacagatatagttcttgtattatcgtataattttactgtttcttcacatcattattcttttgatacgaaagtcctcttcaaggcctctctaattcataaacacacagaattttgtagtcccttaaagattaatactactgtgttgattgtcaccacaacattcttttttgatt

SEQ ID NO: 147095 - DNA, 270 bp, Arabidopsis thaliana landsberg
gttatttaaggatttgaagctaagtagtggagatagatacaaggcttggattgagtacaacaacaattataaagtagtctctgttacgattggtttagcgcatttgaagaaaccgaaccggccattgattgaagcaaaattcgatctttccaaggtcatacacgaggtaatgtataccggttttgctggttcgatgggtcgtggtgtcgagcgtcacgagatttgggactggactttccagaattaagaaaacaggtttggtttggttcg

SEQ ID NO: 147096 - DNA, 1443 bp, Arabidopsis thaliana landsberg; identical to SEQ ID NO: 59331
  unsure (1)..(1443): unsure at all n locations

SEQ ID NO: 147097 - DNA, 730 bp, Arabidopsis thaliana landsberg
gaaaaatctatttagggtattttaaacttttttgttattcagtcacaatttctacataaatcacatgcttatgacattttacactccaaaagtgattctgattaaacctgatgatcttaattttcattttaatatcaaatcgatttaatggttataacttgcatacttaaagataaactagactaatcatagcctcaattgactcctggaattatggcaggtgctcttcaatgacacaatatttcacaacattcactatggaaacctttcagcaacagaagaagaggtgtacgatgcagctaggcgagcagtgattcacgatacgatcatgaaatttccggataaatattcgaccgcggtgggagaaagagggctgatgctgagtggtggagaaaaacaaagagtggcacttgctcgtgcctttctgaaatcaccagcgattctcttgtgtgacgaagcaacgaatgcgcttgatagtaaaaccgaggcagagataatgaaaacgttcaggtcgctagcgagtaacagaacatgcattttcattgcacataggctgaccactgcgatgcaatgtgatgagataatagtaatggagaaagggaaagtggtggaaaaagggacacaccaagtgttgttggagaaatctggcagatacgctaaattatggacacaacaaaacagtacactggaggtgtgaatctcaagagctagacagctagtgtttgggttc

SEQ ID NO: 147098 - DNA, 655 bp, Arabidopsis thaliana landsberg
tcctccgggagaggtaaaatcatctttcatgtagtcatcaaataaagtttgctcctctatggaaagtatagagatatataaattgatatgaaacaatttaccattggatgctgcagcgggaaaatgcagttgatcaattcagagcgggagaaaaatgggttttgatagccactgatgtgattgccagaggtatggatttcaaaggcatcaactgcgtgataaactatgatttcccggattcagcttctgcatacatccacaggattggtacgcatattattattactagagcctctgtatctaaatcttatattctctgttctatgagagtcatttttgatgatgagttgatgtatttggcctcttttaatacatttcaggacggtctgggagagcgggaaggagcggagaagcgataactttctacacggaacaagatgtgcctttcctaaggaacatagccaacacaatgatgtcatcaggctgtgaggttccatcgtggatcatgtctttgaagaagaagaaatggaggaagcataggccgagacgtgattctatatctactaaaccaaaagccgataaaaacgatacagatgagtaacctcaaattttgtcttttatatttcttgttgttgttacattgatgaattagtct

SEQ ID NO: 147099 - DNA, 1090 bp, Arabidopsis thaliana landsberg
tatctccacggcagccgaagaatgcttcttgacgaaaaacgtcttcgttttagcaaatcggcctcgtttcatcatgggcaagtatgtggcttatgactacacctccatggttacggctccttacggtgaccactggcgaaacctccgtcgtatcaccgctttagaagtcttctccacaaatcgactcaacgcttcagcagaaatccgacatgacgaagttaagatgcttctccaaaagcttcacggcttatctgtcgaacgctcggctaaagtaggttcatcataccttaaaatcttatattatatttaattcattgaaatgtttaaaccacacaatatgtatatgatattttatacttatataggtatgagaaaattaactggaaaacaaattcaactgccgttatataatcatatgttttcacgttgcatttttcgtttatatttttttttatagattgtcaaatttaagacaacaaatagcttacactaagaataaaattttgagaaaacatgaaattcaggtaattaataatattttaagaaaaaaataactacatagaatccacgaattgataaacaatgattttttatttttttattttaaaagctttaaccttgttaaaaatcgttgattacatatggatatatgatagaactaaatttgctcgatttagtaagtggatcaaacagttcatcttctttccgttgctatcaatatcaaattatagaaactagaaagtactatctatccttaaatgtctcttagttttttttttttttttttttaatgtatcttgggttaaataataagaaaatgtgatattggctcgtaaaccagttaatatcaaatcataacaaaataagaacttcattttaattttttgttatctaggtggagttacgagcgttactaacgggtcttaccctaaatgtgataatgagaatgatgactggaaaaagattcttcgaggaagatgacggcggaaaggcgggaataagcttggagccccgagaactagtggcggagattctaaagctctaagcggcggacaatctagctgattttttgccggctctcgggtggttt

SEQ ID NO: 147100 - DNA, 877 bp, Arabidopsis thaliana landsberg
taaatctaataactctgttcacttgcttcacacgaatcagaaacaaagagcttcgtacatttcgcctagctttcttcgttctagggtttcggatcttacttaattacccaaaacccttgaatccattactctgtgtgagcttaaatctcttaccttttatcactttcaatcgattgggtattaagttgtaaaggaaggaacttggaatcatgaagcttgggcttttcactctctcgtttcttctaatcttgaatctagcaatgggtagattcgttgttgagaagaacaatctcaaagttacatcacctgattcgatcaaaggtatttacgaatgtgccattggtaatttcggagttcctcaatacggtggtactttagtcggcaccgtcgtctatcctaaatccaatcagaaagcttgtaaaagctactccgatttcgatatctccttcaaatccaaacctggacgattaccaacttttgtccttatcgatcgtggaggttcgatttcaaagttcttacctttttagttgttcccttaattgggtattcaaaagatctgtttttgattcaattttggaactgaattttgttttcagattgttacttcactttgaaagcatggatagctcaacaagctggagcagcagcgatccttgtagctgatagtaaagctgagccattgattacaatggatacacctgaagaagataaatctgatgcggattatcttcagaacattaccattccttctgctgtcattactaaaacattgggagacagtataaagtctgctctttcgggggtgatatggttaacatgaagctagattggactgagtcggatacacattctgagaggcgtgcactggatgaactgt

SEQ ID NO: 147101 - DNA, 1137 bp, Arabidopsis thaliana landsberg
atgatggtttcagcgtcagagcatcggtttaaagggatcttcactacacttcctaagcctggtggtggtgaattcggaaagttctatagcttacctgctcttaacgatccacgagttggtatggattttttgaatctctctttgaatgagtttatgaaggacctgagaatctgaagaggagtgttgtatttgcagataaacttccttactctattaggattctgcttgaatctgcgattcgtaattgtgataactttcaagttactaaggaagatgttgagaagattattgactgggaaaagacatctcctaaacaagtagagattccttttaaaccagctcgtgttcttcttcaggactttacgggagtcccagctgttgttgaccttgcttgtatgcgtgatgcgatgaataagctgggaagtgattccaacaaaatcaatcccttggtatgtttttgtttgccacagattgatgctttttgtttaggttagggttcttttagatttcttatgttatactgtgtctctcaggttccggtggatcttgtgattgatcactcggttcaagtagatgtagctcgatcagagaatgcagtgcaagcaaacatggagcttgagttccagaggaacaaggagaggtttgctttccttaaatggggttctactgcgttccagaacatgcttgttgtgcctcctggctctggtattgtgcatcaggtaattctcttttttaaagtgtgcgagtccataagttgtttctaaacttgttctgacattgatatatatccttttcaacctcatgtttccagtgtattgaaatgtttcttttcatttattatcttcttttatctgtcttgaagtttgtctcaaactaacctcatcttgaaaattcaggtcaatttggaatatcttggaagagttgtgttcaataccaaaggccttctctacccagacagcgtggttggaactgattcacatacaactatgattgatggtttgggagttgctggatggggtgttgggggtattgaagctgaggcaacattgcatagccagggaaattacatcgattactctcatgacgcacaccagatgtgggataatctggagtcagctatactgaatttcagaatag

SEQ ID NO: 147102 - DNA, 980 bp, Arabidopsis thaliana landsberg; identical to SEQ ID NO: 47232

SEQ ID NO: 147103 - DNA, 590 bp, Arabidopsis thaliana landsberg
ttgcaggttcacggacctatggctgatgttgatactttgtgtgttggcccatcttatgttaaccgagaggtaactattgagtttcgtcttactgatgtaaaggtctggtgggttagtttagttgctaacaggttatttttacaggaggatttcttcattttcttccgtgatatattggctgaaatggaagaagtgactgaacttcaacctgttactgatgcccatgtcccagtcatgaaatttaagttccaaggaatatcaattgatcttctgtatgctagcatatcgcttctagttatcccacaggtaacatcaatatagcctttttcagtttctgttgaaagttagggggtggttcatgatacctgtatgtttatcttggatttcatttggtgggtttggtgcgtgtattgattgcgtgttgatggtcacatagtattattatacacttcctccaagggttgaggtgtcaaagaaacttcttataagaaattgttagccttagtgaacatgaagatgaagaactgccgtgttagcaccatcaggcttgatttatatatgagtactgagatgagttctcgacaaagtta

SEQ ID NO: 147104 - DNA, 1726 bp, Arabidopsis thaliana landsberg
atggagaaagagaagaagcttcacacagagatctcccgccggaaaaaaaatcagataaagttctcttttttatttattttggtaaagagaattaaaagtttataatctgatctgctaattatgacgacaacaaataatatctcggtcggtttcaaattcctaagcgagagacaaatatacagtacacacacgacttaatatcaaaaccaataaacgtaaaacacgtgtctcatcacttcccactttcctctctgcatttgctgtctctctctcctgaaaacccttgaattttgctacacgatctctgaaacgtgtctctttgactgacttcaatcttctttatcacttaccgcttctgggttttatgaagcaactgagctaataaaaagcttcttcttagactcggaagaagaacataaacagaatctttattgtttaaagcttccaaattcgagaagagaatttgaaacgaccaagttcaggatattcgtttcttcgtctactttggtctcttcctcttctctttcgaaaagggtttattctgtcttaaaagaaacctttttgagagggtaaaaaaagcttcaattttcagagaaacacaaaaggcagaaacagagaaaaacaaatcatctaattcatgaaacaggtgagaatacatattttcttcttccttggtctcttctttttttattgatttcattcatatatccaatttttgtgtctattggctgtttaattgttgacgatgatgaattcagttagataattatgtgcatagtttaggaattttttagctatatcttcttctcatgtgtaaacatagaggaaaatctaaaaaaatatctgtcaaattattgtcttttccaaattgtcctcattgtcctattgaatcaaataagattttttattactgatgattcaaatattgttaatagtttataaccttgctcagtgttcttctgatgtgtgatttaaaacctcttgtctctaggctctgatctatgttttcgtctcaaagtcttattatcaattctctaaattgcagggttcaatgaatagatcgtgtctctgtagtgtcttaatcaccactgctctgatttgtggtgcttacttcatttgcaatgcttatcttgctaaagactttaaagaggtaaacttctttgtatttggcatcacttaagatctatatgtgttctatgatactgtcattttggttaaattgttcagctgtctttttgtgtaatcagtagtgtttttttccgacatgtaaataacatgacattgttgaataattctggttttatagtcaacattagaacaataagtttagatttctgaatttgatgtataagattataaatctgcagaagttgctgaagtgggaaatcactgataagatgcataacagtactgataagatgcagaatgcaacaacaaccagtacatgcaaggtttgtctttgaaatattctttgaggtttgttttatgagattctttgatattaaacttacaaatatatatatctttcactagaatttcaataagccagtgggtactgaagcactaccgcaaggaattatcgagaaaacatcgaacctggaaacacaacatctatggaactacgatgacacaaccaaggttacctagtagttacatgattcctcaaagatatggaaagtatcattgcttttttttcgtgtagcttaatcttttgctggatatttct

SEQ ID NO: 147105 - DNA, 611 bp, Arabidopsis thaliana landsberg; identical to SEQ ID NO: 2488
  unsure (1)..(611): unsure at all n locations

SEQ ID NO: 147106 - DNA, 612 bp, Arabidopsis thaliana landsberg
aaagtggtagtttcatagtcgataagctataatgtcgagaaactttctaagagaaggatagattttgaccaatggtatattgtatgtgtctcaaaatcattgtaatcagagggcaaaagagagcagaaagttcttgtaagaatgtggaactacatagtattcagttgtggatataacactgttttcaggagacttctcacccacttttagatgaaacacttgctccgccatccggatttgttactgagttagcttctctgttgtcagggtccagatttagttgtacatcaaacgaaagactgtttggataaaatggatgactggtgtcaaactcatcatggagctagtggtaagttcctctcctgatattcgccgtactagaacttctgtgtttcccatagatttgatctgcatgacatctggacaatcatttcagggttgacgaagaaagtgctcctcagtgcgataactgaaagggaagctgagcaaaaggtaaagacacatgtgatattttaatatcaagaccaacatttgatctttttgtaagtttggtgtggtttaatgtgatattgtgtgtcgctctgcaggtcatcgaattcgtaaagaagcatg

SEQ ID NO: 147107 - DNA, 460 bp, Arabidopsis thaliana landsberg
aaatgccgtactgactaagatcttattccgctctaccaagacagatctttttagcataatttgggggagtttttccccattaattctcactttgtcttcttcttgtgtcggataggttttcaagaaaaaccctcttttgtcttgtctcctcaaaatcagttgcttcttctctataataatagagggtttattcatatcttcactatctagcttcttcttctatcatatgtactccaactctcggatatgatcgaaagagctttgttattattatctttacaacttcacgcagacgcataagagagagagttgatcaaagatattcgagattgagatgaacaagagtaatcctgctggttcggtgactggttcggatataatagacgccaagatcgaagaacatcaactttgtggatccaagaagtgtcctagctgcggccacaagctcgaaggcaaacca

SEQ ID NO: 147108 - DNA, 628 bp, Arabidopsis thaliana landsberg
ctcctctatctctctctttcctgattgtcttcatcaaaaactggaaaaagcaaatcaagaaaagagaagaagaagaagaagaagaagcagatgtgtccgttaaggcttatcctcatattcctttcagcgactctcgctggcttcttcgtcctccagaagctcaactctacctctgacgatcctctcgatgattccttcaccgacgctgaacccgccgacgacgattcagtctctggattctccaaggttttttctttttcctccgatcttcattctctctctctgtaatttggggattaatgggtttttctgattttatgggctcaggtgggaatggcaatgaagtctggattttggacatgcgttgacatggcaagtggtcgctatctctggaacaatctctgttcaaatgccaaacgctcttcttgagttttgtaactctctatctgtctctctattgtctgtaactgtttaattgaactgcaatccacggcaccaaatttacatattgtctctgtactatatactatagatcttgtcttcactactaaatctcaataaagtaaaaaaaattatcccagtttcaaagagagtggaggatatggcttagattcttgttcttcctgta

SEQ ID NO: 147109 - DNA, 275 bp, Arabidopsis thaliana landsberg
ccaaaaacttcgacccacaattcatgaaatcataatatccaagattaaagcccatctggagactacaaatttgtcaaagtccgcgtgtagtcagggtgatcgaagtgtagctgctggattgcatttaatcaaaggacagtcagaggcctaccggttatcaaaagagaaacctcaaaatgggatatcaaattcaggaactcacctagctgtgagccctgtgtcgcctcttatgaactcaaggaggcaaagcgcaggctgcagcgaaggaacttctt

SEQ ID NO: 147110 - DNA, 1301 bp, Arabidopsis thaliana landsberg
aacagcgtttttgttcttcatctgcattgttctccgcctctctctctcaaactcttcaggtaagcttcttcaatttcattaaattagtgtttttgaatcgtttctagacttaaagtttctcccttttcgatgttttcgtgttgattgatgataaaaatttacattttattagtcaggattgaaacatagtctagttgattgctgtgacttagaagttagacatcttatatcttcgtaattgttttacagtttgcaaaacccttaagaaggtgtgaattagtaagtaatggggaagaagaagtttattgataagaaaaaggcggcgactttcgagttgtgtcctcgtgatacgtcagacccaagatacagtgatgcaccaggtggtgataagatcttcttacgagttgatcaaaaccctgttaacatcaatggtttcattgaagaagatgaagaagaagaaggagacagctcacggtttgatgatgctcctgaagagatggattatggttactctagttttggggattcgagtagttctttacctgctcatgtgaggaaggagattttagagttagggtatcctgatgatggttataattacttggagcatttgagagagattaagaatactggtggtggttctaatttctatgtgaatcctaagtatgaggttgctcagttacctcgtgatgttaaggcttatgatgcgtctcgtgttaagatctctggtatggtgaatgaagaaggtaatgataataagttgatgtatagtgttgcgtccaagactgttaacgtcaaggtgcagaaagctattgatcctgaagttgctgcgttgcttgaaaacagtgatgggtctgagtttggttctgatgttgaggatttggaagaagattttgttgttcaagctaatcttactcaaaagggtgaatcttctggtgtgagcaatggagagctcgagttttctgtaagacgtgaggttagagaaagagaaagtgatgaacctgtggctgaaaacccgagagttcctcgtcaaattgatgagctatttgatcagctcgaactcaatgaatatggaagtgatagtgacggtgatggttacatagctgaagatggagaagaagaagaagaagaagacttcatggctcaagaagttcagaatcttattcatgggaaggcaaaagattatgagcttgaagaaaaatatatgaaccctgcggatatactgaagaacagtgactctgtcagagataaagaggaagtggacactgctgctcatgttatccgccgaactgtagaatatg

SEQ ID NO: 147111 - DNA, 2172 bp, Arabidopsis thaliana landsberg
gatgaaagaagcagtggatgagatagaggtggcttcttcagctggagatccacacgcgcagtcgataatgggattcgtttacgggataggaatgatgcgagaaaagagcaaaagcaagtcgtttcttcaccataatttcgcagctgctggtgggaatatgcagtcgaagatggcacttgcgttcacgtatcttcgtcaagatgtaagtaaagatggaacttttgattttctttatgaatagatgaagttgcatctgagtgtttgttattgatttgcgattctgttacagatgcatgataaagctgttcaattatatgctgaattagcagagacggctgtcaatagttttctgatctcaaaggattctccggtggttgaaccaactagaattcatagcggaactgaagagaacaaaggtgctctaaggaaatctcgaggcgaggaggatgaagatttccagatattggaatatcaggcacagaaagggaatgctaatgcaatgtacaaaattggactgttctactactttggcctgcgaggattaaggcgtgatcacaccaaggcattgcattggtttttgaaagcagtagataaaggagagccgaggtcaatggaacttctgggggagatatatgctagaggagctggtgttgaaagaaattataccaaggcacttgaatggcttacacttgctgcaaaagaaggtctctattcagcatttaatggaattggctacttgtatgtcaaaggctatggagtagataagaaaaactatactaaggtaggctgttcattcgtagcctcatcattcccaggcttactctttataggctagtctaacattctatggatgtatgccttcaaatgcaggcaagagaatattttgagaaggctgttgacaatgaagaccccagtgggcattataaccttggagttttgtatcttaaaggcatcggagtcataagggatgtgaggcaggcaacaaaatacttctttgttgctgcaaatgctggtcaaccaaaggctttctatcaactcgccaagatgttccatactggtgttgggcttaagaagaatctggagatggtaagtgacttttagatttctgagactttcctgcctaaacatggatgccagaaaaaatgactttacattcataaagtcttaaaagaacgaaacttaaaaaaatttggcttcctgctcttctaaagttcagaaaattatttcactgttttgttggttatgtaaaatctcattacctaaaaaggttacttgcacaaggaatgtgggaagctctgtttcactgtctattctattaatagctttttatcagtactataatgtctggccagacgttgtatttttttaatgttgaggtatgaatgatgtctatgcgtctatccattaaggcagcagggtgcagtatagtacttgtttctgttgatggtagtctgtttgttatttttcactgtcgtacttcaactccttttatatcttaggaattttttttgagcagtttggagacatctccagcgttgttgagagaatttgtggtttaattgcttgttcacttccatcacattttggttgcaggcgacttcattttataagctagtagcagaaagggggccgtggagttctctctctagatgggctcttgaagcttacttaaaaggtgatgtgggtaaagctttgatcttgtactcaaggatggcagagatgggttatgaagtggcacaaagtaatgctgcctggatcctcgataaatacggcgaaagaagcatgtgcatgggagtatctggattttgcacagacaaagagagacatgagcgggcacattctttgtggtggcgggcctctgaacaaggcaatgaacatgctgctctgcttattggagatgcatattactatggccgggtgagtttacctcgtataagaaactagattatgaacctaataacgttgagacatgtaacaatgattgaattagctagaaaaaacttgatacgtgtcgcctgattctctctcttctctcgttctttgatctctaaatagggaactgagagagattttgtgcgtgcggcagaagcatacatgcatggttaatcgcagtccaatgcgcaagcaatgttcaacctcggttacatgcatgaacatggacaagggcgtccc

SEQ ID NO: 147112 - DNA, 866 bp, Arabidopsis thaliana landsberg
caacggaggcaccgagtgtcaaagccagtcatcatacacgttccaactcggatttcacagatcaacctgcaccaccatccccaacatcaacagatggttggggagatgctgagaatggcattagcgaaggtcatgagagtgacaaagacggttgggatctcgaaccgctggatgaaccaaaaccttctccagctcttgctaacattcaagcagctcaaaaacgacctgtgtctcagtcctctagaccttcaggtatttttttaaagctgaatctgtttgcctcaatgtaaaactttctaaaattcatatggttatgtgttattcctcctctttatagctgcgacaagctcaagaccaaagattagcacagtgaaagcagctgcgaaaacggaagacgatgatttgtggggatccatagctgctcctccacctgcaactacttcaagaccgttgaacgtgaaaaagacagtacagtctgatgatgaagacccctgggctgccattgctgctccaccaccaaccaccagagcaaaaccgttatcttctggtcgtggccgaggagccaaacctgcagctcttaaactaggtgcccaacgcattaaccgaacctcatctggaatgtgatgaacactaaaggaagaagataagcagcatacaatgtacatttttttgaaagcatctccagatgacccaagagctcaagccaaggaaccaacgaattatttgatttgtaaaatcattcattttaaaccataagagtgtctctatttttactctacactaccaaaaagagagtgtttattctgagaagtagaagtgatgtaagaacatcatctattcagaatgtgatcttgttcaagttgcct

SEQ ID NO: 147113 - DNA, 1608 bp, Arabidopsis thaliana landsberg
ttaatcgttcgcttaaggtggcaattttaatcaaaaagatgcgagtcaagcacattcattgtctactctaatcaaaatgtgtaatttgactaaatgtgcgaacaccacttgtttggagtttaagggctggtctatctgagggcttgtttctgtttttttgtattgaatttggcaagttctgtgaactaattgatgttgattgcttgtgtaaattcagggggtggaggagaaagctaagaaagaacaaaggaggaaggatagaagaagtgataagaaggataaaaaagataagaaggagaggaaggagaagaaggagaagaaggagaaaaagaggaaggagagggaaggaaaggaagttggaagcgaaaagcgcagtcataagagacggcgtaaagaagacggtgctaaagttgatctttttcacaaactaaaagaaagtgaagtcaattgtttggagaagagcagccttactgtagaacgtgagctgcttcagtcgacgtcccaaaactcttgtgatagcactcttaacagcaatgagatgttaccgaagcagaaggaggtccagcagcctctcgatggtagacataacaacaacaacgagaagcgtgtggagaagcagcagcctctcgatggtagacataacaacaacaacgagaagcgtgtggagaagcagcagcctctcgatggtagacataacaacaacaacgagaagcggattgagaagcagcagcctctcaatggtagacataacaacaacaacgaaaagctgatggagaagcagcggcctctcaatggtagacataacaacaacaacgagaagcggattgagaagcagcagcctctcaatggtagacataacaacaaggagaagcagaaagagaaacagcagcctctcgatgttagacataacaacaacgactctggtgagtttgtttgtgtttcttccttccccggggaaggatcttgtattcttgttgggtctaattaccttatcaggacattgatgacattctttcttcaaattgttgatatgaatttgaagaaagcatcattcggattcgattgcctattcgaaggcagaaagatcccgaggtgatgatgaccaataaggatcaagaaaaaccaggtccttctcggggaataaagttagactcgtcccaacttcctactagagagccggttaatcaacatccttgttccacttctgcagcagaacatgcttcgaagccacgagaagagaaaaggaaagatcccatttttagagggaaacacggtaaagagaagatatcctcatcctctactcgagaaacttatcaacctcctaaaagcctatgcaattgccctccatccatggtgttgcaattcttggacgtagttgagaattgggtccctaacacgatcgagagaagagtagacctcattaactctgaagatgaagaatgttggtggtccatgaagaagccgccaagtagcaccacagaaatatgcaaacaacttaatagagagaatgagatcaagcaagtaggcaatacaatggggtggccatgtgctcgccttttaccagaagctgatgtctacgccttaccttacacagtcccgttcagataa

SEQ ID NO: 147114 - DNA, 453 bp, Arabidopsis thaliana landsberg
cagatccgaagatcagtgctgagcgagaatgaatatggtttcaagaaaccggagcagccgatgtactatgacgaaggcctagaggtataaaagaaaaacttagtaccgaaattgttaaaaatactaaaactaagacacaaatacgggtttgatgtttataacaggagagaagagagatattgaatgagaaaatcggccaactcaattccgccattgacaaggtttcgtcgcgtctgaaaggaggtcgaagcggtagcagcaagaacacttcttcgccgtctgtcccagttgaaaccgacgcagaagcagaagctactgcatgattgaatgtaatgctctgctctattttaccaattcaaaactgccttccattggttctgtggtttttttgttggaaccattcctaggggcttttctgacttttagatattgaaagaaaaagacaatcgtcgt

SEQ ID NO: 147115 - DNA, 1334 bp, Arabidopsis thaliana landsberg
  unsure (1)..(1334): unsure at all n locations
cctagaatgaagattatatatagtgcaaaacctaatcgattttttcctctgctgtcgctcgtctacatttacactcggagcttagaccttccaatctaccggcggcgaaaatggtgagatatactctcttattgagctaataccttggttagttcgtctgtgttctacgtgattatctcctgtatttagctcatgttcatagcacatttcggatttctttcttctagatctttttttttggggattaggcttttgacgttctcaatcaagttacgtttgtgtataggttagagtccaaagttgttagatttaatattttctggtgattggttgtttagggtttcaagaggtacgttgagatcgggagagtagcacttgtgaactacggagaagatcatggaaagctcgtcgttatcgtcgacgttgttgaccagaacagagtaagtttatttcattcttaggttatgaagatttccatctctttatcatgtatgtattgatgagtttcagctgttttaatgcttgattccgtaatgctactgtgtatgtttcggtaaattgtttgattaaggaaaattttgatttagcttgagactttggttgcataattggcttacagttataactcagtttgcatcattgattggagcctattgcatttccttggtgaatattgagctgaatattgtctagttgtttttatggagttcttattatgttctcgtcatttaggctttggtgcatgcccctgatatggagaggatccagatgaacttcaagaggttgtctcttaccgatagtgtcattgacatcaaccgtgtgccaaagaagaaggctttgatcgaggcaatggaaaaggctggtgagtgctgcgtaatgtaaatatttgaattttgaagtgtttcaatcttaactggaaaagtcttgcagatgtgaagaacaagtgggagaaaagctcatggggtaggaagcttatcgtgcagaaacgtagggctaaccttaacgactttgataggttcaagatcatgttggccaagatcaaggtcagtgtgttaaattgttagatgtttgaaattctgtggtagtgttcattcatgtcagaactgaaatgttaatgggtttttttgctgtttgcagaaagctggtgttgtcaggcaagagcttgcaaaactcaagaaggagatcactgcctgatcaaatattatctacaattctgttgtctgtcttttttgattaatggattcggnaattagtgtttttggaaaaaacantaacagtatgtgctcaattaacagacattattcaagtttgaaaccttgtttgcaaaactcaaa

SEQ ID NO: 147116 - DNA, 619 bp, Arabidopsis thaliana landsberg
taaaagcaaccttgtcttcaacattctccatcttcctcctcacttaatccccaagttcacacttcaaatccactctttctatttctctccttcttcttctatgtctcgcctcctccctcctcatctctccgtcaaccttcctaccatggagaaaactacttcttccgagttaaccccaactcgactcggttttcctaacgagttcccttacgagttcgactctccttccttctcccctggtttcacttctcccggtgactccactgagacggaagacgaaagcagtgatgacgaggaagacttcctcgctgggttaactcgccgactcgctccttcgactcagcgtcttccttcccctctcttcaagtctgaggtaagaaacgccgcaaagatctttgctttctcgttaaacaataaacgcccatggttactgattctgtagtttcttgctctgcaggagaaacgtcaagttgcagctacttcaccacagtcaacactgagtggactcggaagcttttcaaactcaggaagtagaagccctatccttccatctccaacggctcctacgtcatcatttcgtagagacacgcgtgggatgtgattctgcggctgctggaga

SEQ ID NO: 147117 - DNA, 1116 bp, Arabidopsis thaliana landsberg
atgaagaagccaagccctgttttgaagaagccattggtggaggctgttgctgctccaaaggtgcagagattgcctaatgttatattgagaaagccgagttcgttttatactagtaatggtgatgatgaggagtctaagttgcggttgaaaccgaatctgacattgaaaatgagaaatgagagggaaaatgagaggtttagtgatatgacattgttgagaaaaccggaaccagtgagcgtagttgcagaagaggaagacaagcctctttctgatgatttaactatggaggaaggagaacaggaaggtggaacatattcacagtatactcttttggagaagccagaagcgaggctccagcctgtcaatgtagaagaggaagttggcgatagcggaggagtggaatcatctgagatagtaaacaactcaattcagaagccagaagcaaggccagagcttgagaacatagaaaaggaagttgcagatagcggagttttggaatcatcggagatagaaaataattcaattccaactggtatagagacaaactaagaatatttttaaatagtctaactttgtgctgattcatatgtttgttgttttatcaagaaatgcagctcaatagcgagatgtcctctgaggagaaaactattaacagtgatccactcgagagaattccttcgaaaccaatttctcaaaccatcgtcgaagcttctttacaagggaaaccacaaaggtgaattctggtttagtatcttgactttgaggaattttgctttcttgactcctattttctgttttgcctgactggttacttttattatagattagacccgtcttccgctgagccatcagttccgtacataggaaaaccgtcagtcgtgaaccatgaaggccgtcaggtctctgttgagctcaagggccctcctacagatcgtccttggaggttgagaactaacactctcttactatttgttccttaataagataagaggcgtatgataaactcgttttgtgtgatttttataggaaaatgattggaataagacagagtctctagttaaaacagaattacgagcagatgttgagctaataagttcaagcactagaggatttgct

SEQ ID NO: 147118 - DNA, 489 bp, Arabidopsis thaliana landsberg
atgactccttttgctctgttcctcttcactctccttgccctttcaagtaagtctccttatatatacattaagattacttaaaccataatctttctttttataactcacttatgtttttttataggttcatgttgctctgccattggtccacaaaacaacagaacagtgttagcacttgcaagcagaattgggatcaactatggaaaattaggcaacaatcttccttctccttaccaatcaatcaacctcatcaaaaccattaaagcaggccacgtcaagctctatgacgccgatccagaaaccctaaagctcctctgtacgaccaatctttacgtcaccatcatggtccctaacaaccagatcatctcaataggtgctgatcaagccgctgctgataactgggtcgccactaatgtccttccttttcacccgcatacccgaatccgattcgtccttgatggcaacgaggtccctagctacagttctgat

SEQ ID NO: 147119 - DNA, 372 bp, Arabidopsis thaliana landsberg
gaacagaattcaatatagtgatcagagaagagagagcaaagggaaagggttaatcctcagcaatgggctctcacctttccaaacaactcgagcggcgaaaagccatctccacggagaagaaagccctcaccgatctcgagaaatcgtgcggctgcgagtttccggggtgtgattacatgccttccgatcgtaaaaactggatggccggcgttggacctgaaaagcttcacatcaacaagatcgtctggcctgggacgcacgactctgccaccaacaaaatcggtatccgattcgtgtctcgtccctttgctaagtgccaatctctctccatctataaccagcttgtggcgggtactcgagtccttgacattc

SEQ ID NO: 147120 - DNA, 563 bp, Arabidopsis thaliana landsberg
ccccatgatgagaacattatgaaagcaacggtgataaacaacgaatgaccacctacatggggagaagaattcacattccctttgacctatcctgaccttgctttgattagttttgaagtttatgactacgaagtatcgactgcagatgcattttgtggtcagacttgtctaccggtttctgaactaatagaaggaattcgtgctgttccgctctacgatgaaagaggtaaggcgtgcagctcgacaatgctgctcacacgttttaagtggtcttagcctacaagtttctttctcattaccaagtggctcttggtctagtggtgtttcttaaaacctttcaaagttacgctttctaggacccctagttcaagttccatttggaagggggaaagagtttaggcaagcttagattgtgatacggaaataaggtcttggtccagaactagtttgcattgccattttacttttggaacgaaaacaaattattcgccattcaagtttctttcacttttattgttgaatttcttttactatcctttcactttaaaaactgtttttcattc

SEQ ID NO: 147121 - DNA, 717 bp, Arabidopsis thaliana landsberg
attattcttttggaaagtcttcatcagtgatgaaaactcttgcaggtattgtttactgctgttttagtaacatgtagctgtatacaaaattcagccctcgctttctattccattaatacattttttttaatccgtcatgttatgctaaaaaaatgaattctgggaaaacgatcagaatgaagtgagaagtgtatattgtgttatgtggttgctttacttttccattttactaaaaaaaattcttggaattgagcagtcaatgttgatgatgccatggacgatattgtacgtcagttcaaaggtgtctcagatggccttatgcgcaaggttgtaggatctccacttgatgaacatgatcatgctcctacccgccacctctcctggagtgtaaatgaaataagcactcagctctctagggaaagcgcaactgaatctatgcacagcagcatttctgatactgaagacatcgacaaacttggagagaacactcaaggggaaggtagatttgattcagaagccaatgggtggcactcagataatgaattggactctaagtatgttccaccgagagtggttagacgtcttggagagcctgagagttcgccctcagagaaggaaaatgattttaaggcaaaatctcaagttagggggtccaccgattttcagcatgctgatccattgacagctttagtccaaaatccccatggcatacccgag

SEQ ID NO: 147122 - DNA, 590 bp, Arabidopsis thaliana landsberg
aattacataaaagactgttttatttatatatatggacaaatgtatccaataggctctttagaagataagtcgtagggatgcaattagaaaacaaaactaaaataaacgaaccaatatatgatggaatgggacaggataaaattctaagactcagaagtcgaagtcgcacttgatcgggaaaacaatggaggtagttgtagttccgtttgaggtacttaaaggaagccttagatcatcgcaatcaaccttaggcttaatcctcctaaacttcaagtccccaagcttaaacctaaccctaagcctgaacttgatctctatattgtatacaccggatatcctctccgcgtttaaagtcctagactgtccggcgttaaaaataacaaggttttggccttggaacgttggtgtgagaacggttgtgtttttgtgtccttgatagaaaggagttaacgtgatggtactaaaccgctttccctcgtagtaggcatgagcttcgatcctatcgtagtagagtccgatcctcttgtttgggttacggacaggaacagtgagggctaggttataccttacaatgttgtcaggggaagtgt

SEQ ID NO: 147123 - DNA, 619 bp, Arabidopsis thaliana landsberg; identical to SEQ ID NO: 14373

SEQ ID NO: 147124 - DNA, 1625 bp, Arabidopsis thaliana landsberg
atgactctgcaggtgcgctcaacagttgcagaagcagagaatgctgctcgagtattcactcaattgtctgctgcttcagacctccatgttcatgggtttgatagcaagaaaatacaaacccatgttcagtattgctcgcacttgctggaagcagcaaaagttcaccgtgaagctgctgagcaggaggagctgcagaaccgacagagattagaagttgctcgtcaggctgctttggcagaagaagcacgccgtaaagctgaagaacagaggaaatatcaggtaactattgacttgcaagttaaccatttgcagcaacaaatttattttggtgatatatatggaagcttttcaagtcagtgatatgcatttttctcttgggcagttggagaaaagaaaacaggaggaagagctgagacgcctaaagcaagaagaagaaaaatttcagcgtataaaggtaggaggtctcttgcttttgattacagtgtctatgaagatcagatttctcaacattgttgtgtagtgtcaagggaaaaattactctttggtaatactttttagggtgtatccctttgtcagtatggtgtcttgagaagatgtttaggatgacatgctgattttgttttgtaataattaatgccctaggaacaatggaagagctccacacctggatctaataagcggaaggatagagtggaagatgatgatggggaaagtaagcccagtgagcggagaagaaagaagggtggaaagagaagaaagaaggacaaaagctcaagggctcgacactacgaggacgatgaagaagaagctgccactatggatgatcataatgaagtggaagatgaagacgccaacactaattataacagggaagatgagatgactactcaagaagctgaggaacctgtggatgatgatgctcatgatcttctcgctgctgctgggctcgaagatcctgatgttgatgatgatgaggtaatacataaacttcaatccaattcatggaactacacaaatgcaaaacacaatgtcacactaagtctgttttggtgagtacaggtacctacttcgggtgtaaggcgaagaagggcgttatcgtcatcagacgaagaaggtgaattaatggaggagagtcatccaaattcaagcccccagaaagaaaaagaagagagcaatggggaagctggtgatcctaacatggaggaagaagaggaagaggaagaggccaattgagagatatttcatacataacaacagatatctcttgtgtgtttgtaactttagtgacaaagatttcattgattcaatttctctagtagtcagagtgtgaagacaatttacattcacaggccaaggatgatcagtttgtattttgggttatttggattgagccttgtttttatttgatattgttactaatagaaaagcttttttctttttcaatgtttttaaacccgacccggacagtaaatcggattaccttctggatcaccaggtcatggggtcaaccgggttggactacgggtcaattgattaaaatttacttaatatacttaatgtcaatagaaattacttaattttcataaatataaaacaaaaataatcatatcatgtttaacaaaata

SEQ ID NO: 147125 - DNA, 2893 bp, Arabidopsis thaliana landsberg
agtttaatagtaaaataatcgatcctcttctcttctcttctctgaggctcgttggaaatctgaattctccgatcgaatcgaaccaatcgcagaggctaagaagaggacctttgagagaatctccgagtcaggatcagaaaaaacggtgatacggaagctagttctagggctaatgggcgccgcgggctccaaactcgagaaagctctcggcgaccagttccccgaaggtgaacgctactttggattcgagaatttcggcaacacttgctactgtaacagcgttttgcaggtccacttgctcctttctctctttcctttgctttcactgcctgtttgattccccatcgcgtttccctttgacgatttcttctggatttcgttgaattagtgtgttttaaagcgattgatgttaaattcgtttcaataggttaaatatgatttggttgcattgatatttcgaattggatggagtgtgtagattgatatactcaaggaggttaatacttaatgtaaatcctgtgtgcaattgcaattgtgtatcagctctattgatttttcgatatctctgtgtgctatgtatatgaataagttctctggactggagaaagacctttatcattggctagtgatcgattcttcttcaactgaaatagtcaaaatgtgtattgaatctctctcccttgtgcaggctctttatttctgtgttcctttccgtgaacaactgctcgaatactataccagtaataaaagcgtggccgatgctgaagagaatcttatgacctgcctggcagacttgttttcgcaggtatttgtgatctttggctttcttttccttttgagagtttaatttttatctaccctttcgaggtcttccatactgtcttaactcaagtgaccaatcttgtattctctgacaatatttctcttgaggttggtttacttgatttctcacttgacatcataagtggatttaatcaattatttataggcacaagtcaatgttttttttggcattacatgaacttgatattattgtgtaaatagttaaatatcttcgagatactaaatgtgcttgatgaagtgcctagtatatcatatcttgtcgtcatcatttagataattgtatgctagtcattctgtggaaaaaaaagagagggtgtaatcataagtctgatcatagttattcattctgtagataagttcccagaagaagaaaacaggtgttattgcgcctaagcgatttgtacagaggttgaagaaacaaaatgagctgtttcggagttatatgcaccaggtgatctttgcaaatctccccatcttttcgggagctattttacagaagatgcgagataagcaattaacatttgattgattttacgtttcttatctcatgcaggatgcacatgagttcctgaattatttgctaaatgaacttgttgagatcttagagaaagagacacaagccacaaaagcagacaatgaaacttcatcatctcctgaaaagattgcaaatgtactgaaagctcccctggcaaatggtgttcataaagagccaattgttacttgggtgcacaagatttttcaggttaggtgcttttattaaatagctcatcttttttctaagacacgatcactgcattttgggcctcatttagataccagattagttatgtggaaaatgtatttggtcatcgacttatagctgcatttagtatagatgcgcagtaagcatcaataacatttcaggataagcttaaattccttccttgtccccaaaccaaacccaatcacaagagcaaacagcacatattataaagtttttccagttatttcaagtgacttagcatgtgtaaactcattacagggtatacttaccaacgagacaaggtgtctacggtgtgagacagtaacagcaagagatgaaactttcctagacctaagccttgatatcgaacagaacagttcgataactagctgtttgaaaaacttcagctccacagagacgcttcacgctgaagacaaattcttttgtgacaaatgctgcaggtaaaatgttggttcaaatatcaattcctcacctttcctttatagtagctgaaactgaaaactggtctttaagctccctcttaatccttcaataagcgctccacagtgttagactttgttaggcgccatgggagtgaagcctgattattgaatgtttatatttgcagcttacaagaagcacaaaagcggatgaagatcaagaagccaccacacatcctagtgattcatctaaaacgattcaaatacattgaacagctaggccgctacaagaagctctcctatagagttgtcttccctttggagctaaaactgagcaacacagtggaaccatacgcagacgtggagtactctctgtttgcagtggtggttcatgtgggaagtggacccaaccatggtcattacgtaagccttgtgaaaagccataaccattggctcttctttgatgatgagaatgttgagatgattgaagaatcagctgttcaaacattctttggatcgtctcaggagtattcgagcaatactgaccatggttacatcctgttctatgagagccttggaccgaccaagtgaaagctgagaaagcagaaagaaggactttcttcgtttttttttctcttaactattattagtaatggtatatgtttgtcttaaaagtcaaactcaattgacagtaacttttttttttttttggtttttgttctttctctgtgtctctctcccaaagatatttggtgagttttaaaattggaagttttaactggaatttgtatactttgaaaaaggccatgtacagtttatggcaaataactccttgtctttgtatctttagcaaaggaagaaggttaac

SEQ ID NO: 147126 - DNA, 666 bp, Arabidopsis thaliana landsberg; identical to SEQ ID NO: 43016

SEQ ID NO: 147127 - DNA, 1063 bp, Arabidopsis thaliana landsberg
taatcgttttgagttgaaataaatatagggtaaaactggtattttatatgggccgatacgtgtggccctgtatcttagcccacaaagttagttgacctgcttttctgatcatcttcctcccactctctttcatctttttgtaatcgatttgcaatttcaatttcgcaaagttggatcatgggcaatgtcataagcggtggaagccgcccggaaaatcatcgggaccgtacttcgccgccgtatccaaaccctagtgctcagtaccaaggcaattatccgtcgccgtaccaagattgtgctaggtatccgtatggagagatggcgtctccagtgcaatacgtagagcatcaggaagcagtgactataaggaacgacatcaatctgaagaaagaaactttgagacttgagcctgatgaacagaaccctggcaagtttttgctctccttcacttttgacgcctctgttcctggaaggtaatgatcaatgttttatacagctcgacatcttttcactgtgtgattgctagatgttgaaggtttgatcgatgctcagttcttatggtttttgattcaacagcatcactgtaatgttctttgctaaagaaggcaaagactgtaaccttattgcgacaaaggaggatctttttccatccactcaagttagttttgcaaaaggtctggaacagagattcaagcaggcttgtgggacagggattgatttctcagatatgtcagaggcagatttggttgaggcaaacgagacagatgtgtatcatgtggcagtgaaagcagaggtagtatcagaagatgatcatcctgagtctgggacaccaaacagacagataactcatgtggttttagagaaagatcataagggtgagtacaaggcgagagtggtgaagcagatcctgtgggtgaatgggaataggtatgttcttcaagagatttatgggattggtaatacagttgatgataatggagaagatgcgaatgaaagaggaaaagaatgcgtcatctgcttatctgagccacgggataccactgttctcccttgcaggcacatg

SEQ ID NO: 147128 - DNA, 640 bp, Arabidopsis thaliana landsberg
atgattgaggtatgaatggaaactcttgaataattaattaggcttttttgagtgacttgactaattttgagttttgtgttcataggcacctgaagagaatctttggttatcttgtgaccttgaagatcaaaaggcaccactaccgtgtatggattctatatatgctggtgatttcagttacgatgagattggattccaatttcaagatggtaccagcgaaccagatgtatcactaacagaattgttggaggaggtgttcaataaccctgatgacttctcttgcgaggaatcgatcagtcgagagaatccagcagtctcaccaaatgggatattttcatctgctaaaatgctgcagtctgcagcaccagaggatgctttcttcaacgacttcatggctttcactgatacagatgctgagatggcgcaattgcaggtgagcacaaagatacatattttgaggcctatacaattttagaagtatccaaattattttgctttaagtaggctagaaacctctagatcagttatctttacaatcactcttgacataagtaaaatgacaatttttatcttttgtttgatcagtatggttcagaaggtggagcttctggttggccaagtgacactaattcatactata

SEQ ID NO: 147129 - DNA, 142 bp, Arabidopsis thaliana landsberg
acaagtagatctacaccgggggaattagtaatgtgtcaggaaaaattggtacaagaagccgtggatacacttcttgataatggaatccgtggacaccccatgagggatggtcataataaggtatacaagtcatgttcagtat

SEQ ID NO: 147130 - DNA, 2254 bp, Arabidopsis thaliana landsberg
  unsure (1)..(2254): unsure at all n locations
tcgttgccaaccagtgatanagcncgttttgtagagagtgtattgcaagaaaaggttgcttgcatacttgaacatagtgttattttctgctatctatattctctttcaagttaaggttttcgcaactccatcaatatattagatccaacttgtttgttgtcagaaaaatgcaatggatgagtttctcatatcgaaaagcttacctctgagatctggagtgcaagagtgagtcacgtagatatctctttcaaactgtagcaaagaactttagatttttttcttgtacttgtaagttgtaaattcaaaagatttcacctttttgagctgtagatttatcgataatgcatacacggagaaagtaccggttgctatcgtaacagcctactgcaagagtggagacaaagtagccctgtaagtacttaaggtcctactattgttttctttttgtgattgtataatctcacatatttagaaagaccaaaaaaatgcaaggtgaaaagtagtacttatgaggaaaccctactaaacaatccattaccataaacaaaatcctacattagatttttatgctaatcgtactgttgttttctttttgtgattgtataatctttatgatgcgattattgaacagatccattgtcgagatgcttgggcaagaaagacttccaaatgtgaaggttatcggagacaatgaggtagaacagagtatgtatggacaacttgttcttgggaaaggagtttcttcaagtctagaggagcaactagtgaaggaagtaaaaaaagcaggtatagagctcggagaaaatttgctaatccttattttatatctaacatcttccttgtaactgtagtgaatatctcatcatcttaaatttgtctgactagcgtccgctgagaaacagaggatagcataagaagttgcatcaatgctaaagcttactgttgatattgacacaacctcatctgagaggtgggactttctcttcttctttacaaaaatttcagttccatacatcaacaagaaaagtgatggcttctcattttgtgttttactttctacagataggaaaagattgggggggctttgtgtgctgctggggaccacataagagtacctgtaaataactgtgtactaagcggtggtggcaaacctggagtttctgctgcaaagatgataggcatgccgagtgtagtcatgcgaagcaagtatgatgttcggtttcagatgtctcttttcagatttttgttccttattctacagaactaaagcctgaaatgtgcttctgtggagcattgttcatttgctcattttctttaccattctttttgcttgaagtttaacggcaagaggtgagtttccatcggccaaaggtgtaatggatgggtttggaggtgcagacctaacaatcccaaaacttaggaacaagatcaagtcttgaagaaacaattcaagaaagttgtctaaaattcagaatctggaaatactgtcgagttattgttcacttctcgaagttcttgtgaagttttcgacttgatatatattaactatagctacgtgttgtacaacttgattctttgtaatgaattggtgtggttaattttcagacatcaacaaacctttactcaatactaatccaatgagcttgaaggaaacatgttttgttttttttggaaagcttatcctagattccaataacttgagctacttatatatctatggttttattcaaaatgatataatcagtcagaattttaagtcatgaggtggatgtctccactgttgtatctgtttgtaatgcctgtgatgatataataatacgacttgtaaaaaaagaagaagatttcgtttctgagtcaagacactacctatatatagaactacagtgtgatttttatgaagaccattgtcagaactgacatgacttgttctacggtagatcttgcacttttagttggtttacatttgtgagatttctgattcttgtacattgttggtgtttcgtctccgaaacagggccgggcttgggcttgagtattctgcatcatcaccagcagatgatatgtttgatgcgacagattcagatattgtgcttgagatggagtgtgatggagattgctgtctataggtttgggaagctgataagtctggaacttcctgtgttgtttttccttgcgcttcttccgcaagctttcttagaagattcataacagttggaagaaacttcgacgtgatggacagtactccagcaaccta

SEQ ID NO: 147131 - DNA, 358 bp, Arabidopsis thaliana landsberg
ggcaaaaatcgtctctcgcttgagctgcgaagatgcaagcagtaaaaagatccaggagacatgttgaagaagagccaacaatggtagaacctaaaaccaagtacgatcgtcagctcaggtatacatactctttttccttaaactctacttcgaactactcttgtcgggaggaaaattgatgaagtagtaatcgttgggttgactgattaggatttggggggaggtaggtcaagcggccttggaagaagcgagtatctgtttactcaattgtggccctactgagataagaggctttgaagaatctcgtacttggtggtgttggtagcatcaccgttgttatggatataaggttcaatgg

SEQ ID NO: 147132 - DNA, 236 bp, Arabidopsis thaliana landsberg
caggagagtaacaatttggagtacctaataccgaaaaagtcatcgctaaggcgtagactaccaatgggtgaccaaggcttcatagactttgtggcatacttgctccaagttgatccaaagaaacgcccgtctgcatttgaagctcttaagcatccttggttgacttatccctacgaacccatatctgcctgattctgtaggtgcaacaaaagcagaatggatgagagctagtcaag

SEQ ID NO: 147133 - DNA, 836 bp, Arabidopsis thaliana landsberg
atggccggtatgagccataccgtgagaacttagttacaatgtcggtcgactagtgtacgggtttctggtttagattatgggctggtttaatatgaatgggcctatttattaagcccaattacttcgtatgtaatgcaatgtgcttcttctacgagagagagagagatcagtgaacaagtccccgtttcttcgttctcatcatcttcatcgccgattttgcaacgaccacctctgctactcccgtcgatcaatctacggtgagctctctgctctcactatccccttttcaaatttcattccttttccatgacgacaaatatttggataaagaaccttattcgatttaactccgttggttgttgtactgtaccggaatacaactttccggtagctctctggttttgattcggtagaaatctagaatttaggctcggaatttcattttctagttgaggttacactgttttttcttttttgaaaattttcccctagggttagtatttgactcaattggattttgtcggtagaggaatttcacttatttttctattattttgctctcctggattttgattatcagaagaagaagaagagatgagtaacacaccagcagcggcggcgtcatcatcgtctaaatcgaaagctgcgggaacttctcatcccacagggaaaagcgcaaaactctctttcaaaaagaatgtaaagtctttagttaaaaccagatttttgtattcttcatttcgtgattcttctggtaacaatggttttggtgcttttgttgatttttcagtgcagcatatgatgtatggatttggcgacgagcaaaacgtaagccg

SEQ ID NO: 147134 - DNA, 1059 bp, Arabidopsis thaliana landsberg
gagctgaaaacttcagtcagagctcacccatagacgaaaaaactttagatatggaagccaattcccctattactgactcttctttgatatggaattttccattgaactttggaagtggaggaatcgaagtctgtaatcctgaaaatgcagttgagccactcagaatagtagatgacaatggcagaataggtggtgaagttgcttctgcatcagggagtgatttttgtgaagctggcttgtctttttcccgaaggaaggcccgagacgggaaacaatgtaaagtggtgcagacaaaaacgagtgctcgccatctgagaaaatcctctagaaagaaacaatcagaaagagacattgagtcaattttcaagtgctcaaagcagaagaggagctctcttttaaaaacaagtcgttcatctgagtggggattaccaagcaagaccactgaaatcttcttacagagcaataatattccctatgatggacctccgcatcatgaaccacagagatctcagggaaatcttaataatggagagcataatagaagttctcataacgggaatgtagaaggatctaacagaaacatccaagcatcaagtggctcttgccttcgtttgaaagttaaatttggtaaatcaggtggccaaaatcctctgaacattacagtctctaaggtcagtggtaactccttacctggtaatggtattgtaaaagcaggaacatgtttagaattgccaggatcagcacattttggtgaggataaaatgcaaactgtggaaactaaagaggacttggtagagaaaagcaaccctgtggagaaagtttcatatcttcagtcatctgattctatgagggataagaaatataaccaagacgctgggggtttatgtaggaaggtgggtggtgatgttttagatgatgacccacacctttcctctattagaatggttgaggagtgcgagagggccactggaacgcagtccctggacgctgaaacttcaccagattctgaagttatcaactctgtgccccattccattgtcaatattgaacataaagagg

SEQ ID NO: 147135 - DNA, 945 bp, Arabidopsis thaliana landsberg
ttcgaatcccgatacaaacttaaaatgccacctgccaataagaggaatgatgatgatgcctggaagcagtatcttcagaagaatcaacggtcattgcaacagaagctgattgagtaagcaaagtttctgattttttctaatacatgattctcttctgtatatactgggttttcctgttttaaaacgtggatttttttcattcacaggcttgagaatttggaattgatgtcaaaacttggccccgagctttggagacagaacaaccatcgccttgaagtatttttgaccaggtttgttcacatttgtatatactgcagcattgattgaatttgaatgagtaaaagggtttaagctttttggttgatggattgtatatatcctagatgatctgctgaagcattattgatatatatgttgtccctcttgcttgcataatatgcttctttggctgtagtacacgagatttgcctttcgttattcttcatgtgctttctgcttgaaagtttctttgtttcctttaaacataagaaaggtcttcgtgagcttgtaacatgtcattctttataaaactgtacccagtctctggcttttggaacttaaccacagtgagattgatctcaaccctctatttgaaccctatttgcagaatgcaaagactagcacaggagcagaatgaggaaattgaaaaagtaaatcgggaaaggaagtatcatcaggtgacaactcttttgaattatcttcatcttcttccttgcacttttctgtttggtttacggggtaatctaaaactttgttgtgtggccattatcagcaaaccacatcatacgagctcaatgctctatctcaagaatggagacagctctgtgttaagaatatggagattcagtctgcttgtgccatgcttgagacacagatcgattcgttcaagaaagaagctgctgaaag

SEQ ID NO: 147136 - DNA, 1184 bp, Arabidopsis thaliana landsberg
ttttattatctctctctttctgcgtgttccaatttcttccacaaaaccctaattttctcttaaaccctgaaattcgtgtaacctttcaacaatctcttcaattttgttttcgattctgaatccattgtttacgaatctctcatctaaagctacattcttcgttaaatcgtttttaatcgactcgctcactcgtgagttgactcgtcagctgtttccataattgcttattgaatttttatacgatgatgtttcaatatggaagaaactagaggaatttctgatccagagaatgggagttcgagttacggcggtaaaccgccgaatccactctccttctcttcttcctccgccgctgctgccgtttacaggcaaaccttcgacggcgagcgatcgttggcgccgtgtaataagaggtcactggttcgacactcatctctcgtaagattcgtttctcttcaacttgatttgtggatcagttaggtttattttgtgtattgaatgatcaatttaagttgaggttttgtaattattgctctgcttttggatttgatcattattggtttcctaatgtgtataattaaggtagaaagtttctgtttttaatgtgtcattatgagatgtttgaggttttctgattgattttcattttggtaggtgaagacaatggtgtcagatatatctgttgagaatgagtttactatagagaagaacaagtctgagtttgttcctgctacgcgttctggagcttggtctgatattggctccaggtcaagcatggaagatgcttatctatgcgttgataatttcatgaatagctttggccttctgaattctgaggctggtccaagtgccttctatggggtatgttctttcttcagttttcctgattttttgtagatttgtagcataagcaaacaactgtgaatgtagtgaaaatatggggatctcttattgaattttgtttgttattaggtatttgatggacatggtgggaagcatgccgctgagtttgcatgtcaccatataccgaggtacattgttgaagatcaagagtttcctagtgaaatcaataaggtgttatcttcagcatttcttcaaacagacactgccttcttagaggcgtgttcattggatgggagccttgcttcaggaactactgctttggcagctattctttttggaag

SEQ ID NO: 147137 - DNA, 1745 bp, Arabidopsis thaliana landsberg
atgaagaaaaggccaaaagaagaggataaaaagaagactaagacacaaagagagatagcgtctgtgaatggcaacaaaggcagttcttctcccgtggcttatcccatcgccgagacacgtatcgctgttcccagtggttcaattgccggcgttggagaccgccgggtggtgtgtaagaaagaggagggcagaagacgtagcagtctccgtcgccttcaatccttctggcaatttcgacatctctgccttcgagaatgaccaaggttcgtacttgctcaattgattcagaatgataaataaaaaaaggctgctactaattaattatgtgaaaggcgtagcagattcagataaagtggaacctccgatgcctccaacgaccggccggtacgaagtagtgatcgacaacgactcaattgggcggcttgacctatccccgtttcagagagccatcggcataacctcgcctgatgattttggtgtagctgaaccaaaacggtatttggatcgaaccatcggattcaccatcaattacaagagagaagaccccggggatccgcgggagctgtcagagtacccggacgtaagactatggttcgtgaggctcgacgcgatgtacccttggctgcctctgctgctggactggcgagctggagaacttgctcgatacgcagccatgttagtgccgcaccagatgagcttgagaatgggtgtcgttttcaatccggaggcgttggagcttttcgtaatgaacaaagtgtttgtggtttatccgtggctgaaacggcacggcgtcccaaagcccaggttgaagacgagcgacatggccaggatgctcggattcggtatcggcgatgagctcttcgacttgatcgatcacaatgaatgaaaaacgatgtgttctatcttcaaattacatacgtgggcctaattgtgggcttacaatgaaaaaggcctggggatggtaattaagaggatttttttgggtatttgatacacacgtggcgaatattcattggataagttgtattaatagccgtaaaatctgggaaaataaattcaaaatctcgaatatctgaagagaagagagagcccattcaaaatttgaaaaacaaatcaacaattggtttattcgtatctttctcatttctctctagtctatatcgctctcagaatacaattggaaaaaagaacaaggtatttaggaatctctcattcttgagtagctaagcattgaggtctcctttgcgtttatagattattttttttggttgaaattgtttggttctgttgggatatgttgttgtgttagggaagagaacacaaaaagaaatggttagagaagaggagaaatcgagatggtggtggttcgagagccacaagagctccaaacattctcaatggcttcaatcaacactcgctggttggttctttttctcactcagttcttctctatgttttgtggtttttgccaactttttggtgtgaaacgtttgtggtgcagagcttgatgcaaagacaaaggcaatgttgaagttgttagacggaaacgcagactctttcgctcagcgtgctgagacttactacaagaaacgtcctgagcttatcagctttgtcgaagacttttatcgagctcaccgttccttagccgtgaacttcgaccacctcaagtcttccgaccactatggatctcgctccgctaaggttccccaacaatccatggagtccgtttgtgacagcaattctca

SEQ ID NO: 147138 - DNA, 908 bp, Arabidopsis thaliana landsberg
aacccatacaaaaaaagtcgaatccaaatctctctctccggcgatctcatccatggcggaaggcggcgaagattcccagcggttgaagaaaattgcggcggctgccttcgactacgaaaacgacgctcgatgggccgattactggtccaatatcctcatccctcctcacatggcttctcgtcccgaggtcgtcgaccatttcaagcgcaaattctaccaacgctacatcgtacttactactatcttccctactcttgaatttgcttatccattttcttcattactttgagtttcgagtttgactttgtgttgtgtgcgctactgatttgggggatttagtgtggactttgaatcttaggttttacaagtgtggttgttgatgttctttctgctaaattgcttagtccttgggtccgaatctcctcgtgattaggttattaagcggagggtagggcttttcattgaatattcgttaggtcctgtttataatatgtgaagccttcgtgttgttcatctttgctcttccctatcaagatgtaatctgcatttgtttctaaatctagggtgcttgccatgtccttcttttttgcaggatcctgatcttgttgtggagcctatgtcgacttcatcttcgtcttcacaatctgccaggccaactgctacatctgcatcttcaactgcatcttataatgcaaatgaacaagttcgttcacggaactcaggtcaactttctttgtctgatatattcttgaactcaaatgagcttttcttattactaccaaaaacttacctaattgtgtgcctcaggatcggttcctcaaacctctgggccatctgatacgactggtgcaaccccaagttcaatgcgctgggatgagcagacgattcagttttcagtcaatgcttgg

SEQ ID NO: 147139 - DNA, 1079 bp, Arabidopsis thaliana landsberg
tcaaattgcaaactgaactaaaccggaacacagagacttgtgaacctgagagcggtggtcgaggctgctgctgatatcaatctcggtgagccagattgggagctggagcgtagcgagtttatcgaggatggctctcatcagcgctacgtttggcgtcgtgaagtgaccctcgagaccgattccgtccatccttatgccgtcgtaccgttggagttccctcaccctcgcgatgtattcgtcaaccgttgacttctcgtcgctgcaagtctccaccacgttgaaatcattgaagaacagagtcgccaatgagtcaatctcacgagccgcggcgaagaatccgtacgacgcgttcttccccagtcgagtctcgtagaagtcaaagtgaagcatctcgttgctcacgtcccaatgcacgaactctcctctgtaccgagtcatcagactcttgattcgccggttaaccgccgaccggagatcttcgccggttagattacgaacccagtcgggattgtatttgggatcctcccagaatatgttgtggccgcgagcgatgattctgttagctctgacgaaattcatcatcttatcagccaatgtgtagttgagtttgccttgatcgggctccgtcgcgtaccatttcagctcgttctcgaataccgtggcgtcgaatctcttgacgaaccattcctatcaaaacagaatccgtttaaagaagcaaagacattgttgttttagtgtagactttagcgagtgtgttttacttggtaaggaatgtttccaaggatagttttggagatggcagatccaatgtagaagtcttaagagatctgctctaatgtcacatatgctccttcaacgctctatcggttttcttttgacacgtgaattgtcactgctcgttttctcgcctgaaaataagtgttaaggaggaaccacataaagaatgtagtttgcgattttaacgttagaaattagtgtgtgtattacggtatttatgaagtaatcttggttgttcctccattgctcctgcgtgaatggctgaagagaggcactcgtcacttgtaattggatcttaccat

SEQ ID NO: 147140 - DNA, 821 bp, Arabidopsis thaliana landsberg
aaatacttgcatgtttggttgtcatgaaggcattagacttactggatttgtcttcttggtgtaggtgttagctgactacatcaatgcaggatacactgatttcaagaatttgaaggtaattaatgcatttcattgaacaactctttaatagaggctgcccaaaagcaccatgagttttcttagagaaaagaatctggaaccagaattaaacccaaaacactctttatttaaactgaaaataaggatatataagagtataaacttcccaaaatagaactatgttctcttccctcggcctaacccgcttgaaacctccaaagcactctctagcttggatgagtctcacaaaagaaacctcatgcttacttataatgaaacgtaaaagcaaaactctatgagaaaaataattatgaaaatggaaatcctaaataatttcctaaatcaagaaataagaagtattcgtatcaaagttcattccagctttgattataaagtattatgaccggaaatgaaaacaaaagagaatcatagtgttgcactcgtgagtgtctcgagaatgaggtctatggtttactaaaatgaccaaaaatatatatttatggtgaatttaggtaataaaagtgaatggagttcaagtggaaaatctaaaacatctaactgaattggtagagacatgctggaccgaggatttaagactggacttagaaaacgagaaggttgtggtcctcaactatgcaaatgctaaagaagctacttctttgatcttagaactgcatagaataccgtcggccaatgagtatgactaccagtggcagagctag

SEQ ID NO: 147141 - DNA, 583 bp, Arabidopsis thaliana landsberg
cttcttctctattctctgatctctcataagaagggcttagggttcacttcagatctgtctttgaacattgctactctcaagtgatcaaattaactccgtcgcaggtgaattccacaatcctccgaccgtaaaccctaatttatcactgttcttccaagaaacaagtttttgttttgatgaaattgaggatcttgcgttgaaatcgttttgtttctatggtacgtgatgaggagatacagtccgccttattacagtcctccgaggagacgataccgtcgtcgaggtagaagtcctcctcctcctcctcctcgacgtggatatggtggtggtggtggtggacgtagaggatctagccatggaagtctcttggttcgtaacattcctcttgattgcaggtaaattctcttcctttggtttaaagttttgattttgttttagtttatctttgaagatttcgttgggttgttgttgattttgttgtttttgattttgtagaccagaagagcttcgtgagccctttgagaggtttggacctgtgagagatgtctatatccccagagactattactcagggtaagcctcc

SEQ ID NO: 147142 - DNA, 608 bp, Arabidopsis thaliana landsberg
  unsure (1)..(608): unsure at all n locations
gtaaaacctcatcctacccaggtaaaggctttagagaaatagttactcanatttttgatccaatggaagaaaaatatggctggagaatcttttattcctaacctaaacaaaacaaacagaacatgatgcatagtcctttattacattacagcttctactcctaaacctttatatggtgatgatggatgttattacttttgcagtgtctggtaaacaaagataaagcagacgagagagagcaaaatatgtctgaattctattcggaactcgttgttgcttaccgagatcctgcactttctgcatcacaggactcgagagatatctcaccttgagatcacctttttacttgagctattgaagtttgcttatgttgaagctgttggtttactatacctggtgcaatccatgaaagaacacactaaaccggttgtcttgtacattgcgtcttaaccgacaatcaagcggtttttgtcttgtacatttgcttacacttggcttgtgtaaaaaagaaaaaaagtttatgtcaatgtatctctctaaaccggtttaagacggtacacactctttgaaacatgccaaaacaaaacggcggttaataattttaccac

SEQ ID NO: 147143 - DNA, 424 bp, Arabidopsis thaliana landsberg
gcaaatcttccatcatttccatagctttcttcttcttgacattccctttaaatcttttgggttggatattttgtattttaacacttcataaagtagtcatcactaaacaacatatatacacatacaaagagatggatgctgaaaagaagagtgcccattttcgccaaatctcatcttataaaccacaattacttgtcctctcctcaatccaagaaaacccttcttcaaaaatctcagaaaaagccaatatcaaagctgacaatgacgccgagattggagttttcggagcagaaaagtacttcagcatgaagctagatcatgttgattccacggcggatatcaccaagcaacatgaaaaggaaaacacacatgatcatcctaatgctaatcctaatcctaatcctcatcctcatcctcatcccca

SEQ ID NO: 147144 - DNA, 1387 bp, Arabidopsis thaliana landsberg
atggcggttttggaagcttctctctccattttctccttctcttcttcttcttcctcttcaaaaccttatctcttttctaaacgctcttcttccttaaaacttactgcccttagtcttcgaattcccagcaatctctctcccgtcttctctctacgttccggcagcgataactcacggcggctcgtctccgtactctgttccgtcgcggagaaagaaacatcggcggatgaagaaacgtcgcaggaggagaagactgaagaaacccagaattcaaatctgaaaaggaagctttttgtattcaatcttccttggtctatgagtgtaaatgacatttccgagctctttggacaatgtgggactgtgaacaatgtcgaggtctttcttctttctcaatttcgtttcaatctttatgttattactagcaattgccttacctcaatttataaacttttcctagattataaggcaaaaggatggaaagaaccgaggatttgcttttgtaactatggcttctggagaagaagctcaagcagctattgataagttcgatacttttgtaagctcaaatcccttagattcttttctgattgagtgttgtttgtttaatttcaaagccttttaggtagatagttcaaactactaaatcatacattgtgttgagttgttagctaaggtttgatgtttaagcttctatcttctttgttttcagcaagtgtcagggaggatcattagcgtaagctttgcaagaaggttcaagaagcctactccgaaatcaccgaacgatcttccttctcctgcccctggagacactcgtcacaaactctacgtatctaatctcgcttggaaagcaagatcaacacatctccgagagcttttcactgctgcagatttcaacccggtctcagctcgggttgttttcgctgaccccgaaggtagatcttctggctatggctttgtctcatttgctactagagaagaagctgagaatgcaatcacaaaactcaatgggaaggtatgaagttccaagcatattaatataaagtttgctcctttagccttgagcatgtaaagtgtttcattacaatttggtttttctataggagataatgggtagacctatcactctaaagtttagtctgagaagcgccagtgaatctgaagatggtgacagtgtagaagctaacaacgcttctgaagatggagacactgtagaagacaaaaacacttccgaagaaaacattgtggagtgactcttattattttctctgttatccgataggagcatgagaatctgactagagatcttattacagttttgaaatagctactgctacaaagaacacaataatgaagatgtaacagaaattcagtaaactatacttcaatc

SEQ ID NO: 147145 - DNA, 1426 bp, Arabidopsis thaliana landsberg
aattaaaatggcttcctcttcctcttctccgacgcctagtgctgcggcggcggtctctcctcttacggaggaagaattaactctaacagttaagtggaatggaaaagagtacaccgtccgtatctgtgccgatgactcagtcgccgagctaaaacgtcgcatctgccttctcaccaccgttttacctaaacgccaaaagcttctttatcccaagatcggaaacaaactctctgacgattctcttttactctcttcgatctcctttaagccctccctcaagatgacaatgatcgggtcagtctcaatttcaatttcttaaaaccctaacgaaatcgaatctaatttgaaatcagttttgacttttttcagtactgttgaagatgatataatagtagatcaagctgaatctcctgaaattgttgatgattttgagcttggtaaggaagaagctgttgatgttaaagataaagaagttaataaacagaagttgagaagaagaattgatcaatacaaggtgagttttttttttttctgtgtgtgtatctatgtgtaaatgattcatcaagcttatacaacaatgtgcagataaatcttcgaacgccatgtcgtcaaggcaagaaacttcttgttttagatatcgactatacattgttcgatcatcggtccaccgcggagaatccgttgcagcttatgcgtccttgtaagccgtatactgttaactgtttggttttagctagttagtttctttgattgatgttttgattacttaatgtagatctccatgagtttcttactgctgcttatgcggaatatgatatcatgatttggtctgctaccaggtgatgttgttgttagtttgacattttaatcttcgtgtagcttttgtagctctgctgatgctagagttatccgtttggtttctgcagtatgaagtgggtggagttgaagatgacagagctgggagtgctgaacaatcctaactacaaggtcacggctcttctcgaccatcttgcaatgatcacggtccagtcagacactcgcgggatttttgattgcaaaccgctaggcttaatttgggcactacttcctgaggtatttatatatcatgcatcctcatttgacacatgaatcttgatctttttttttatgtaattgattggtgttgtcctgacttgtgcagttctataaccctggtaacacgataatgtttgatgacctaaggaggaatttcgtaatgaatcctcaaaacggtctaacaatcaagccgtttaggaaagctcatgcaaatcgtgatacagatcaagagcttgtgaagctgactcagtaccttctgacaatagctgagcttagtgatttgagttctctacaccatagcagatgggaatcattctcacaggacaacgtcaaaaggcgcagacaggaatga

SEQ ID NO: 147146 - DNA, 1543 bp, Arabidopsis thaliana landsberg
cgggaatatcgcagttattgtaattttggaaagctataatggcgaagagagagattagtagcactctgagaaatctaaaggtactgtcttttttctttctctgtagaagtagctttattcatgttacatgaccttagatttgaaactcaaggaaattactgaaattgaattgaattcgagcttgaaaatttagtcttttctctattaagctgggttttgattcttggacaaattgataatccccttcgaggttgatttcaccttgggggtagcactgagcttagcaccaattataaacattggtttgggactaaagttgcaatttttcactgaagaattgtgttatatcaatcatgtagctcttagttgataatctggttttgggtgagagacaaaaagatacgtgttaataatgattgataatactctctgtctatagtttatgcaaaggtcttctctgaaagtagagaagaagaaggctgatgaagaagagcctaatgggagttttccttcccttgggactgttgcaaagaagtggtaccgttatttcttcttacttgatgtttatgttttgctttcatcagattactgtaaacaaggacattgtgtatctattgtctacccttttgttatgtgttttgtagtgtttactaatgtgtgatttgattttcgatgcagtgtggtcataacagattgggatcctcagccaggagcattgttaggacgcatgtcttttcagtctttcaatccctctatcgaggttagtatctgtgactctgccgcctgcgatactcagtgatctttcacatctgtaaatatagctctacgctgctttactatcacagagacgaggatctatacggtggaaataccttgtgctataacagtaatggaggagctaaggctccctagtgggggctgaaccttttatattcctttgtttgctatttccagagagtgtgcatacaccacatcaacgctggagatctattgtcttactgatcatctaattttgagacaaatgaagtcgttactgatagcaattagcaaatagatttatcacctacttatcgtttagttcatttctgattttgcttctcgttaaagttgtaaacggtaactagtcaaaatgcatcctctttcagtgaaccggagagttcaaaggttgagccaagtggggaaacagatggtgacttgaaaagaaaacagtctgaggtagtctccgaggaacaaaaccgtcctaacaagtccccaaggagctttgacaaaccatcaccgagcaataaaaagggcaatggttttaagaaacccaagagcaagaaggtggactggagcgttttgaggccaccaaaacctcaaaccaaatagggtttaaattagctaactacagcaatctatatgctattagttacatcggttcatatgttctagtagatcgtttgttgctctgtctgtatcgtcattcccgtggtgttgcaacccgttggataaattatagccaaaagttttgaatttgtttgggttaaaagtgctcgtgttgtct

SEQ ID NO: 147147 - DNA, 1438 bp, Arabidopsis thaliana landsberg
aagtagttctctgccatagactgcttgtaaattttggttgccaattctgttattgtgcagggggaaatccatcacgtagtaaatccagatccataccgtggagtttttggctctgatggttctctttatgctaaagatgttcaagaccacatcgagtatggtacctctggaaaagtagctggatttatcgcagagaccatccaggtttttgtttgtttaaacaaaccatcaagtgaaatttagtgatttaccactctcttgaacataatcgtcaccatgccattatcatttttacttcagggggtcggaggagctgtagaattggctcctggttacttaaagtcggtttatgaaattgttcgcaacgctggtggtgtatgcattgctgatgaagtccaaactggatttgggcgaacaggaagccactattggggtttccagactcaagatgtggttcctgacatagtcacaatggcaaaggtttgtcaaaagaagttgttaccacttgctctgttcttacttcttaccatatgctatgttctccattctttgactacgtttactgttatatacttaaagaaacatgtgtagttcactaataattgacaccggttatattcacagggaattggaaatggattgccattaggagctgtggtgactacaccagaaatcgcaagtgttttagctagcaagattctgttcaacacttttggtgggaacccggtttgttcagctggtggacttgcggttctaaacgttattgataaggagaaacgccaagaacattgtgctgaagttggttcacaccttatacaacgtttgaaagatgtgcagaaaagacatgatagtaagtaccaaacaaacttatataatcagatcatttactctgtttttacttacaaccgtgtctgtttggtttcagtcattggagacgtgagaggaagagggttaatggttgggattgagcttgtgagtgaccggaaagacaagacaccagccaaggctgaaacatctgtcttgtttgagcaacttagaggtaaacaacattaaagccaaaagcatcgatttgataagcatcagttggttaaccaaaatgtttcgctcctttctcttaatgaagaacttggcattctcgtcggaaaaggaggacttcatgggaacgttttcaggataaagccaccaatgtgtttcactaaagatgatgcaggtaaattcttagtttatatatcgcttaaaattatgaagtttcaccaaagaacaaaacgagattgtataatatctataatgaatttgtgtgtgttgtaatgtatccacagatttcttggtagatgcattggactattccatctccaggttgtgaacaaggatgaaacaaagcccacgagaggttttaacccaattaaccgttttaatgtttccgccttagagagacggg

SEQ ID NO: 147148 - DNA, 352 bp, Arabidopsis thaliana landsberg
gtagaggataaagaagaaacgaaagaacctgaggcaaaacggcaacgtattgagaaaggcgaaacaaaggctctagagaaggatgaagatcaaaaggaaaatggtaacaaagataaaactgatgcaaagagaatagagagtggagttttcaccaatgttcctattgagctgtttcgtcatattctcaagttcttatcttcggaggtatatactatatagttcaaactcgtactttattgatgtttgaggattgcttttaaactaaattgtttgaatgtcattacaggatcttgtatcatgctccttggtttgtaaatttctcaattttgctgcggctgatgaatccttatgg

SEQ ID NO: 147149 - DNA, 943 bp, Arabidopsis thaliana landsberg
ggcacaaattgctgcttctgccagtcatcctcatgtagcagcagagtccctatccaaaatacctgatattcagcatttgcctgcaactgttgccaccattgtcgccctcaaagagcgtgctggagacaatgatggtgctgctgctgttcttgactcagcaattaaatggtggtcaaattcgatgaccgagagcagtaagcttagggtattgatgccagaggctgctgccttcaagctaaggcatggtcaagaagaggaggcttcacggctatacgaggaaattgtgaaaaaccacaatagcacagatgctctggttggtcttgtgactacacttgctcgtgtcaatgttgagaaagcagaaagttatgagaaacagcttaagcccctaccaggtttgaaggctgttgatgtggataaactagaaaagacctatggtgcaaaacccattgaaggcgctgctgcttcatcgagtcaggaagaagtgaagaaagaaaaggcgaagaggaagaggaagagaaagccaaagtatcccaaaggatttgatccggcaaacccaggtccacccccagaccctgaaaggtggcttcccagaagggaaaggtcaagttacaaacccaagaggaaggacaagcgagcagctcaaatccgtggctcgcagggtgcggtgaccaaggataaacaagaagcagctccttcaacttcaaagtcaaaccaagcggccagttctaaagggaatgcacctgcgccttcctctaaggcctcaaaaaagaagtctagaagatgaacgaaacaaccctttaagattgtttcatctgttctgagaaaacaaaaacaaagagtacttagccccaaaatttccattgttctttttcttttttgattcatcaagttttagttgtcttgacccatttaagattttggttaatttctcgtttgcattgcc

SEQ ID NO: 147150 - DNA, 870 bp, Arabidopsis thaliana landsberg
  unsure (1)..(870): unsure at all n locations
gctgactcttcttctaactttctatttcttccaagaataacaaacttttttctcataagaaacaaaacaagaattctacaaaacttctcattaaacctctgttttcttgtttctcttctgctctgtattttcgataattctctctgttttgtatcctttcttattttctgtgaatctgtttttttatggaaatttaattcaaaggcttattagaggaagaaagaaagaaaaagaaaaaaaaacccactggagctatggctgttgaaggtaaacctaaacataaaatttgtttgctttttgttaagaaagtgggggaaaaaaataaaatcattgatgcaaatttattttctgggtttatgaaaatttacgcagacatgttatagaactgactttttgtattccttgtnacataaacagataacaagaacagtgaaagcaaaaatcatcaagaggtagagcttcataggtacgacttaggcctcgattattcatcatcgccgagaggtgttctcggaagggtttcatattccgacaacagcagcagtacttgcagctcttgttcctctgatgataaatcatcatcaacatcgtcaccattttcaaatactactaaaaccgtttcgtcttctcaccatggtcttcaatggaacaaaatgattgaatctatcaagaagaagtccatgagacgattctctgtcattcctcttcttgcaagttacgaactcacccgtaaaaacttgcgtcgtaagcaacctaagctaactccctctgagagtgctttcacctgtgaagccttctttatggctaaaccctcttggagaaacttcacttacgaagagctcgctgtagccaccgattatttcaatcctg

SEQ ID NO: 147151 - DNA, 3568 bp, Arabidopsis thaliana landsberg
ctcgtcgtctcttcatatattcgtctctttgtgttcttcttcctcctcagattctctttcactaaacagaaacaaggatggttttgacaaaaaccgcaacgaatgatgaatctgtctgcaccatgttcggatctcgctatgttcgcactacacttcccaagtaagtaaattaaccaaatgactattgaaaacattttgaatactttgcttcttaatgttgatgtattttatttaattgattgcaaaaaaggtatgagattggtgagaattcgataccgaaagacgctgcatatcagatcataaaagatgagctgatgcttgatggtaacccgaggcttaacctagcttcgtttgtgactacatggatggaaccagagtgtgacaaactcatcatggactctatcaacaagaactacgttgatatggatgagtaccctgtcacaactgagctccaggtctctccatctctcgatctttatatttcctaattactatatccataatataatttactaatggtgctagatctaatttgatttgaaatggttacaattgctaaatggtttcattagaatatatgattcattctaatgaaagtttgagagggatttggaagttgaataatgatgtttgataaactgatataatcatattcattgtttagtattagtcccacatttatttctccaaaagaatataaaaggacaaattataattatatttagtactatagttttttttgagaaaatatgacccatacgtttctagctattattggccgacatatccatgctttcagtaacaagtggacttgctcgttttgtaagttgttctcttgatcataaataattggtattgactaatgttaaaattttcatcaatactagtggcccacttgatttgaactttgaataccaaattcggttatcgttaaaccagtcggtatattcatccggttttatatttatcaaaaatgaatcaatcaagtagtatgattaaagtagaaaacatctaaatctttgagaatcaaagtatgtgaggaaaagatggtaaagcagaataattgattagccgaaggacaaaaactacacttctgtcggcaacctctcttttattccccacatcaccagttcaccacaaacaaattttggttttgattggtccactcaactttttctcactatgtggtaccatttgattgagtttatctatatatttaagttgaaaagtgaactatgtacaccgtgaatgcgtggtaaacgttgtatgaaattaatgtttgacaaaagaaaaccatgcattaaaaaaaattagaattatacatatatagagtatataaacagttgtgacttgtgatgaaacctaggagagcccacccaccattaaaatctcgtggtcgatcggtctattgtcacatacatgatacattctatcatgtgaaacttcaacaatttcaccattaagaagttggtacttgtttgttcataaatggttatgtgatggcatcactgtgtgcctttgatacttgatagtgtgaatacgataataactagtaaaaaatatcatagtactttattgcgattattatcttgtcatattggttttttgcataaaaatatatatagcacattatcaatactataaataaaaattaccctttcgtttgataaaaagtctaaagttactttgatcaattagatcactgaaattcgtagattcactaatttcgtatcaatagtcttttcttttggtaaaagctacagataagttatgtgatagtaaatgagcatggaatttgatttgtcataaaacttatatcaatcttttaaaaagaagattcataatttgaatattttggaacagaacaaatgtgtagacattataattttgaattgtttttggaaaaacagaaccgatgtgtaaacattatagctcgactgttcaatgcgccactcgaggaatctgagacggcggtgggagtaggaacagttggttcttcagaagccatcatgttagccggattggccttcaaaagaaaatggcagaacaaacgcaaggctgagggtaaaccctatgacaaacccaacattgtcaccggagccaatgttcaagtaagtatatatatatacagcttaatctgactagttagaccgttataataaatagaaattttggctcccaatttcaggtttgctgggagaaattcgctcggtacttcgaggtggagctaaaggaagtaaacctaagtgaaggttactacgtgatggatccagacaaagcagcagaaatggtagacgagaacacaatctgtgtcgcagccatattaggatccacactcaacggtgagttcgaagacgtgaagcgtctcaatgacttgctagtcaagaaaaacgaggagactggttggaacacaccaatacacgtagatgcagcaagtggagggttcatagctccgttcatctatcctgaattggaatgggactttagacttcctttggttaagagcatcaacgtgagtggtcacaagtatggactagtctatgctggtattggttgggtcgtgtggagggcagcagaggatttacctgaagagcttatctttcatattaattatcttggtgctgatcaacccactttcactctcaatttctccaagggtatgtttataactttcatattttatctaggtcaagtaattatgatgttattttacgtagcattggttatgaacgtttttggttgttgtaggatcgagccaaattattgctcaatactaccagctcattcgtcttggattcgaggtgagtctatttaagccgaaaatatgttttgttacattttcaatttataatgtcaattttctttcgtttgttacgtttatgactctggtatttgttacatcgaatgtttgatttgattaggggtacaaaaatgtgatggagaattgcatagagaacatggtggttctcaaagaagggatagagaaaacagagcgtttcaacatagtctcaaaggaccaaggagtgccagtcgtagccttttctctcaaggaccatagtttccacaacgagttcgagatctctgagatgctacgtcgttttggctggatcgttccagcttacactatgcctgccgatgcacagcacatcacggttctgcgtgttgtcatcagggaagatttctcaagaacactcgcggagagacttgttgctgatatttcgaaggtgcttcatgagctagataccttgccttccaagatatctaagaagatgggaatagaagggatcgcggaaaatgtaaaggagaagaagatggagaaggagattctgatggaagttattgttggatggaggaagtttgtgaaggagaggaagaagatgaatggtgtgtgctaagcaagtgtgttgcctttgtgtggaaatgaagaggtacttgtgaggactttgcgtttatcagtttatgtgtttgtatatctatttgatccagttattatggattatatacgcttgaaactcattttaagccattgttattgaacgtttatcaaatactttattatgccaagcaa

SEQ ID NO: 147152 - DNA, 275 bp, Arabidopsis thaliana landsberg
aaagcatctacagagaaatctgaccacaataatggcgaataacgaagaactctctgaaaattcaaactacaatggactagactcgtttgatgctgttgaacaacgttttaaagatcgatcaaaggtaacatcagattcgattttcaccatttttgatgttccaatttgttgattttgacttgtggaccaatttttttgattttgacagaaagttgttcagacgagagagttgttgtcttaacaagcggtacaaacgcgtgagatcttatcgaaac

SEQ ID NO: 147153 - DNA, 958 bp, Arabidopsis thaliana landsberg
ctctgtggaagccccattttcacatctacacaagcacaaatctcacaaatctctctcaagcttcgatctttcttctagagacgagctagtgcttccacaaaccctaaactatgtccggcggtttcttccgggttagttttccgatcatctacttcctcaattgatctctcatcttttagatccagatcgatgcaattcaaaagttttgttgaagttcccatggtttaataacttctttgttttgagcttttagggtacttccgccgagcaggatactcggttttctaacaagcaagctaaattgatgaaaagccagaaatttgctccggagttagagaatctggtgagttttctctttgtgtactcgtccattttaacgatttgtgaattcgtagcttgaatttacttaattgagattcgattactagataattcgatacatatgttactatgaaattaagtttggggagggcttaatgatgtcttctacttggcttggtgttaggtggatatcactaaagtgaagatggatgttatgaaaccttggattgcgactagagtcactgagcttcttggtattgaagatgaagtgctgattaactttatctatggtctgcttgatgggaaggtaagcttattactgatattttgtgtttctgagctttttattcgactgtaaataagtgacagtctgacagaggggtagtatgatttcgtagcccatgccattgatacaagtgaattttttttgttggactaatatgtaattgaacgttcactatgtatgtaggtagtgaatggtaaggagattcagataacgctgactggattcatggagaaaaatactggcaaatttatgaaagaactttggacacttcttctaagcgcacagaataatccaagtggtgttccacagcagtttttagatgctagagctgctgaaacaaagaagaaacag

SEQ ID NO: 147154 - DNA, 323 bp, Arabidopsis thaliana landsberg
tgaacttgctggtgttgtaggcacatttggtcgggttttggaatgttgggatcgtgatacaaaagaatatgtggcaataaagataattcgaagcattaagaaataccgggatgcagcaatgattgaaattgatgtacttcagaaacttgttaagagtgataaaggccgcacacggtatttatttatcttctagactttagttgatgacatcgtttccttcagaggtgtatatcattgctcagtttcttcatttctgctttgtccttgcagctgtgtacagatgaagaactggtttgattaccgaaatcatatttgcattgtaa

SEQ ID NO: 147155 - DNA, 317 bp, Arabidopsis thaliana landsberg
gatcgacattggagaagtaaagtcaatcccatacaaaccaggaagccgaggaccgaaagaagctgatcagctactagagaaagctggttatcttcagactcacggctatatctggatccctcctacactataaaaccctacatatatataaatacacaatacatgtatctacatgtatatgtataaattatgctgaatagtccctcctcgagtttggtgtttgtacgtgaaacttgctacttcagctgttcactttgacacttcctttggtcttgtatttgcggctttgtagaaataaaaataaaaatcttaccaat

SEQ ID NO: 147156 - DNA, 795 bp, Arabidopsis thaliana landsberg
aggtgaaatttgtagaagatcatccagggaaacctgttttcccctctcgcattcttgaaagattccccggactgagaagtggaaaaatttggaaggaggaacatgacaagataatgatacgtgctgttttaaagtatgaaccctgcaccactgttcttaccgaatggttttattttctcatcattctccattacttgctcacattttcttttccttctctggaaatttgaatctttaggcatgggtacgcacggtggcaagctattgttgatgacaaagagttggggatccaagagcttatctgcaaagaattgaatttccctcacataagtttgtctgctgctgaacaagctggtttgcaggggcagaatggtagtgggggctctaatccgggagcacagactaaccagaatcctggaagcgttattactgggaacaataatgcttctgctgatggggctcaagtaaactcgatgttctattatcggcacatgcagagacgacttgttgagtttgtgaaaaagcgagttctgcttttggagaaggcgatgaattatgaatacgcagaggaatattatgtatgttgtaccatctgcagtgttggtacttactcacatgttttgcgctgaattgtttaactttgattgaatctctggttgcagggacttggtggctcatcatctattcctactgaagaaccagaagctgaaccaaagatcgctgacacagtgggagtgagctttattgaggttgatgatgaaatgcttgatggacttcctaagactgattctatca

SEQ ID NO: 147157 - DNA, 510 bp, Arabidopsis thaliana landsberg
tgtatattggaatatgaagtgcagaaagaaggtgttccacacaattgtgttcataatgcagaagctgcaatgaaacttgtacttgctatactagataatggagcagagacctccgttccactatctaaagaggtaagttggattgcacaaacttcattagttcaatctaaacttataaaagcataacgttttgtctgcataattccatatagatgttggaagctgagaagtcaaagctctaccttcatagaatcccttgcaatgttccatatgaagagttaaatggagtcgtttccagggatatcccacatgaagttaaggtatgaatccactcaacatatacattttcttatccaaattctgtattttatgaggctctcgttgtttcttgattttcttttggcagccgtcgaaaaaacaagaccgtcactactatagcgcgattgttgtttttaagagtccaaaaaaagcaaatcaagcatttgaaaacattgctggagacttggaaag

SEQ ID NO: 147158 - DNA, 253 bp, Arabidopsis thaliana landsberg
atctcgagaaagaaagaaaaaaagagaaggcatggccgcggaagaagcgacggagttctacctgagatactatgtcggtcacaaagggaaatttggacacgagttcctggagttcgagtttagagaggacggtaagctccgttacgccaatacctctaactacaagaacgatactattatccgcaaggaggtatttctcacccccgccgtgctcaaggaatgcaagcgtatcgtctccgagagcgaggtcctt

SEQ ID NO: 147159 - DNA, 823 bp, Arabidopsis thaliana landsberg
caaaagcaggatgtatctcctcgagaacaccggtacgtttttgaaaatgtacccgttaataattttcctttcttttggtttgtttgttctcttgtaattattgttgtggacgcatacatatctaattttccttgaaattacgtttacaggcgattttgtgaaaaccaatgggctccaagaaggtgatttcatagtcatatactccgacgtcaaatgtggcaaatatgtaagagaagcatcacaatatttttctatacttttcattagtatttaactctcatcattacttttgttggtatttatcttgtcataattaattgagaataatattatgacagttgatacgaggggttaaagtaagacaaccgagcggacaaaagccggaggctccaccgtcgtcagcagctacgaagagacaaaacaagtcgcaaaggaacataaacaataactctccgtcggcgaatgtggtggtcgcttcaccaacttctcaaactgttaaatgaaaaacagagacaaaaagaaacaatataaatattattatgtaccaaataagaaagagggcaaaaggaaaaaatggcagcgtacccgagtgtgccacttctcgtgcatgcatgggatcttgaagacaaatggagggtcatgattaaagctgtttggtcggggtccgggtttttactccattttttgctttttcttgtcgagtcggtttttttataactctttactctttttaccttcaggatattgtagagatgattaattctggaaatggtgtttgtgttatatttctggagagatgattatatagttcttttgttgttgt

SEQ ID NO: 147160 - DNA, 474 bp, Arabidopsis thaliana landsberg
gcattggttctttttttattgattagtgcaacagctcagagtgtgcagactatgattgtgggacgtctgctcgctggaattggaattggaatctcatcagcgattgtaccactttacatatctgaggttgtttaaatactgattttcattatttttgcacttttagcataagatgttagatttgtttatatgttatgtctctgaagcgtttgatgatggttgtcagatatcaccaactgaaatccgtggagcactcggatctgtgaaccagttgttcatctgtataggaatacttgcagccttgatagctggattaccccttgcagcaaaccctctatggtatgtaacatcccttttttattcatcatcttttattttgggttgcatactgtgataagttttgatatcgtggtcttctaggtggaggacgatgtttggtgttgcagttatcccttccgttctattggccatagg

SEQ ID NO: 147161 - DNA, 1099 bp, Arabidopsis thaliana landsberg
ctataaccggtaacaacgggtctggtaataccggtagctccggtggttggttgagttatatggctatgggggtttaagcaagaaagacgtggtcgtgttcttcttataagggtttttgtttataatttggtaatcgaaaaagagagatttgataaaatcctttgtgttgaaggaaaaaaaaatcatataggtaacgtttgatacaagtaaaaaaaaaaaatttccatcactttcttgggtaaaaaaaacatgggttagaggaaaaactggggaaaagattttagattaagtgcgtaaagaattctgattccttcgtctccgatctctcatttttctggagaaattgtcaaaaatttcagatatctatattgtcttggaactgaagattcatcgaaaggagagaaagatttaaactttttttgatggtttttgtgttctcgattttgccaaaagtttttgtgttggtttgaccatcgagacaacttagtggaaattcgttttttatgtgaacttatatttggaattttcaaattcaagaccttttggttggaagcttaagaggcattatggtatcttttggaacttatcatcatcttctataggaactcttcggcctcttatatgaacagaatcatctcattcatcgatctgcgaactactatctgacaattcgaaggtgtctctctttttgctctaagacgatctggatatcccttaattcagagatcgaagcttctttatcattgaatcacgtaaggtggtcttcaatccggatcttgtgtttattagggatatagaatggatcatcagatacgatttgatattaccgatctgtgattcttgaataggattgagacctcctatggctcttggttgttatatactacagatcgaggaggaatattcgctgctcatcgcttgtggcaatcacatcatctgccatatgcatccaagtaatggcagtcacataaaggcttagaatttggagatgatggatacaaagtacctgctcacgctcgagctaccagatcactccgcgtaaatgaccctatgctatactctccgatgagctggtaaagaacctatcaggtacctgcat

SEQ ID NO: 147162 - DNA, 804 bp, Arabidopsis thaliana landsberg
atggaatctggtttctccggcggtggtggtgggtcggatttttacggcggtggtggtggtagatctatacctggaggtccaagaactgttatcaacgtcggtaacaataatcctcagacgacgtatagaaaccagattcctggaatcttctttgatcagatcggaaacagagtcgccggcggtaatggattctccgggaaaaggactttagcagattttcaagcggctcagcaacatcaacatcaacatcaacaacaacaacaacaacaacaacaaccgttttatagtcaagcagctctcaacgcttttctttcaaggtctgtgaagcctcgaaattatcagaattttcaatctccgtcgccgatgattgatctcacgtcggtgaatgatatgagtttgtttggtggttctggttcatctcagcgttacggtttaccggttcccaggtctcagacgcaacagcaacaatcggattacggtttatttggtgggatccgaatgggaatcgggtcgggtattaataattatccaacattaaccggcgttccgtgtattgaaccggttcaaaaccgggttcatgaatcggagaacatgttgaatagtttaagagagcttgagaaacagcttttagatgatgacgatgagagtggtggtgatgatgacgtgtcagttataacaaattcaaattccgattggattcaaaatctcgtgactccgaacccgaacccgaacccggttttgtctttttcaccgagctcttcttcttcgtcttcttcgccttctacagcttcgacgacgacatcg

SEQ ID NO: 147163 - DNA, 149 bp, Arabidopsis thaliana landsberg
agacttcaggaaaaaaaaaaatcatttcttctctgaaacgaaaaaccaaagaaacgagaagaagaagctatggcggatcagctaactgatgaacagatctctgagtttaaggaagcttttagcctcttcgacaaagatggagatggtta

SEQ ID NO: 147164 - DNA, 618 bp, Arabidopsis thaliana landsberg
agaaaagtgaatctcttcttgcaggaactagatacagagatagtagtggctacagctcgtggaacaaattcagacactactgctgttgctgctaacgtagttatggatgagagacagatgaatgctcttttcctcgacctggtaagcagttagacgtaatttcttaaggatttttttttggtttgaaagttgttaagaggatatagaagttgcattgagttaagataaaccccaggatttgagctttcagcagttgaaaataagttcactttcttataggtgcgtgttagcgaatcatatggtcttaagttccgaagagagtttgcacttctgttaaagcaacttctgtacttcgatcgatacacaagactattagccccaaacctgaacatgctgcaggatcagcggatctctatcgcgtccaacaagaggacgaatggatacaaggacagcttcaactaagtttatgcaaatatacttcactaaacctattcaaactttttatttatttacaagtggtaatgttatagtagattatcaagccaagaacgatgatgaattcaatcttgttacaaacatatcatgactatatacaacagatgaactatatcttcttct

SEQ ID NO: 147165 - DNA, 1023 bp, Arabidopsis thaliana landsberg
gccgaagttgagcatatcggtactggttgagattattctccggcggagacaatggaatcttccgtcgctccgtttcctcaccgacgcacgcatctgccgaatcgaaattatcgctctttgctttatcacttttgctcgagtttcgatcgggagcctcaaatttctcttgccacaccggcagttctccaggagctggtcttacgaacaggtcagtgttcgattcgaagtcaaaattcttaggaatgattaattcatcttctagtaatcaaaattcaaagttcatctgttgcttgaaattgcctgaaactatttctgatgctatttgtgttttcttacatagaaattgctcaagagtctccgggagaaacttgcgaaccgccggagaatttatcaattacggaatcaaaactcaatggagtgtctggtgattcaagtggtgagaaggtggaaacaatttcacaggaaaagagtttgatgcttggagatatttgtgatggcattgacttgcaagatgcatctgttgttagtagacacacagattttttcgatagctttgagcttatgattaatgaaactcaagattctgttccagaaagttgtgtgaatctctttgaggcattggatgtgaatgactatgacattgtccaaaatgtcctggagaagcctaatattgcaactcaagttcaagtagatccagttgaaagtgagaaaaaggcagaggaggttcctaaatctgttgaatctaatgaggttataagttctggagttttggaagcttgtaatggaacagttcaaagagagatggaattagagaaacctgttgataatagtccggttttggtagattctgtgtctcggatagttggaggtgatgatgtagaagaaggagagatatcaggggatgataatgatgatatgcttgtagaagatgatgaaacagtcgaaagacatgaggagtatcaggtctcacaagatggaactggtaatagccatctcactagtcataagagttttggtgttgag

SEQ ID NO: 147166 - DNA, 498 bp, Arabidopsis thaliana landsberg
gccactgagcttcgtttagcgccctttgtggtggctatcagtggagaacagcttgtaaacattgtaagagacggaggaattatcgagaacattgtgtggaaggaagaggaagaagaacaaggggatcacacaaatgcggaccagccttcttcatcctcggtgggattaaaccgaggccctcttcgtctgacatacattggatatggagatgaccaagaggtaccgatgacgagaagtagggggaaaatgggaacgataaagatgctgatgtttctgccgccaagatatcatctaatgtttgaaatggaagttgggcaaggatcgacattggtgcatataagaacagattattggccttgcttagcttatgttgatgattacttagaagctttgtttttgtaataatagcagagactttcactattttcttcttattctttgggcccaacctacatgtaaagttttacccaaacgaacaaacacaaattctgttttttg

SEQ ID NO: 147167 - DNA, 778 bp, Arabidopsis thaliana landsberg
gaagaagaagaaaccccaaagagcaatgccaacagaaagatcctctttgtagtccttgatatgtcaagtaagtggaaccatatgcaataatggaattgtttttaaagtatatagtgtaccacatcatttttaacaataatcggtaatatgaaaataactcattatatagagtttttttttttggggttgattttcgaaaatatagccacaataaggaacaataaagatttgaaattatatatatatatatctgtaatacttttcttgtgtttaacctttctcgtatttattgacagatttgatcaacgtcgatacatcggggattactgctttgctggaactgcataacaaattaatcaaaactggtgttgaggtaattaagttacattcatctacgttatattttaatcgccctttctcatttattaaaacttaagaattatggcaacagagatatatatcattttgaatatattttttgcagctagtgatcgttaacccgaaatggcaagtaatccacaagctgaatcaagcaaagttcgtcgacagaatcggtggcaaagtttacttgacgatcggcgaagctcttgatgcttgctttggattaaaagtttaagaaacagttttcaaaggaccagttgtgttacgggttattgcatgtgatgaatttatgtgagttgttgtgatttaaataatgtgatgcatgcatgatcatgtataatatttaagtacgtatgtgtaatagagtgctcggtcgaaactgaataaagtcatgcaa

SEQ ID NO: 147168 - DNA, 3146 bp, Arabidopsis thaliana landsberg
atggaagctctgagtcacgtcggcattggtctctccccattccaattatgccgattaccaccggcgacgacaaagctccgacgtagccacaacacctctacaactatctgctccgccagcaaatgggccgaccgtcttctctccgacttcaatttcacctccgattcctcctcctcctccttcgccaccgccaccaccaccgccactctcgtctctccgccaccatctattgatcgtcccgaacgccacgtccccatccccattgatttctaccaggtattaggagctcaaacacatttcttaaccgatggaatcagaagagcattcgaagctagggtttcgaaaccgccgcaattcggtttcagcgacgacgctttaatcagccggagacagattcttcaagctgcttgcgaaactctgtctaatcctcggtctagaagagagtacaatgaaggtcttcttgatgatgaagaagctacagtcatcactgatgttccttgggataaggtaatttcgatttcggaataataaagtttcttcgttttgatttcatgaattggataaaggaaggaacttttatctagtgaaggttcctggtgctctctgtgtattgcaagaaggtggtgagactgagatagttcttcgggttggtgaggctctgcttaaggagaggttgcctaagtcgtttaagcaagatgtggttttagttatggcgcttgcgtttctcgatgtctcgagggatgctatggcattggatccacctgattttataactggttatgagtttgttgaggaagctttgaagcttttacaggtagtttgacttgctttggtaatttgacgagcgttggctttataagaactttcttgatttgatactttgttattgagtcttgtgtaggaggaaggagcaagtagccttgcaccggatttacgtgcacaaattgatgagactttggaagagatcactccgcgttatgtcttggagctacttggcttaccgcttggtgatgattacgctgcgaaaagactaaatggtttaagcggtgtgcggaatattttgtggtctgttggaggaggtggagcatcagctcttgttgggggtttgacccgtgagaagtttatgaatgaggcgtttttacgaatgacagctgctgagcaggtatacagtttagatacctttttttaatttctttagcatgatataactttaggtttctcattttaatgtatgttgtgtggtaggttgatctttttgtagctaccccaagcaatattccagcagagtcatttgaagtttacgaagttgcacttgctcttgtggctcaagcttttattggtaagaagccacaccttttacaggatgctgataagcaattccagcaacttcagcaggctaaggtaatggctatggagattcctgcgatgttgtatgatacacggaataattgggagatagactttggtctagaaaggggactctgtgcactgcttataggcaaagttgatgaatgccgtatgtggttgggcttagacagtgaggattcacaatataggaatccagctattgtggagtttgttttggagaattcaaatcgtgatgacaatgatgatctccctggactatgcaaattgttggaaacctggttggcaggggttgtctttcctaggttcagagacaccaaagataaaaaatttaaactcggggactactatgatgatcctatggttttgagttacttggaaagagtggaggtagttcagggttctcctttagctgctgctgcagctatggcaaggattggagccgagcatgtgaaagctagtgctatgcaggcactgcagaaagtttttccttcccgctatgcagatagaaactcggctgaacccaaggatgtgcaagagacagtgtttagtgtagatcctgttggtaacaatgtaggccgtgatggtgagcctggtgtctttattgcagaagctgaaagaccctctgaaaactttgaaactaatgattatgcaattcgagctggggtctcagagagtagcgttgatgaaactactgttgaaatgtccgttgctgatatgttaaaggaggcaagtgtgaagatcctagctgctggtgtggcaattggactgatttcactgttcagccagaagtattttcttaaaagcagctcatcttttcaacgcaaggatatggtttcttttatggaatctgatgtcgctaccataggtatgattaaatgatgcaattttcatatatctgcattgctcaaaatatgcttgttttgtgagctaagaacatagttcccacttaatacatgtcccaaaagttgtaccaagattaacaagttgctgagtaaatttcactaattatgctgcttgaattttttgatcaaactgtagacagaaatgtaaatttcactctcaacatttctgtttagaataacgtaggattagagattgccttagtgtggctttgtccaacttttctttccttgatttttttcttttcgatttagggtcagtcagagctgacgattcagaagcacttcccagaatggatgctaggactgcagagaatatagtatccaagtggcagaagattaagtctctggcttttgggcctgatcaccgcatagaaatgttaccagaggtgagggaataaatctacaattcaatcaattgtgtgaaaactgttggacatgattatagtctggtgccttgtttgattctgttatttataggttttggatgggcgaatgctgaagatttggactgacagagcagctgaaactgcgcagcttgggttggtttatgattatacactgttgaaactatctgttgacagtgtgacagtctcagcagatggaacccgtgctctggtggaagcaactctggaggagtctgcttgtctatctgatttggttcatccagaaaacaatgctactgatgtcagaacctacacaacaagatacgaagttttctggtccaagtcagggtggaaaatcactgaaggctctgttcttgcatcataatatactcatatgtagcatgtctgagcttgcgagattctctttgttttgtaaattctctctctaagttagtgtttataaatgaacacaaaaaaattaacgttcttggca

SEQ ID NO: 147169 - DNA, 254 bp, Arabidopsis thaliana landsberg
caaaactcggaatattacaaatctgccactagaggtgaatttttgactaaatcgttttttttttttttcgatctcacggggttgattctcgttgttgtctcatggagagcacggagcagccgaggaacatctccggatcgatgcagagccctagatctccgtcttcgcatccgtatctgtcagtctccgtcacagatcctgtcaaattaggcaatggcgtacaagcttatatctcttacagagttatcaccaag

SEQ ID NO: 147170 - DNA, 3466 bp, Arabidopsis thaliana landsberg
taaagaacaggcaagtccgaaccaaatctgaacaaaatactcatacacacacacacttggatttaaagaaaaaaaggagttttccttcttcttttgggtgtgtcaagtttctgttcttccttttctcgtgcttccatcacgagatatctcacaaggctctcgcgactcaagaaaggtaaagataaagaaagaagaagcaaagattccataaatggacttgaaaagcaacaaccaccagcaacagcaacaagtacttgatggctcggacatagttgagctggtggaaaacgagaaagtgttcgacaagtttgtggaacaaaagtttcaacagttagaccaagatgaagatggtaagctctccgtgactgagttacaacccgccgttgctgatatcggcgctgctcttggtttgcctgctcaaggaacttctcctgattccgatcacatctactccgaggtaatttccttttcttctttcttaataccttttatgttcgtgatctatggtcccgtccgactaatttgcatatacatatgttagcattttaatttcttaatcgcttttcctgtattattgatctttgcattcgttggttatcatgtgatctttgattttttccgattaccgtatattttaatgctagtaagaaatgttttcaaattggccggcgtactaattaactactaactagaaatgttcgcatctaatttttgtgttacatctttatttttatttgatttcagtattcatttaactgttaacaattctttttggggtctatatatgccctttgcaaattctttaactttgtcactagtctgtgagatggagtcgaacctctcataccgagggacacaggttgtttaactctcgccattttgtgcatagatttttaggatcttcgaaaggtcatactaagtcgtaaatcatataaaattatatatggaaaacctcaaccattttaccatagttgtttaagttatcttcttgatacttacgtggtggtctggtggattcatcctattttttttttttttctaatattaaaatgtgtttttctttacagtaaactaggtcaaaaaataatagaatcagttagttgttttaaagaaatgataatagctttggtcggtgaccttatcctctatcatatctcaaactagcccctcgtgtcgctcttctcctgtcgtttcagtgttgaaacatcgctttataaatcatcacctagttattattttactagttactgtataaagactgttatagtattttgtttatttattcgttatttacttatgtatgactatttttctctatttatttagtttggctaaactcatacaatttaggtgaactcaacaatttccagtataatgcttgtcctttcttgacggaaaaaaggtttctttttcaaataattaatattttatcaattaaagcttttatctttttaagcattcggtctgcgtaaggtttcattttcgttcaagactttcttgacattttttaaaaacaatatcccatatcacatttttcaatcctcttatttatgacataatctgtgacgaaatcaaacgccgtttcctattatagagaatatccaacaaaaaaacgtacgagtatgagtatcacaaaaactattgagtggaccaaaaacgagttacaaggtcaatagtaatatgtttttatggacatggaaaccccaaagttcgtcgtgtgtggcatgaatcacgtggattaattaattagatcgagaggacattgattgtagatttgtagttattagctgcatagatatccaagaagaagtagtaaatctgaatacgaatctctctcttagtggatacaaatcagtatccaattacttatcgttaggtttagcttttggtgtatttaaagaagagacaacgagattaaaccaataaccctctagctgtcttatccgtacatttatttttcatcgtttgtaacgttataataaactatatacaggtcctaaacgaattcactcatgggagtcaagagaaagtgagcaagacagagttcaaagaagtgttgtcggacattttgttgggtatggctgctggtctgaaacgtgatcctatcgtcatcctcaggatggacggtgaggatctctcggagtttgtccacggccctggatatgaaatcgagagcatttctgttttctcagagctctccagtagcaaggacgcatcgctccgtgattgtatcgtcaaagctctccagtctctttctgttgatcatggaatgcctccttccaacgacccatgggtacctatttattttatttttatatatttctgttaagctatggattttcctaatttaacttcaaatctaaatttatatgattgataaaataaagcatataatattaagaaccgtttgtttttgtatttttaccaagaccgtaaaagtacttttcgggtgttttttttttgttgtacaaaatatcagaacgatacttatatggtgggagtacatatgatacgtaatatgtattcaagttcgtatttgatgttatatatgttgctagagacaactgagttttgcctaaaagcagagtccttgtaacaggtgatgagcaacatcgtagaaccaattgttgactcttgtcttgatgaagaagataaaagagagaagagcgcgtctcaggagagattcttggaagcattcaagagagtcgtggagagtgtggctcagcgtctcaatgaacagcccgtgatcgttgctcacagcgaaaacacctttgatgggagcggtatcaggaggctcttgtccaataaattcgaattcgataaggtaaactaccatacatatatatgttatctagcttttatgctaaaggaaaactttttaaatgatggtaacgagtgatgatgatccggaacggtttggtcgcaggcactaaacgttgccatggagacgattccaaaagaccgtcagggtaaggtgtctaaaggatatctacgagctgtgcttgacactgttgcaccatcggccactttaccaccaataggcgctgtgtcccaggtaaataatgccccgtctaaattattttgtcttttaaattgtttattttgcctttgaatttgcatgttacagttatgtgttaaagaaatgagccctctaactagtgtcttaataaaatataattagtgaagtttttgtttgtttcaacggcattgattagttaagtttgtttttgtttataagatggataatatgataatggaagcgttgaagatggtgaatggagatgatggaaatgtggtgaaggaagaagagtttaagaaaacaatggcagagatattggggagtataatgttgcagctcgagggaagtccaatatcggtttcctctaactcggtggttcacgagccgctcacctcggctacctttctgccgtcaacttcgactgatacagaggagccttcaaactaa

SEQ ID NO: 147171 - DNA, 420 bp, Arabidopsis thaliana landsberg
atggagtcaagacagatcgtcgacttggaaaaacaaaggtgggtcccatctaattcactgtcctgatttttcctcttctttccttgttcgtctccccccaatctcctcctcctctttttttgttctgaagagactctcgccgtccaatgggaagctgttggtctgatggctcttacgctggtggaggaatggtcggtgttggtggtggggctaattcctccgccgccactcctaacgacgccgttgactactatctcaagtctcgtggctacaatggcctcttttctcagatcgaggtctgtttcttcccttttcccttcttcaagacttgaaatttttagtttcactcatcttttttttctttgttcgcagttatctttctctgcttccaatttgcgagaccgggacgtgatttcaaag

SEQ ID NO: 147172 - DNA, 507 bp, Arabidopsis thaliana landsberg
ctcacacacaaactaaaccggaatggccaccgccgacgaattctccgacgaagatacatcaccgattgaagaagtccgtttaacggtaacaaacaccgacgatccaacactaccggtttggacattcaggatgtggttcttgggtctaatctcatgttctctcctctctttccttaaccaattcttctcgtaccgaaccgaaccgctcgtaatcactcaaatcacggttcaggtggctacactacctatcggtcatttcttggccaaggtgcttcccaaaacccggtttgggttatccggttgtggatcggcccggttctcgctgaacccgggtccgtttaacatgaaagagcatgttttgatatcgatatttgcgaatgcgggtagtgctttcggatccgggtcggcttatgcggttggtatcatcacaattattaaagctttttatggccggagtatctcttttattgccggctggctcctcatcatcactacacaggtactcgt

SEQ ID NO: 147173 - DNA, 1997 bp, Arabidopsis thaliana landsberg
gatgatgcttctaatttcccttttcgaatatattcgtttaagtctctctttatataattaacagtttttgttaatgggaatcgcaggtaacgattgagaagaatctctctttttctccactgagagaatcgcattctgagagatcagacaagaaaagacaatggtggaaggaggaattgccaaaacagacaaaacagagttcactgagtgttggagaacaacatggaagacaccttacatcatgagacttgctctctccgccggaatcggaggtcttctcttcggttacgacaccggagtcatttccggggctcttcttttcatcaaagaagattttgatgaagttgataagaaaacatggcttcagtcaactattgttagtatggcagtggctggagccatcgtcggagcagcagtcggaggttggatcaatgataagtttggtaggaggatgtcgattcttatcgccgatgttcttttcttgatcggtgcgattgtgatggcatttgctccggctccttgggttatcatcgttggaagaatctttgtcgggtttggtgttggtatggcttcgatgacgtcgccgttgtatatctctgaagcttctccggcgaggattagaggtgcacttgttagtactaatggtcttctcatcactggtggacaattcttctcgtacctcatcaatcttgcttttgtccatgtaagtgaaatgatttagtttcaagttcttgtgtattataaccaattcaagaatgtctctaaatttgattgaaaatgttgttgaatagactccgggaacatggagatggatgttgggtgttgcgggagttccagctattgttcagtttgtgcttatgttgtcgctacctgagtctccaaggtggttatatagaaaggacaggattgcggaatccagagcgattcttgagaggatttacccggctgacgaagtggaggcggagatggaagctttgaaactgtcagtggaggcagagaaagcagacgaggcaatcattggagatagcttctctgcaaagctgaaaggagctttcgggaatcccgttgttcgacgtggactcgctgctggtatcacggtgcaagtggctcagcagtttgtggggatcaacactgtcatgtactacagtccttctattgtgcaatttgctggttacgcctctaacaagacagctatggccttgtctcttattacttccggtttgaatgctttgggttctattgtgagcatgatgtttgtcgatcggtacgggagaaggaagctcatgatcatctctatgtttgggatcatagcatgtcttatcatcttagccacggtgttctcacaagcggccatccacgcccccaagatcgatgcgtttgagtcaaggacgtttgctccaaatgctacttgttcagcatatgcccctctcgcagccgaaaatgctcctccctcgaggtggaactgcatgaagtgtctcaggtccgaatgtggattctgcgccagcggggtacagccgtacgcaccaggagcatgtgtggtgttgtcagatgacatgaaagcaacttgcagctcaagaggaagaacattcttcaaagatggatgtccaagcaagtttgggttcttagctatagtgtttttggggctttacataaaaatctacgcaccatgtatgggcactgtcccgtggatcgtcaactctgagatctatccgctcagatacagaggtcttggtggaggaataaccgccgtctcgaattgggtctccaacctgatagtgagtgagagcatcctctcactcacccatgctctcggctcctctggtaccttccttctctttgctggcttctccacgatcgggctcttcttcatttggttgctcgttcctgagaccatagggcttcagtttgaggaggtcgagaagttgctcgaggtcggcttcaagcccagtctcttgcggcggagggagaagaagggcaaagaagtcgatgctgcttaa

SEQ ID NO: 147174 - DNA, 443 bp, Arabidopsis thaliana landsberg
agaaacttaaccagagacatatgtctctgtcctcaaacccacctcttgtctctatgggatcgcaactctcaaacgcaatcgacggtaaagataacaccaaaaccatcggatcagcggatccggaccagcttatggagatcgaatccttggagaagatcttaaattacaagttcatagacaagagtttgttgctgaaagcgtacacagacgctagctacgttgatgacaagagtgaatcgtacgaactcctagaacttttaggagattcgatcctaaacatgggtataatctatgattatattaagctctaccctaaagaagcacctggtccgttgaccaagctccgagccgtcaacgtagataccgagaaattggcacgggtcgctgtaaatcaccaactctatagctatctccggcataagaaacccttacttgaggagcag

SEQ ID NO: 147175 - DNA, 782 bp, Arabidopsis thaliana landsberg
gtacacagagctgttttgcacaatggcgagaaagtggtagtaaaagtacaaagacccggactaaagaaacttttcgatattgatctacgtatgtagtaacaacttctgagttatataatagaatacctgcatggatgtttgagaattgctgaaaatggcgtaatttattttatcaggaaatctgaagctgattgccgagtatttccagaaaagtgaatcatttggtacaaacgattgggttggtatctatgaagaatgtgccttgtaagtagttttcccgagacgtagttataacttgtggctccaggctatgtaggactgatatttcctttggtttcagaattttgtatcaagagattgactacataaacgaagctaagaacgctgacagattccggagagacttccggaatataaactgggtccgcgtacctgtaagtttaacttgctaaaccaaaacccccatgagataagttcttgtatagttgtgggatagatgaaactcattctggttatctcgttttcattgtagttggtttattgggattactctgccatgaaggtcttgactttggagtatgtaccaggttcgtgttgaaactacccaatatattggtgtcgtttgataaagtatgtagcggtataaacactcattgatttctgtgattaggtgttaagatcaacaacttggacgccttagctgcacggggatttaaccgttctagaatcgcatcacgggccattgaagcttatcttatacaggtcaataacaagatagcgaa

SEQ ID NO: 147176 - DNA, 581 bp, Arabidopsis thaliana landsberg
actccacaaggaaagtggtgtggcttagggagaatgcttcaccgctccggatatggatccaggtctagctcggtacgtatcaaggtgtataaagaagatttatgatgttttagtttagtatgtgaagcgtaattcgaatgttatatgtataacaggaggatgatggacaaggagggaggaggaagaagggaataacacaaaagatcaaggagaagttgccaggtcatcatgatcagtctggtcaagctcaagcgatgggcggcatgggatccggttacgatgctggtggctacggtggtgagcaccacgagaagaaggggatgatggacaagatcaaggaaaagcttcccggtggtggccgttaagcttcgaacaatcgtgtatacatattaaataaaaataatgagggtttgtaacgcagtcgcattcggtcgttgtatgtgtgctttttatgtatgtacgtcctgcgatgtgtgttgtttacttacatgagtgtgtaatgagcatctggctctttttatgttctgagatgtttgtgttatgtaatttcatatctatataaatctactttcttctgctta

SEQ ID NO: 147177 - DNA, 419 bp, Arabidopsis thaliana landsberg
ccgaattacgatacattttgtgattcttttgtgtgttggaatgttttttgtagggtgttgcgaaccgtggagcatggggccgagtaggacgtgatacggagaaagaagggaaaggatactttgaggacaggaggccagcttcgaacatggatccttacattgttacttccatgattgcagagaccaccatcctctggaatccttgatgatcatcagatcaagaaaaaatcttgaatgtcactcaaatttgtgtttcttgcaagattcaaagtttgtgttctctatcaagcaatgtcttaggataagtcaaagatttgctctgcttattctgctttttatttacttcacatcctattgaaaacatttctgtgtattatttatgaataaacattatcttaaaagggctgatttatttacta

SEQ ID NO: 147178 - DNA, 1599 bp, Arabidopsis thaliana landsberg
gaagacttactcgtggctgcaaccctactagctcgaaatttattcacacatggttacgctttggggaaattatgaggggatctctcagtactaagtatgttccgattaaacccattggaagaggagcttatggtgtggtttgttcttctatcaatcgtgagactaatgagagagttgctattaaaaagattcacaatgtgtttgagaatcgtgttgatgctttgagaacgttgagggaacttaagcttcttaggcatcttcgacatgagaatgtgatcgcgcttaaagatgttatgttgcctgctaatagatccagtttcaaggatgtttatttggtttatgagctaatggatactgatcttcatcagattatcaagtcttctcaagttcttagtaacgatcattgccaatacttcttgttccaggtaactttaagtccttcctcagtaactctatgtttccagttttgtatgctttctcctgaaattttgctttgttgttgcatgttctgtttagttgcttcgaggattgaagtatcttcactctgcaaacatacttcaccgggatttgaagcccgggaaccttcttagttaacgcgaattgcgatctcaagatttgtgattttggactagcgagaacgagccaaggtaatgaacagttcatgactgagtatgtggttacacgttggtacagagcacctgagcttcttctttgttgtgataactatggaacctccattgatgtatggtcggttggttgcatattcgcggagattcttggtaggaaaccgatttttccaggaacagaatgcttgaatcagcttaagctaatcatcaacgttggtggtagccaacaagaatctgatattcggttcatagacaacccgaaagctcgaaggtttataaagtcttttccttactcaaaaggaactcatctctccaatctttatccacaagccaatcctctagctatagatttgttacagaggatgcttgtgtttgatccaaccaagagaatctctgtaaccgatgcgctcttacacccgtatatggcggggttgtttgatcctggatccaatccgcctgcacatgtcccaatctctttggacatagatgaaaacatggaggaaccaatgatcagagagatgatgtggaatgagatgctttattaccaccctgaagctgaaatctcaaacgcctaaatcatcatcaatgatcatcaagagtaagctttttccagttttttttgttttgctttctaaaatgcagcttcgatgttatgttatatatagcgagtccacaaacgcgggaacagatcgattaaaaccccggtgctttgatctcgtctggtttgatttagttgcagtgagtgagtagtagtaacagagtttgaaaagtggctctcagtatctttaccactttgtaaatgtggctgtttgttactaagttaaggcttgtttttgttacattatcttggagttggtatgagttgtagtgttttactactgattttaaggccaaaacttgtattttgtatagctttgccatttacccacttaccagccacacgaaatatttttattattaagatattcatact

SEQ ID NO: 147179 - DNA, 769 bp, Arabidopsis thaliana landsberg
  unsure (1)..(769): unsure at all n locations
aaaacattatataatttcctcttcatatttcaagaaaactttaatctttttntgtgtgtagaattctatatttctggtaactaaatggcgagcgagggagttgtagttgtcggaggggagagagaaggggctgagatcgtgtacggggcggaggaatgttacaagcaatcattggagcttctagaggagctagggtttccaaaaggagtcatgcctttgaagaatcttgttgagtgtggaagagttagagccactggttacgtttggatgaagcaagacactccttacgagcatttcttcgaagccaccaacactcgtgtctcctacggtctcgaagtcaccgcctatgtcgacaagtgttgtatgaagaagatgacaggtacgatctatgaaatatatgaagataattagagatataattttatttatgtaagtcatgttattgtttttgtgtgtacgtttatataggagtgaagagtaagcagatgtttttgtgggtaccgatcgtggagatgagtatggaggagccaaaaagcaagaagatttacttcaagactcctatgggaatcggcaggtctttccccgttaccggattcatggacgaggaagagaaacgcaacttttacttggagaatcccaaaaactaaaccaactaataattattcttatgattattacattttgtggtgcttttttattttatttcttgtaaggttgctctatgctattaaattctatcaataatacattttctgggagtgttgattat

SEQ ID NO: 147180 - DNA, 814 bp, Arabidopsis thaliana landsberg
attacttatctttttgcaggagttagttccttgtgtgcttctgcctttcgatgatgagcaaatactcatgcggagaggacgagaatggaagtcgcggtttgtagacaatcctctaattccaagcctttctgagaccaacacaacgaacgaacttgatccctcaggtattattattattaactcttgcatactcagaaacctcttacgtgtttccagttttcaaacatcgttctatctgaagttaaggacaaccactgaccaatgctaataatatcaaaagaatgcttctcatataccttttacctgttcttttcttttcagacaaacctagtgaagaacaaactgtggctaatccaagtacaacgatctcaagccccaaaatgatctcgctctggcaacgagcgttggaatcgtcgaaggctgtgattcttgaagagcttgacctcggtccagacgatctattgaagaaggtggaagagttagaaggcacttcactggctgcagaacacacttacacagctatggtcttgtcaaatactgatggtgcagcagaggattacgtggatgaaaaggaccggtccgaagagtattatagtgacatagacgatgactttgatgacgagtgttccgatgatgagtcgctagatccggttggtccagtgggatctttacccgttgacaagatagttaggaagttgagggaaagactaaaatagagcaaaagtgttactgtattctcatcattgttttgtgtaaatgttgtaaacatacatactaaaaacccaagtgccataacgaagtacttctagagaaa

SEQ ID NO: 147181 - DNA, 795 bp, Arabidopsis thaliana landsberg
gtggaggaaattgaagagattgatgcaagcttagcagacccatttttagctgatgcaattgacaacgaaagagaacttgcccttactgaagaacaaaagacaaattatataagggtattacttttgacttaacttcttagatttctgttaccaagtcttcgaattttgaaagtattaccttttttggctgttagaacaaaataaaattatctaaaggtattagtgtttcacttaacttcttagatttctggaattaagcgttctacttttgaaattataaccttttctggctgctccttatgttcttgcttttgcggagttggcagtaaatctatatatatgaaataccatttaagactactcacaactcctgccttaccctttatgagctttagtatgacattaaatcatctacaggtcaaagaagaggatgatataacttgtgatcgtgtacttcaacttcgtttgaaacggaaaagacgcaagaaaagatctaaacaggtctgttatgcatattctttcagttccttatcgtaactttgcatatatctgattgaaggcgtcttggtgttacaagtagcatagtcacgactatcttctttagtggatatcattcttaatgagcatggttttggagaatttagtcactgataggttgtgttttcctataattttcttagttaatattaatggtgattaaagtaccagaagatatattactgagaaatatacatttttagtataaagaggacaatttgcctgtaagtttagccctcacatcttgttgctcaattg

SEQ ID NO: 147182 - DNA, 3091 bp, Arabidopsis thaliana landsberg
aattaatatattttagaaataagatcggtggcaattaataattatgcgcaagcgaagacgtttcgtgataactgtgaacattagaggttaagtgacgacaagtgatcgagagaaagagagagccaaaaggggaaactacaaaaatggcgaaaccggaagaagtatcagtcccgatcttcacatctcttgagcctgtctacggcgaaggatctctgctccaagaagctacacaacgattcgatgttttgaaggccaatttcaacgatgtcttcggtgcttctccccaactcttcgctcgctctcctggtaaataatctcgggtttttgaatttttgcaaaaattggaatttcgttgactttgagatgaattggtttctaattattgtatcgatgtctgcaattttggtatttggatgatgacatcagatgatcttctgtttggaattgttggatatgattgtgaaaataaatggtgaaggtgtttgttatattttgtgtgtaggaagagtgaatctgataggagagcacattgactatgaaggatactcagtgttgccgatggctattcgtcaggatacaattatagcgattcggaaatgtgaggatcaaaagcagcttcggattgcaaatgttaatgataagtacactatgtgtacatatcctgctgatcctgaccaggtaatgtatctgtgttgcattctcctgtttgtcacagacaatatagttgagatcctggagtcctagaatactactggcttactttacttatcgtacgtgttaattttgcaggaaattgacttgaagaatcacaaatgggggcattacttcatatgcgcgtaaggggtttcgtttggagctttggtgtctatcaggaactgagagatctcaatattttttgtccctgagttgcctttgattcattacaggtacaaaggatttcatgagtatgcaaagtcaaaaggtgtgaatcttggttcaccagttggacttgatgtgcttgttgatggaattgttcctacaggtatatgcatcatgatacttacggaacagaaaaacttatcatttcaaataaagtttatcagtttactttcaagctgtaactggagtgtctcgatttttaggttctgggttgtcaagttctgctgcatttgtttgctcagcaacaattgctattatggctgtctttggtcataactttgagaaggtattattaagcaatcgtgctctgtgaaaggattttcataaatctcttgttgattattgaaatttccaagttctctctgcctttcagaaagaacttgcacagcttacatgtgaatgtgaaagacacattggaacacaatctggtgggatggaccaggtcataattttttctcaaataatccatgatttatcaccttcacacataattatctcttatttggattgatcaatttttaatcatttcaataggcaatctctataatggctaaaactggatttgctgagcttattgacttcaacccagtccgcgcaactgatgtgaaactccctgatggagggagttttgtaattgcacattctcttgcagagtcgcagaaggcggtcacggctgctaagaattacaataacagggtcgttgaatgtcgacttgcttcggttagtcattgcataactttcctgctgcaatatcttaactctgtttggtagttgcgtatgattctctctttaccatgtggctttgtagatcatacttggtgttaagctcggaatggaaccaaaagaagcaatatcaaaagttaagactctttctgatgtggagggattatgtgtgtcattcgctggtgatcgggggtcatctgatcctcttcttgctgttaaggtacgcatcaattattcattgccaaaactggcggtttgatgttaaattatctctctgtgtatcagttgatctctaatgttttggaagatatttagggttatatgcgttcttgtctatgcttcaggaatatctgaaagaagaaccatacacggctgaggagattgagaaaatcctagaggagaaattaccatcaatcgtgaacaatgatccaacatctttggctgtactcaatgctgccacgcatttcaaattgcatcaggtaaagtgtacaactctgtggaatattgtgttttttcttaccctgactcttaataataatggtctgctgcttacggtcatcaacagagagctgcacacgtttattccgaagcccggagggttcatggtttcaaggacacagttaattcaaacttaaggtgagaccgattttcgacatggaacttctgattaaatctttacaggaaccttgatacttttgaaatataagctgtgtgcagtgacgaagagaagttaaagaaacttggtgatctcatgaatgaaagccattacagctgcagtgtcctatacgagtgcaggtgcataaatttaagatccaatgttaagagtgaaactgtttaatgtgaaaaggattgattttgaatttggtgaaatcgtgcagttgccccgagctagaagaacttgttcaagtttgcaaggagaatggagcacttggagcaagactgaccggagctggatggggcggttgcgctgtggccttggtcaaggaatttgacgttactcaattcattccagcagtcaaggtaatagatagcttccttatggttggttgtataggacaaaaacgttattgctacatattttttttgagtaaaagaaatggattggtggtatttactcaggagaaatattacaaaaagagaatagagaaaggagtggtaaaggaagaagatatggagttttacctctttgcctccaagccttcaagtggtgctgccatcttcaacctctaaacacatctctctccctctttattaattttatttcaaatctgaattgtttgcagcaattgtgcccattgaattcccaacttgctttcgtattaatatttctgaataatatgtaggagttgacgacgataataaaatgaagtttcattcacaactctttttcagagttttatactataactagcaaagtacacatttccaattttaatataattctctaaat

SEQ ID NO: 147183 - DNA, 1246 bp, Arabidopsis thaliana landsberg
caatcaacaacggaaacgcaacgccacgttccgccacgagtcgcgattctctctcactctctctcccatctttctctataaaacttgtgtcgtggacactcttaaaacttcactcaacaaagcttaaccataaactgtgagtaaaaaagagaagaaagaaaaatggtgctaaaggtgtacggacctcactttgcttcaccaaagagagctttggtcacactgatcgagaagggcgttgccttcgagaccatccccgtcgatctcatgaaaggagaacacaagcagcctgcttatctcgctctacaggttccttccttcttcttcttcttccttcatcttctctgatttcttccttttttctccgattctgatggtttcttgattcttcttcctatgcagccttttggtactgttcctgctgttgttgacggtgactacaaaatcttcggtaagatctttaagaaaatttcagtatctgttttgattgtttctataataaggtcaatttcgtcacagaacaaccaagttctgttttaggtcaagttctatagttatgatttgtgttggctcatgtttgttttggttgtatgtatctatagtgatgctaagagatggtttttgatcttttgacagagtcccgtgcggtgatgaggtacgtagctgagaagtacaggtcacaaggacctgatcttttggggaaaaccgttgaagacagaggtcaagttgaacaatggcttgatgtggaagcgaccacttaccacccaccgctattgaacttaacgcttcacataatgttcgcatcagtcatgggattcccatctgatgagaagctgatcaaggagagtgaagagaagcttgcgggtgttcttgatgtctacgaggcacatctctcaaagagcaagtacttggccggtgacttcgtgagcttggctgatttggctcacctcccgttcactgattacttggttggtccgattgggaaagcttacatgatcaaagataggaaacacgtgagcgcgtggtgggatgatattagcagccgtcctgcgtggaaggagactgttgccaagtattcattcccagcttaagatgtgttcatcttcttggtgatgtggtttgtgttttatgagaggtttaataaaagtggaactaaatgtacctcttaatgtaatgttgccacctctgtgttctctttccttttgtagtttaataagtatctttatggctttgtgaggctttcaatttt

SEQ ID NO: 147184 - DNA, 1654 bp, Arabidopsis thaliana landsberg
atcaagatccagatcccgctcatattctccatcatactcaaggagaaatgggcgtggagaccattctgatgaaatcagcaaaccaaaaatcgaatatattacggaatttggaggaggctctggagatatgagaagtccaaagtttgaaggatattccccaccgcgttcaccaccatttcagtctgatctattaagccggtcggagcactcaacctctagttcttgcaaagatacccacttactccccacttgttggttgaggaaaacttttattgttgtagacttaattggcactagattggcactaaacgagatttataatctttctttctggaaccgctttgaaacttgaatgaattagctagttataatcgatggagtaggaaattataatattttatttccctgcagaccatcgccaggccgtattcttgaggcgctgcatgttgatcctgcatctgatatatcccttgagaaagacaaagttgccaaaccagcaaaatcgacagtgaggtatggatgagattacatatttttagtttttttttggttttgtatcttcccttggcttttgttgttgtgaattggaacattattcctcttttattcttgcagtacttccacagcactagcgaagctttcaaaagtagcaggtacctcctcttcgaagcagtcacaagcagagaagaaagaaactccccaagaacgactgaagagaatcatgaacaaacagctaacgaagcaaagtaagatcttaattactgttatgtttactatcattaagtttattcctatttgctgttggaaactgagatggtggatgaatcatgttgtacgcagttaagaaagactctgcaacagaaacggctaagaaacgagaacaggagcgacaaaggctggagaaactagcggaaacaagccggttaagtcggaataggcatcgcagccgtagtaggagtattagtcgatcaccaccaccgaggttgttaataaagttatcatttttgcttcgtgattaaaatggggggatttgtgaagatgagaaggaagttttcggttcgagagctctgattggatccgctctttcgatattcactaacacagttgtcatctctccttctcccgtttgattttctttactaaaatgttttgtctacagaagacacaggcgaagcagaagcagaagcggaagcaggagcaggagatcacgcaggcacagttcaaggtcacggtctaggtccccatctaggtcgttatcacgctctccgaaacgctcacgctctccgaaacgctcacgcagacgctctccatcttattcgaggtctcccaggtaagaacagatggaaagcattacatgtacgtcgaaaatggtgtctttgactctttgctttacctttgcctatataacatattgagttgttgtgtttgcaggcgaagaagcagcaggtcaaggcactgaagagaggaaactctaattgttgcggcagctttttttgttgcctctgttcatgttttttttttttttctgtgtgttttcgtatccttacgattcagtggtaaaaatatggtatgtgggtttacatgggataataacaaacgtttcatatgatgttttagaaatttataagatgttataaaaaaataattattttag

SEQ ID NO: 147185 - DNA, 1810 bp, Arabidopsis thaliana landsberg
attctggaatttgagtaaaagcaagaaaaaagtcaaccgttgcaacaaactcttaaaaagaagcaaagtagtagcagaagaagaagaagaagaaaagaaaatggcaggagggtcgtttggtccgaccggtgtggctaaggagagagcagaacaataccaagggaaagtcactagttatgttataatcgcttgcccttgttgcagctattggtggatccatctttggatatgacattggaatctcaggttcttttcttcatcttttgaatccaatttcttaataatcttatcaaacaatggctgaaatggttttttgtttgtatgcaggaggagttacatcgatggatgagtttcttgaggagtttttccacacggtttatgagaagaagaagcaagctcatgaaagtaattactgcaaatatgataatcaaggcttagctgctttcacttcttcactctacttagctggtttggtttcgactctcgtggcttcacccatcactaggaactacggtaggcgtgcgagtattgtttgtggtggaatcagctttcttattggatctggtttgaatgctggagctgtgaacttagctatgcttcttgccggacggatcatgcttggtgttggtattggatttggaaatcaggttagacaattgtttagttggtgtcaccaataataaaccaatctcatctctaatgaaagttaccttgctttggtttttgttttcaggcggttcctttgtatttatcagaagtggcaccaactcatctacgaggtggtttaaacatgatgtttcagctagctacaactatcgggatctttacagcgaacatggttaattacggtactcaacagcttaagccttggggatggagactctctcttggtttagctgcttttccagctctgcttatgacgcttggcgggtatttcttacccgagacaccaaacagtttggtcgaaagaggattaacagagagaggtcgacgagtcttagtgaagctaagaggaacagaaaacgtcaacgccgagcttcaagacatggtagatgcgagtgagcttgcgaattccatcaaacatccattcagaaacatcttgcagaaacgacacaggcctcagctagttatggctatttgcatgccaatgtttcagatactcacagggataaactccattctcttctacgcacctgttctgttccagacaatggggtttggaggaaacgcatctctctattcatcagctttaacaggagctgttcttgtcctatcaacatttatttccataggattagtagacagattgggacgaagagctcttctcataactggaggaatacaaatgataatctgtcaagtcatagtagcagtgatcttaggagtgaaatttggagacaaccaagagctatcaaaagggtactcagtgatcgtagtcatcttcatctgcctctttgttgtagcgttcggatggtcatggggtcctctaggttggaccatacctagcgaaatctttccgttagagactcgttcagcggggcagagtatcacagtagctgtaaatctcctcttcactttcatcatagctcaagctttccttggtctcctctgtgcattcaagtttggaatcttcctcttctttgctggttgggtgacagtaatgactatctttgtgtatttcctgttgcctgaaaccaaaggagttccaatagaagagatgacactcttatggagtaaacattggttctggaaaaaagtattacctgatgcaacaaatcttgaagatgagagcaagaatgtatctggttaa

SEQ ID NO: 147186 - DNA, 749 bp, Arabidopsis thaliana landsberg
ggccctacacaggatacataggacgatttcaccctgatggctgcctcgagatagtagaccgaaaaaaggatatcgttaaacttcagcatggagaatatgtctccttgggcaaagtatagttttctcaatccgaatacccttttttgtcttcatcactcaattctccggagaagcttcttaaaacattcttttttttcgcaggttgaagctgctctaagtataagtccctatgttgaaaacataatggttcatgctgattcgttctacagttactgtgtggctcttgtggtcgcgtcccaacatacagttgaaggttgggcttcaaagcaaggaatagactttgccaacttcgaagaactgtgcacgaaagagcaagccgtgaaagaagtgtatgcgtcccttgtgaaggtatgttcattgctactcattaccaagctatttgagtcccccagtcatttccttataacatctgtgttatgcaggcggctaaacaatcacgattggagaagtttgagataccagcaaagatcaaattattggcatctccatggacgccagagtcaggattagtcacagcagctctaaagctgaaaagagatgtaattaggagggaattctctgaagatctcaccaagttatatgcctaaacttttcttcttcctttactttttttttttttacgtctcgatgcattcgaaagacttaacagatgcacaaaaacttaattctaagaatagttatctcttttc

SEQ ID NO: 147187 - DNA, 1067 bp, Arabidopsis thaliana landsberg
gattgggatttagacatcaacaaagaagtaagtgttaactcagcaactttgagatacactgagttcttgttagctacagcatccggaaaagtagaaggatgcaaagctcccggcatgcttgatactccatttgaaaaaacaaaagttgctgcctacacgcttggtgctgtgacaccttgcatgcggttgtatgcctttctcggtaaggagtttggatcacttcttgatctgagtgatgtgaaccatccctacaagaaatggatcgataattattctagtgatgctttccaggtatgtttttgcgtaattctgttaacttttgagagtttctagcatgatgtgtgagatgatgcatcttttataatgaatggtctgttttcctttaatataggcatcagccaagcaaactgaagacttgcttgagaagcttagtgtctctatgactggtgaagaattggacataattgaaaaattgtatcaacaggctatgaaacttgaagtagagttcttccatgcccagccacttgcccagcctaccatagttccactgctcaagaaccactcaaaagatgatctggtgatcttttctgattttgatctgacttgcaccgttgtggattcttctgctattttagcggaaatagcaattgtaactgccccaaaagatgaacaaagtcgatctggacaacaaattcatcggatgctctcatctgaccttaagaacacctggaatctactttctaaacaatacacagagcattatgaagaatgcatagagagtattctgaataaaaagaaaggtcagacttgtttacttttagtggacacagttttaacgactatactaatctacttggccttttatagagtggctgggtctttttgtctgtttttctctcaatgtggtaaatttgttcttccaatattttgcagcggacaagtttgactatgaaggtttatgtaaagcactagagcagctttcagattttaaaaaaaaagcaaataatcgagtgattgagtctggtgtactcaaaggcctgaatcttgaagacattaagcgcgctggg

SEQ ID NO: 147188 - DNA, 1092 bp, Arabidopsis thaliana landsberg
ggcgaatccgtagacgatgaatcggagaattacctctcggatctcggtaaaggcattggttgcgttgttcagacacgagacggtggttacttagtctctatgaaccctttcgacacggtggtcatgaggaaagacactcctaagcttgttatgcaaatctccaaacagattgtggtaaggcctgaattaatatttacataatcaaaagaatcctacaacaacaggaatctgaaatctttattacaggtactaccagaagccggaccagccactggattcgagctatttcatagaatggcgggttcgggtgaggaactagagtcaaagatatcttcgcttatggcgatagatgagctaatggggaaaacaggggagcaagtggcttttgaaggaatagcgtcagcgattatacaagggaggaacaaagagagagctaacacgagcgcagcgcgaactgtcgcagctgttaaaacaatggctaacgcgatgagcagcggaagaagggagagaataatgaccggtatatggaatgtggaggagaatccattgacttcggcagaggaggttttagccgtctctttacagaaactagaggaaatggttgttgaaggacttaagattcaagctgacatggtggatgatgaagctcctttcgaggtttcggctgcgaaaggtcagaagaatccacttgaatcgaccattccgctggaagaatggcaaaaggagcatcgcacacagcaaaagctaacggttttggcgacagtacagctccgtgacccgacaaggagatatgaggctgtaggagggacagttgtggtagcagtacaagcggaagaggaggaggagaaagggttaaaggtaggaagtttgcacattgggggagtgaagaaagatgcggcggagaagcggaggcttaccgcggcgcaatggcttgtggaacacggaaagggaaagaaagggaagaagaagagtaatataaagaagaaggagaaggaagaagaagaagaggagatgttgtggagcttgtcatctagagtaatggcggatatgtggcttaaatctataaggaaccctgatgtgaaattgcattag

SEQ ID NO: 147189 - DNA, 1412 bp, Arabidopsis thaliana landsberg
ctgaccaagaggaaggttagatctcaagcctttggagataatagaggtactttattgtaattgttgcagataccaaaggggactcagcctgatcaacttcttgttttaagaggcaaaggtacatataattatcagcctatatgttcaattttttttgtgtatttgcgtgtactcttcttaataggttagttcctgcaggactaccgaagcaaggcttttttgtagatcatggagatcagtatgttcgcttccgcgttaactttcctacgtaagatttcttttacttgaagttcaagtaatacacttgttggagacatccacattatgctatgctaaaaactctactagtgtttagaatggaaaagacactttgttgctctaaagttacggtttttgaaataattttcctaggacaacattgtgttagtttccctgccgtctgattattaaatctgattacataagcttcttgatgttctggtggcatgtggatgtgttggattctcttcttttcatttccgtcaagagctaatattgatagatttttggtatatgcttatgcggtttacttttttccttgtatctactagtgaagtgaatgaacgtcagcgtgctatactggaagagtttgcaaaggaagaaatcaacaatgagttgagcgactctgctgaaggaagttggtaagtaaattttattattgtgtttataacagcatattgtgtgtaatattagatggttagacgtaaatggacatctggtataattcacctcaaagaaatgtagttggttacaatagaagaattagtgatgcttatacattactggtacattttctaggcctgcttagaaataagagttagaaaaggcggatatgtagataacaacaagacataattgaaaaatgagatacctaggttctcttataagaaataactagaagctctaagggaaacagtgtaagaaagccaaaatgtctgttggggctttttctttacattttgattcaactgaatgttatttcctcactagcgattgttccttatagtaatgaagaatcatgaatatgaaccaaacaggctttaccagaagctctctactggttgaacttacaggtggaatctaacgggtcctcagatcatccgcgacttctcgttaatggtgctgctggcgctattgttgagcaggttaatgggatgaagccaccacgagagatgaaagataaaagcattcaacagaagacaaatgaagactaatttcatctattgctggtagaacaaaaagctcaccagcataacagagagtgtcattgtttgacctcataattctattacaaactcatttgatgtgaataataagagacatcaaacaagttaagctgaaataaagaaaagaaaaaaaaaagtcctttaaga

SEQ ID NO: 147190 - DNA, 2803 bp, Arabidopsis thaliana landsberg
  unsure (1)..(2803): unsure at all n locations
ttaaatacgcataagatcaaggtgagatttcccattgagtttttgagtaaagaaggcatcaaagtactcttgtgtgctcatacttttgaacaaacattgcttctgcctatctacaaggcttttcgcaggacgaatgattgtctcctttccgggactatgaaacatcgcaaccgataacctctctttctctgaattcaccaccgctctatgctcgatgcttcgatatctcccgtttgttatgatctttacaatagcaaacaaaacactcacatcagaagaatgcagtagcaaaaacttcttcatagaaatgggaagaggtttctagtaatctctcttacctctaagatttcgccaacattaacaactaaagcatctcgaagaggttttacgacaacccacttgccgtctttcttgatctgaagtccttccacttgattcacctgtaagagtattgtgagacctgcagcgtctgaatgttgagtcaaacccataacttgatctggctgtggacatggcgggtagtaattaatcttgatagattgccaaacatcatcaaacaaatcttccatttcttcgtgtttgatctcaagaacactcgccattttcgcaaacagaatcttagctatgctcttcacttcagaggagtaagtctctaaagtttctctgaaaacaaaaacggatttttcagtttacagttgttagagactaattcgtaatcacacaactacaacaagactcgtacctgaaaggaggaggtaatttggagaacaagtgagatttacgtgatcgaattggttcagtggtgaggataaacatgtctccccaatcgagtttctgattctccgagacaatgttcacttgtccaaatccttcaaattcaccacttctctgccacaacttctgcttctctttcatagggagattgaaaaaatcttgaacttctgtctctagtttttccaagaaagacgagtctattccatggtttaccaactgtaaccagcaagagagcattttcaaaaacagaagtcacgttttacgagaaacacaaagattcaaggtgtgtaaagagactaacttgaaaaaatccccaatcttggcaagcgaaatccagcttcttgagctcggaatccatggcggaaacagaacacaaccgtgtcatgtcgatgactggaatctcagaactaagactagaatcatttaagatctcagttttttcttgatcaagccgaacatacctcggaggaatagttgtgaagttcttctctttcactatctctagaacagaaggtactatgagagaactccactgtttttctccttccgcctccattggacttgtagcaccagaacaaaagtacaaatctcgtaagctttgatccacccaacaaccaattttccggaagaaaaaaacgaacaaaaattgaaattgaaatcagagagaaaggtgaaagaaaatcgatttggagaagacgacttaaaacgtcttttatcctctgcgaccaagactagctgttcctaattgaaaaccccaaaactaccctccacaaatgttagaaattacatattagccttttcaacctcatcacttgattcacgatgaacaaaatatgattttcatgtttcgaattcacaaaattctttgaagaataacaagagaaatctcagacatagaaaaaaaaaaaaaatcttccaaagctttacaagacataacccgttttggttcatttgttcaacaaacttaactaaatggtcctgaaagatgttgaaattgagtaacacagtgaggacttcatgaactttcctttgctttcttttcagtcttcaagctgtttgggggcactgcgtctccaaattccagccaagacgctaccgaggattgagtgacagacgctagaaacagcgcacggtactgcagtgagtggatttccaaaatgctgtgtcgcaagaacaactccaagcaccgagttcttcaccaatacaaaatgaaaagaaaaaaagcctcagttgacattgagttttcaatagctctggttaccgtttcatttaagatactgtttagttacctgcatgccaacttcgatagagatagttctcgatgatgccacatcaattcgnagtattcttgaaaacagatacccaaagagaaatccagagatgtgaagaaggcatgaagccaagactacttgtttcccagacatgagtattgcagatgcgttctgaccgatagcatacccacacaggattgcaactgttccaaccgcaattggaggcatcacaggagagacgaatttcaccagctttttaaagtattggttaagaaatgcaccagccaacactgggagaagaaccacctgtgaccacacacaaacaggagccaagaagggtaaagtcaatgaacaaaaactcgctcgttctaccgaataagaaacagactgaaccaaccaaacctgtagtgttgacattagtaatccaagagcatcaactgtgatatactgcttggcaagcttcgccgtaagaagcggtgtcataatctagaaaacggaatggattaaatggggtgtctttatctacaagaagaatagaaaaaccaatgtcataatctagtaacttaccacagctgaaacagtgctagctgctgtcatcaacactgatagcgcaacatttccactgtacaatgaaaaaaaagaaactcagatcatccagttgtattatggaactcaaaagtcgtttctttttgtttggattacaaaccgcgcgatgtatgtgacaatattactagccgtgccttcaaacaacaaacgga

SEQ ID NO: 147191 - DNA, 1659 bp, Arabidopsis thaliana landsberg
aggtaaattcgaatcatgtcaaggcctgctcagcttccacctcgttgcccgattccaaagaaactttctttgagtccagttgcagatacattctactcttcttcctcacccattgaatcatacattggtcaatacaagtcttctactcaagattccaggctcgaagatcaacctgcttggcttgatgagttgctctgtgacaaaactgatgggttgctcactagaggaggtcctctgcgccgctcagctagcgactcagttgtgcttttgggagacatttctgctactttttctggttttgatcaaagtgaggatgaagaaagtttgagttctgaagcttgtggggacttggagtctgcttgtgtatatggtcccaactcgccaagagcaaagaacaactctagcttctctaacaaccctattgcttctgccttttcggattatggttctcagacaccgcctcagaacttggatgatacggtgaaagggatcaaccgttcacctgttgctgaaaatgcgtgtggttcaatgggcataccaaatgcaaaaaggtgagagaacattaatcttcttaagacattattatttaacatcattactttatttgtgtagaaattgataagctttggtcccttaagagtagtattctttatcggctaatgttgctaatattaattcggctgcatcaagtctagtccataagctcctatgtggtacctctgtgtctattctagatcaagatacatcggtttctggtttgtcagtgagaaggaagaaaagaatagttccatatctctgttttacacttggatttgtagttggtggggattcttatgactactaaattggcagaaatatgtgtctgtgtccacaagagtgctcttagaatgccaattcggtacttttacattatcttgttgtgtcatatgttgatttttctatctttactctgccaggaacccgggacagcgttcaagggttcgtaagctccagtacattgctgaacttgagagaacagtaggcatgttgcaggtagagattccattcaagctgtgcgctttcttaaaacacaatcgttattttttctgtggacagttatatgtacaaaatgcaatgttgtatgttagatctctgtggtaagatgatctagttgttggtgttactacatagttagatgcagagcagtaaaacattatacagaaacctagcacattgtttttggtagtaaccaaatagcaatctcgttttgcagacggtggaagcagatttatcagtgagagtggcttcacttcttcagacacgagcaacactgtccctggagaatagccagttgaagcagcagatggcgatactaaagcaggacaagctcataagggaaggtaaatcaaaacatgacataaaccacacattcaaggagtctgaattacagcttgtgatcgatccactgatgcttgttccgaaatattttctgtaggtgagtatcagttactgaagaaggaagctcagagattgaaatctggattgggatacttagggagcactaacaacagtaacaggctggtgaggtcatattctgctggttcaaatgtagctccaaggacagcttcgtcccacttggactggaatttgctagatctgaccaaactcaatctcaactaa

SEQ ID NO: 147192 - DNA, 1038 bp, Arabidopsis thaliana landsberg
gcctctggacccgtttttatatttactcctaccattcccttctgcttcaatccttccttactcctccttctactcccttattcttcttcccctctttcattttccagccactacaaacttttctatctctactttttttcctctcgatttcaggtactttttgagaccctttgatgtgattttagaacacaccccccaattacgtttgatttttgattccgcatcgatttcaattcatccgtttctgagtttcttttggatctgggtgtcttgagctaatcttttcgatctgttgtttatcgattttactcatgcgtatgttcattacaccatttgttatttgtttaatcaaccaaaagactcatgtttttcaaatgtctttaatataatttttctgattgaattttataatatttacatgattctggatccagaatatccttcttcttcttccattttgtcctgtattgatttgtctttgaaaaaggattgttctttgtatctgtattggtgaaaaaggattgttatttgttgataaaaatttgatctttaaacaatgtttggatttgcataaaggtagaagaaaatggctgatggtgaagacattcaacctcttgtttgcgacaatggaactggaatggttaaggtgtgtcattctttctctctgttttttttgacaaaagttttcatctttttttcaatttttgattgatgatcctatgaacaatgtagcatttgtttttttttttgtttaagatgatgatgttcttttgtattggaataggctggttttgctggggatgatgcacctagagctgtgtatactagtattgtgggtcgtcctcgtcacaccggtgtgatggttgggatggggcaaaaggatgcttatgttggcgatgaagctcaatccaaacgaggtattttaactctcaagtaccctattgagcatggaattgtcaacaattgggatgacatggagaagatttggcatcacactttctacaatgagctccgtgttgctcctgaggaacaacctat

SEQ ID NO: 147193 - DNA, 397 bp, Arabidopsis thaliana landsberg
tccgactgtctcaagcacatgctaggatgcaccttaggcaatatgtcacagaagaggatgtttatatggccattcgagtcctacttgagtctggcatatcaacccagaaatttggtgtccagagaactctaagagaggtattaaagaacatttgagtcagttgtggtgagagcttgtatctatggaattctgatgtctgaattgatgaaaactcggttattcctgtgcagagtttcaaacggtacattacatacaaaaaggacttcaactcattgctgctcgttcttctcaaagagctcgtaaagaacgccttgaagtttgaagaaatcatttcaggatcgaactcaggactacctacaatcgacgttaagatagaggaactgcagacaaaggtcag

SEQ ID NO: 147194 - DNA, 1295 bp, Arabidopsis thaliana landsberg
tcttcccttgcatgcctattgaccctgagaattctcccagtgttgttgccatcaatgtaaagactcttgtgcagagagcttggttttttttttcttccttttattggtttcgctagcaaaagattaattctttattgttgtttttaacaggttagtccgatagagtatggccatgtgctgctgattcctcgtgttcttgactgcttgcctcaaaggatcgatcacaaaagccttttgcttgcagttcacatggctgctgaggctgctaatccatacttcagactcggttacaacagctcgggggcttttgccactctcaatcatctccactttcaggtatatccaaaagtgatccaagcataactttttcacccttgctcatctaagatgtttgttctgattgttttggtggtgattgtttttggaaacaggcttattacttggccatgcctttcccactggagaaagctcctaccaagaagataactaccactgttagtggtgtcaaaatctcagagcttctaagttaccctgtgagaagtcttctctttgaaggtggaagctctatgcaagaactatctgatactgtttcagacgcctgtgtttgccttcaaaacaacaacattcctttcaacattctcatctctgattgtggaaggcagatcttcttaatgccacaggtatataactacaccgttggatgaatacatgttttgaattacttaatcaaaagtgaataacagtttgaatgtaaaaattgcagtgttacgcagagaaacaggctctaggtgaagtgagcccggaggtattggaaacacaagtgaacccagccgtgtgggagataagtggtcacatggtactgaagaggaaagaggattacgaaggtgcttcagaggataacgcgtggaggctccttgcggaagcttctctgtcggaggaaaggtttaaggaggttactgctctcgcctttgaagccataggttgtagtaaccaagaggaggatcttgaaggaaccatagttcatcagcaaaactctagtggcaatgttaaccagaaaagcaacagaacccatggaggtccgatcacaaatgggacggccgccgagtgccttgtccttcagtgaacaatatggtgacttggtggtttgtatgtataattaaaagcctaaataagcaaactctctttgtagttgcatttgaagcttcttggtttatgtatgatggttgtgggcattttgtgcctagacttctggttctttgttttttgttatgagttggtgtttatgaattatatat

SEQ ID NO: 147195 - DNA, 1652 bp, Arabidopsis thaliana landsberg
cagccaaacagaaggcgcaagctcaatgttgtgatgtcctctgattcagaagatgagcctctgactgacatacgggtttccatttctcaacatcagaaggacgacagattgattttccaagaagatggtacgttgtcctcatattggccagatatgcaaaaggaaacaaacccattagctgatccttctagagcagaaatattggaggcagcttgttatcagtatgagacatcaaaattctcttacattaatgaggtgtcccagtcagttgatgtatcatgtgtaccagagtcttcatatgttccagaaactttaatggatggtgaagctgagctgtcgccaagagcagtatcttgcggacattttgatggaagagtagaggtttcaatgaatgaggacgttgtacagactcccccatcaaaagagatatacatagacagattccagatttttgattgtttaaagaatacaagtgagatcattgcagaatcttctgatgcgacagtgatggaagactgtttcaaggaatatgtaggggctgcccagaagatgcaacaagtttcagatgaatgtagccgtatggattttggtaagacatacaagacggctgagaaaccaaagctagatacctctagatctgcggtgcaagaatcatgggaaaaaatctgttccaatcttgctgatttcaagccatacttggattcagaacctgtagaagctccacaagttcttgatctcactcatcagataaccaatctaatttcagaagctgacctaacacattccagatgcctgaaccttgtgagtattacattacaattcagcttcctctctttctagattttttcatagtttccagctcagacttttttgacttatggaattcacttatttagggagctttggagccaatgatgaacacttcaggagatcttgatacgtctggtttatctcagatgcttgaagagatgacttccaccgtgtcacagcaagaattttgctttttgacaaaccaaattacgacaacgggatccgttcctacttcatcagccaccatggtaccagaaagaggattaacagtagacgaggcaaggcaggattacacatcgagcaatggaagctgcttggatatgaaaccagatatacttgaagacttactaaaatggtaaataattttcttcagatgtatgatgagaatatcatcatttccaatgggtccatcgcttgcaatgcaaatttcttgctggctcacttttcttccaaaattttccgttgttctctttctcattaccggagttgctttttgtttttttccgcatgcagtaggcgaatgacacggctttccggtgtcttagagtcagtagtccctctgagatcattgaaaggaagagctttccatgaatatgcttcattcatagggcagatttcaagagcagatccctctaacttatccggagccttggagaaaggcagacggcgaaggtcagtaccagttggttcaccatagtttctgagtatgattgatttctctcctaatctccattttttcttgattcaggccaagagaagctcgacattacctgtcaatggaactatcctccgaagatattgcattattgggccaacacagcacatacaatagaaatgaataa

SEQ ID NO: 147196 - DNA, 580 bp, Arabidopsis thaliana landsberg
tgccctttcattgcctggatcacacaattcacaggtggaggcagctttgggttctagcaattacgttgataacatcatgggcgacgcagacccaattaacagctactgtgtagctcttgttgttccatcacgaggagcattatagaaatgggcagaggaagctggagttaaacacagcgaattcgctgagctatgcgagaaaagtgaagcagtcaaggaggttcaacaatctcttaccaaggttagtattttcaatagctgtctcaggtttttcacaattacgtttggtaagtatatgtattacaaaatattattatcatttcaagccgggaaggcggcaaagcttgaaaagtttgagctttcagcaaagatcaagttgctgtcagagccgtggacaccggagtcgggattggtcactgctgctcttaagataaagagagaacaaataaagtccaagttcaaagatgaactcagcaagttatatgcctaaaaacttttcttggacttgtgacaaactccatatattttagtctgactttccacattttgttatatctacaataaacttgatgtttttctc

SEQ ID NO: 147197 - DNA, 1268 bp, Arabidopsis thaliana landsberg
ctaatggcaaaccttgggatggaagggtttcttcaagtttaatctttgctttgggaatggtttttttctttctataagtttaacctgagagatggttacagggagctatgaagctaggtcggttagccaaaagtttagcaggtgacgtaaatgggaaacggcgagaaaaaggactgctccctagatcagtaagtaaagcgtatcatgatccatcattctctgttgcaacatatatgattgaaattataagttcatttcaaatgatgcaggttagagctggaataattggataccctaatgttgggaaatcatctttgatcaatcgtctattgaaacgaaaaatttgcgcagcagctccgagaccgggtgtaactagagaaatgaagtaagaaagccttttaatctcttgaaactcagttttccaaaacattcaagatccttatcttagtctctggcactgatcatttttcttatcttactgtaaacagatgggtcaagcttgggaaagatcttgatctgttagattcacctggaatgctccctatgcgtatcgatgatcaagcagctgctataaagcttgcaatttgtgatgacattggagagaaagcttatgacttcactgatgttgctggaatccttgtgcagatgttagcacggattccagaagtaggtaagtttctgaacattaccatttttgcgatttactctttctcttattttcctgcgctaaaaatgaaacttgatattctctcctttataacaaaaaggcgcaaaggctctttacaaccgatacaagatccagctagaaggcaactgcgggaaaaagtaatgaaacttcctcaaagagagctcatttcttttggcaaaccattgttcatggattcttattgaatctctgctctctcttttgcagatttgtgaagacgcttggtcttaatttgtttggtggagatagtcatcaagctgcatttagaatactaacggattttcgcaaaggcaaattcgggtatgtttcgttggagagacctccactgtgatcaaagttagtaagagatatgctcaaacttatgtgttaatttatgtatgcaatatatgtcttgatgtatgcatacttgtgtatttcgttgggtcttagaggacatgttaaatactagatatagaccaaatccatgacgacatcagtcagatgctgctaaatgctaaccattgtgctcttaagcccaaatgtatgaataatttgttcatgtaaaatatgattaatttttttt

SEQ ID NO: 147198 - DNA, 644 bp, Arabidopsis thaliana landsberg
aatctttatccaaatttcatatggtcatatttgtcaatgtccaggtcgtgacaaagacgatgcctgagaacaatattcaccatggagatgatgagcttggaggtgttcaaaaccactcacactaccacaatgtaactttcttgttctactctaatctcaaattttatctaccacaatatctgatgttatgttatccttgttttttccgattatcatcgttcaagagttgtcttgtatatgtatatatagatgtcgagtgatagacagatatcgctattacttgtcttcgtatgtttctctgttattgctcttacaaatttctctagcagcttcctaaaagtttcgtatgaatttctatactgaggacatttgcagttcatcgggagtgaaaagtagtaccttggaggtacgatgtcaggcacttcaagataacttagtcaagatttcctgttgtgtaggtctatgggatgctgatggcaagatcaacttacgaagggatggagctagctgataagaataagcgaccttttgtattgacaagggctggattcataggtagccagagatatgctgcgacttggacaggagataacctttcaaactgggagcatctacatatgtctatatgcatggtccttcagctg

SEQ ID NO: 147199 - DNA, 455 bp, Arabidopsis thaliana landsberg
  unsure (1)..(455): unsure at all n locations
tcaggtcatccctggctggttggctcgcatgaactaaagattccatctgatatgatcatatacaagcttgtaaaagtgtacataatgtcaacttcattgagaaaatcggctttagcggtgagtttgattccacagaagctgtgacatatatactacttacttaacaatttcaattgttgagttctttgaatgaaaactttatgattaatgggttttgtttttcatggttttaggctcttgccaaaacattaactgtaccgcagttagcgtatcttcgggagcaattcacattgttggggccaagcaaaaatggatatatctcgatgcagaattacaaaacagtgagttgtttttccatgattccatcaacctcttcagttttcttttgcgatcttctgtgattattgaactttcctctacaaatctcanngcatcctaaagagttcaacagatgc

SEQ ID NO: 147200 - DNA, 628 bp, Arabidopsis thaliana landsberg
catcactaacaaaacacacatcaaaaacgattttacaagaaaaaaatatcagaaaaaatgtcagagaccaacaagaatgccttccaagccggtcaggccgctggcaaagctgaggtactctttctctcttagaacagagtactgatagattgttcaagttataactcattgaaaacagttgaaacttgatcactgctagaacttccattttcttgtttaatttagtttgtcgtaatttgtgttgaccatggttgttatataggagaagagcaatgttctgctggacaaggccaaggatgctgctgctgcagctggagcttccgcgcaacaggtaaacgatctatacacacattatgacatttatgtaaagaatgaaaagtcttcttagagcatacatttacgcagatttctgatattttcatatggtttgatgtaaatgttataggcgggaaagagtatatcggatgcggcagtgggaggtgttacttcgtgaaggacaagaccggcctgaacaagtagcgatccgagtcaactttgggagtctatattcccttttctaattaattgttgggatttcaaataacatttgggagcataattgattctcgtctcatcgtacttgttgttg

SEQ ID NO: 147201 - DNA, 1654 bp, Arabidopsis thaliana landsberg
tcgaagcatccgtttgttctattcataatcttctccgtgatcactactcttcttcctctccttctctccgcaaacaggttggtttttattcttagattttcggatcaatagattcaaaattattcggaattgttagggtttatgcctgccttgacgtttactcattgcttatgtctgatgatgggtttaacttttgaggattgaatcaggaatcaaatatctttcttttattgtttttctatttcaattgtggagaaagttcatgttcatgtcaaaaatttcatttaatccgatctgtttttgtttagttaccctctgtgacatagtattgatttgattgccattgcagttctatatagttgtatctcgtgtcgctacggttcttaagacaagatatacagctactggattttgggttgctggactgagtcttttcgaagaggctgagcgacttgtctctgatgcttctgagaagaaacatttgaaatcttgcgttgctcaagctaaggagcagttaagcgaagtagataatcagccaacagagagctcacaaggtttgtgaaacatttagtttggcttttgatggttttaagtgaaatttatctggagatgatttttatttctcttgtgaattttttgcaggttatctttttgagggacatcttacggttgatcgtgagccgccacagcctcagtggctagtacagcagaatctcatgtctgctttcgcttctatcgttggtggtgaatcctctaatggtcctactgaaaacactattggggaaactgctaacttgatgcaagaacttatcaatggtcttgacatgatcattccagatgtaatgccttctcttttcttccttactagttttagattatgtactatcacacatagctgatatcacaagtttcttcacctaaagatagagatgaaagcaattcttaatcatccgcattctactcatatgttgttttttgcatattgagtttctccacttggttgtctcactcatctgtatcaagagtgtttaacctcaacctctaatattgtattggtagcgtctttttcttagcttcatgattgaaaagtgatatatgatgtgttctatgcagatactagatgatggtggaccaccaagagctccaccggcaagtaaagaagttgtagagaaactcccagtcattattttcaccgaggaattgcttaaaaagtttggagcagaggcagaatgttgcatctgcaaggagaatctagttattggcgacaagatgcaggaattgccatgcaagcacacatttcaccctccttgcctaaagccttggctggtataaaaaaaaaatcccattctttcaagcttactagtaagtaagaacataaagcttatgctcatattgttttatggcaggacgagcataactcttgccctatatgccgccatgaattaccaacagacgatcagaaatacgaaaactggaaagagagagagaaagaggccgaataagagaggaagggcgcatagaatgctgtccgcggaggtgaatatatgtacgtttaaatttcaatcagttatggcacactcccattgtctttccttgaaacatctccgaattgttgttcatcattcacaattataaatcccattttacatataga

SEQ ID NO: 147202 - DNA, 2791 bp, Arabidopsis thaliana landsberg
ggcttatccttgtctgtcaaattcctgcaaaaaccctcgcctctctcagacagtaagaggaacatatttccttaatgtattgttccgtataatcttacaagacatcctggttggtgttgcagagaagagtgtttcaaagtttcttcctttttcgttttcctggtctgaatgagctcccaatgccttctttaggtaccttttctggtaaagtttccagatatttacctcttaattttctgggtttgtgtttggttactgtttagaattctacttcagtattgagactctctttcttctcaattttgtttcttttctattggatttcatcattcttgagtatcaattatttgcatttgcaatcttggtctaaatgcgtataagaaaagactagtgattcgcacagtatctagagaatgtttactagctaatggagatgactctttggtttaatctttgcagatattgctactatccaaccttcatttcaagctcatcttgttccattgggggctcagagtattatccatgctaaaagtctacctaatccatggagacagtcttgtttctccaagaatttgaaattttacacgggtcatagtcatgtccgaagaggaaaagttcttattactgcagtggccactcttgaaaccaagtatccggctcaaaaagaaaacgaacggagctcttctttgtcttctgcttcttcgaaatcctcaaatggaagtgctgatgatggcgaagaacaagtggatgacagagaaaagttgagaaggatgaggatttctaaggcaaatagagggaacactccttggaacaaaggcaggaagcatagtccaggtgagtagtttttgcttattcgtatcttcagcaatctatcttcagttgcttctaattggaaacatttcataatcttttttcttttgcgtttatgcagagaccctacagaagattagagaaaggacaaagattgcaatgcaagacccaaaggtgatgtcatgtaagaatggttctatatgtttgctctatgcatcagaattttcaacccctcatagaacctttgtgtctttgtccttgtgcagatcaagatgaaattagcgaatcttgggcacgcacaaaagtcagtaccggtttttcgtttgcttttaaacctgttggagcttttggtttttgttatcataatactatcttcccaaatttgcatgatttttacagcaaggagacacggatgaagattggagagggagtgcggatgcgatgggcaaggaggaaggagaggagaaaagtgcaggagacatgtcattttgagtggcaaaacttgttagcggaggctgctaaacaaggatatacagacgaagaagagcttcagtgggattcttacaacatcttggatcaacagaatcaactggaatggctggaaagtgttgagcagaggaaagccattaaaggagctaaaagtaacagaagagcgccaaaatctcctgaacaaagaaggagaattgcagaagcaatagctgctaaatgggctgatccagtaagttgtctagtcacttgatcaaatcaaacttgtttgatgttttgttcttggtcatatttaactcagtttgctttctcttatcagtcttaccgtgaaagagtttgctccggcttggcaaaatatcacggtatacctgttggtgtcgagaggcgtcgtagaagaccaaggagcgatgcagaacctagaaagaagactcctacaaagaaaagtacaagggattcagagtttgaacgtcaaagccaagttcaagtggtgaaagtaaggaagcgcaaaacacctgcgtataaagatcctttggcaagttcaaaactggaaatgatcaaaagcatcagagcaaaacgagtggcggaagaatcaaagaagatggatgctgtggaacgagcaaggtcagtacacttaaaacagaattgttaatatttctctgtttgcaactgtgagcagaagttaacaagaattaaccttttcttgcctcaggcttttgatctcggaagctgagaaagctgcgaaagtcctcgagattgctgctttgaaaagcccggttgctcaagcatcgttgttagagagtaaaaagctcatagcagaagcaacacaactgattaaatctttagagatgaggcagatagcttcagatgaagatgggacttacccatttcttctttcacctcagcctaatgacagtgaatctgaaaccaaagatacaaacgatcaagaacgaccaggagagattaatggaacacacacattgcagatcaacggagagagtcttcacatgaacatgagatctaacgatttaccgactttagatatatagaaggtactacaaaccagtttgtttctgatatggaatccaacacatcccaaggaggtagagaagatatcaaactcgggatagttgggcaaccaaacggaacgagagtccatccaccagcagagtctgatggagctatcagtcttgctgagaatcatcctcttccaaatggttaccacgggattgacgaaaaggctgcatctttggaatcaggaaacgtaacgaagaagtgggttcgtggaaggctcgtcgaagtcacagaagcagcctaatgttgtagcaatttagcagagaaaagtcatatttttcaattagtaattcaaaattttggcttatatattggtcttatctcttatgcttgagagaagcagtttccagtttgtgatgtgccaattgtatctataactcaattgtatgtcagagtttcagcttagtaaacaattcttcat

SEQ ID NO: 147203 - DNA, 1179 bp, Arabidopsis thaliana landsberg
aagaagataccaaaactctctttttctgtgcaaacactttggaggattcttctaggcttctttctaccacaaacacaagagcgcgttttcttcacgccggcgaacaacgtcagagtcatggccaccggagatgggaaatcggtgatggtcgtcggagttgacgacagcgagcagagcacttacgccttggagtggacgctcgatcgtttcttcgctccttacgctcccaattatccgtttaagctcttcatcgtccacgccaaacctaacgccgtctccgccgttggtctcgctggtcccggtacgctctttgctttcactctcgaatctactcttttaggggttctgttttgggcagcgatgagatcgtttaggttttgttaatctgtgtgttttaggaactgcggaggttgtaccttatgttgatgctgatctgaagcataccgctgctaaggttgtcgagaaagccaaagcaatttgtcagagcagatcggtacgatcttgctattatcaaacattcaaattccttttatgtgtttcttggattttataatcatcatcatgtgttgtattggactatattagatgagtttggtaaaaatgtgaatgtgaatctctagcacatttaagagcttcaagctaagtagcactggtttttcttatagcaactatctatctttggttagcaacaatcttcttcttttcaatcatcattcctaggtttgttgtgtaggttcatggtgcggtgatcgaagttttcgaaggtgatgcaaggaatatcctatgtgaagttgtagataagcatcatgcttctattcttgttgtgggaagccatggatatggagctatcaagaggtattatttcattcagccttaattcttatgatcaatctttcaactatacacccattctgattcacttgtcggtttgtgtggcagggcggttctcgggagtacgagtgactactgcgctcatcatgctcattgctcggtgatgatcgtgaagaagcctaagatcaaggtctgaaacctaagggaaggctactcggtcaaagcaaagtctctgcatagtcttctaattcagaagaataaagtgaaataatattagcttgatgtgtaattgtttactacatacaatgttttggtatccttagacaatcaatattcgtgtgttataat

SEQ ID NO: 147204 - DNA, 514 bp, Arabidopsis thaliana landsberg
atgggtggcccttttcctgctaaaggtgtgtgtcttctagaatgatctatttattgatttttcttagacttagtttgcgtcatccttatatttgttggactcccatttcagaacttagagatttgacaaacttggaactgctggacctgagtagaaacagatttaacggctccataccagtacgaggtcaatttgtgtccaaatatgcttgtcttcctttttaatctatctataaaaaaattcatttgattcgtgtcatccttgagatcctatctattctatattgttaggtaatggtgctaagctttatttgccctgaggaagctgaaagccctggatctaagcgataatgaattttcaagctcagtggaattgcaaggcaagtttgctaaaacaaaacccctttctggtaaagaattgtgtttaaattcagatttatgtgaaaaagttttaggatctgattaacgtagggacttgcccatggaaaaataggaagagctcaaactcagtaacc

SEQ ID NO: 147205 - DNA, 2296 bp, Arabidopsis thaliana landsberg
tgttttcttataggtaaatatccagaagcttgatcctcctagttgtacgaaagcttgagtaatggggtctagattaaacttcaagagctttgttgatggtgtgagtgagcagcagccaacggtggggactagtcttccattgactaggcagaactctgtgttctcgttaacctttgatgagtttcagaactcatggggtggtggaattgggaaagattttgggtctatgaacatggatgagctcttgaagaacatttggactgcagaggaaagtcattcaatgatgggacacaataccagtttcaccaacatcagcaatggtaatagtggaaacactgttattaacggcggtggtaacaacattggtgggttagctgttggtgtgggaggagaaagtggtggttttttcactggtgggagtttgcagagacaaggttcacttaccttgcctcggacgattagtcagaaaagggttgatgatgtctggaaggagctgatgaaggaggatgacattggaaatggtgttgttaatggtgggacaagcggaattccgcagaggcaacaaacgctgggagagatgactttggaggagtttttggtcagggctggtgtggttagggaagaacctcaaccggtggagagtgtaactaacttcaatggcgaattctatggatttggcagtaatggaggtcttgggacagctagtaatgggtttgttgcaaaccaacctcaagatttgtcaggaaatggagtagcggtgagacaggatctgctgactgctcaaactcagccactacagatgcagcagccacagatggtgcagcagccgcaacaactgatacagacgcaggagaggccttttcccaaacagaccactatagcattttccaacactgttgatgtggttaaccgttctcaacctgcaacacaggtgactaaagaacctaagctactacattttgtaggaaatacaatcatctgaaaaatattagacgtagccttcatgttttaagataagctggttttggatatgcatgtatgtttcagttatctgagcatgacttgtttttacttttttcgcagtgccaggaagtgaagccttcaatacttggaattcataaccatcctatgaacaacaatctactgcaagctgtcgattttaaaacaggagtaacggttgcagcagtatctcctggaagccagatgtcacctgatctgactccaaagagcgccctggatgcatctttgtcccctgttccttacatgtttgggcgagtgagaaaaacaggtgcagttctggagaaagtgattgagagaaggcaaaaaaggatgataaagaatagggaatcagctgcaagatcccgcgctcgcaagcaagtgagtgtttgtttaaattttggagattaaagaaaccttaaaactgtgaccatgttatttactttttcactttcttgcttgacaggcttatacgatggaactggaagcagaaattgcgcaactcaaagaattgaatgaagagttgcagaagaaacaagtgtgtctcgcttcttccctatcacaattaagaatctcgagattttcatattttcttgaggttgtattcactgaccaaatgtttcatgcaggttgaaatcatggaaaagcagaaaaatcaggtactgtcttgatttgaatatcctctatggttgttggctaggcttttaactctcactcataatgaattacacttttggacagtattctaagcttttgagtagaatagtgtaagctataccatgaagtgagacatatcatcacatttttgatttcccactctgcataaagtattataagatttgtgaatatgttgcaatgccaatttggatatttcatgagactaatctgacgagcatggatttaacggaagttggctcatttgttgttgcagcttctggagcctctgcgccagccatggggaatgggatgcaaaaggcaatgcttgcgaaggacattgacgggtccctggtagagcttataatggcgtctaaggaacccaacaaagcgccgaagttatagaacaactcagaagatagaaagctagctttgtacgtagtttaggcaggttctgtgggtgattgtaaatcttgaagtgtggcggatttgacagagatagataaacacatatctgttgtattttcctaaatcttttggttttatcttcctgatgtaatggatctttatcatttgtcttgaacatctttgtgacttaaccagagggaatttatcttgtatcttgtctgcaattttttctttagct

SEQ ID NO: 147206 - DNA, 813 bp, Arabidopsis thaliana landsberg
ctcaagctccatctaattactacacaggctaaggaaggcagtagagtgggaaaactgtgtggcagcagtagattgttcttggaagcaaattgccgagcctgtgatggaactctacaccgagacaaccgatggctcaacaattgaagacaaggagactgctcttgtttggagtttatgaggatgctgaccctgattttggctcatgtcaagctaaggaacttctagatcatcttgaaagtgtccttgccaatgaacctgtaacagtgaaacgaggacagaactatgttgaggtcaagccacaggtctgtatctcctcagttcaattccccaaaaaaccttggcatatgtttccatttgtagagtcttcttagttcttgttgttgtcatgcagggcgtgagcaagggacttatagcgagaaggatgctttcgatgatgcaagaaagaggaacacttcctgagtttgttctatgtattggagatgaccggtctgacgaagacatgtttgaggtgatctgcagttccactgaaggcccttcgattgccccaagagctgagattttcgcttgtactgtcggtcaaaagcctagcaaggccaagtattacctggatgacactactgagattgtcaggttaatgcatggtttagcttctgttacagaccagatcactcctgtttaaacaatcacagagaaagtatcagagactagagatcttatgtttgtatatctaccacggaaaattgtaacaaagagagatcttatgtttgttgacaatcttagaatatatgagtaaggctttacatcctacaaaat

SEQ ID NO: 147207 - DNA, 424 bp, Arabidopsis thaliana landsberg
ttcttgcagctacacggaatccgatcctgtgaaaattgctgttgagggagtagatacgtttaagaaagaaaactgtgatctcattattgttgataccagtggtcgccataaacaagaagcttctctctttgaagaaatgcgtcaagttgctgaagcaacggtatgctctgttgccttgaagtcttctgtttgttcctggttgatgttgcagactctgatcatggtcttttcactttacagaaaccagatcttgttatatttgttatggatagcagtattggtcaagctgcatttgatcaagctcaagcctttaagcagagtgttgctgttggagctgtaattattactaagatggacggccatgccaagggtggtggggctcttagcgcgtaagtatcttgtagctactgaatcgtcctatgta

SEQ ID NO: 147208 - DNA, 705 bp, Arabidopsis thaliana landsberg
ggtcctttgtctctgttgaaggatccttaatggtggagcctcttggaagctgtggaagacaagttttgctattgtggcttcgagtagaagcacgcgctgatagcaaattccctcccgggtaagcctttttctctatacatagtaaaattaatcatcttgcaatcttgctgaagagtggaaaggcattaaaccgaaattatgaatagcgatttaggaagcaggtctttagtcacaaggaatgtaactacttttgcgtaagttaaaattagggattagttagtaagttttgactagtatcatattttagttgggagtgtgaaatcttaatcttacattgaatgtatctctctagtatatactcttgttgttgagtcagcaaacaaaagggtttgtgttttctgagttctgttctctttttgattgttgcctggatacagatggataattgatcctccgttagagatcacagttgcggctaaacgcactccatggccagatgttcctcctgagccaccaactaaaaagaaagatcaaatgccattatcccaaggcaacaccgtcgtggtaataccaaagcagcaacaacatccaacgaaaatccgaaaaccgaaacgcaaaagtaagaaaagtaaacacgaacctagaccaaccgatacaacaacacaagtttattcatcttcgtctaagcatcaagaaagaaactga

SEQ ID NO: 147209 - DNA, 1155 bp, Arabidopsis thaliana landsberg
aaattttctttttcacaccagagacactggccggaaagtggaagatcctgacttgttggaacaaatccgattaacaatcatcaacaatctcttgaaataccatccggtctgcctacagttttctttatctctttaccttaatcacattcacattcaaagaggcttgcatgcagctgtttttttttttttgaacattgcctttggttgttttgcaggaatgcagtgagcaacttgcaatgggtgagacttttggaataaaggctcccgaaaagaaggtaatgtttactctgcttattggatgattacttttgtgtcctgtgttttatacaaactcttttctaatgtcttagtcgagttttataaagaagcttgcagtcattaaaagctagctctaggttactgatgtctcatttctgctttggatttatttggtacagattgatgtcgatatcgcaactcatatacatgtgaaagaagatggaccaaagaggaggtattcaccatatttattagcattattaatgacaccacaaaatcatatataaagaatagccctgttgaaatagtttacataattctcgcctgtttcctgttttctctagcctgcttgtcatagagacagcggacaggccaggtcttgtcgtagagatgatcaaagtgatggctgatgtcaacatagacgtggaatccgcagagatagatacagaggtagtcaaaacctacataagtacatacactgtgattccatttctatgctatgcattataatagtacgtctccattgtctctctcagggactggttgcgaaaaacaagtttcacgtaagctaccaagggcaagctctaaacagatctttgtcacaggtaagtttttgtttctgttagtcttgtattttgcacctttaaaagaagagagagaggtaaaaagaatcaactatctcctgcaggttttggtgaactgtctgcgttacttcctgagaaggcctgaaactgacattgacagctactaaatgagcttttgtttgctctaaaacaaaactgctctttatcctttaaagcaatcatatctgtgcttgcgaaactttcagacttctgtatggaagattatgtggaaattcgtgatactataattgaaccactgtggctaaaaaataaa

SEQ ID NO: 147210 - DNA, 1203 bp, Arabidopsis thaliana landsberg
gttcatctactctttcatggcggttggtatattggtctgcattgttaccttcattggtttcatagcagctgaagcaatcaatggctgttgcttgtgttttgtatcctttatacagagacctttctccaattttttctatctttgttaatagatcgagtttattaaccttcatgagagttattggaatgggtttgttgcggtttttcccttgacagttttaaagtactctattctcaaaactctgctcattctacttgaagctgcacttgttgcatacatcgctattgaccgtcactgggaaaaggtgagatctttcttatgctcgaatcttgtttcttgtttcttgtttccttgacttgtttgtaacagtttaacatctgtgttctgtaggatcttccgtatgatccaactggagaacttagtagtcttagggctttcattgaagaaaacatcgatatatgcaaatgggtggggattgctgtggtagcagtccaggtaattcaattcagtctttataaaatttgagaattgtcatgatatatatattctctctagagagtttaaagagaagacatgaatatttcttgtgtctttcagctactgtcattgctactagccatggttctcagagcgatggtttcaaccccgaaacccgaacttgacgaagaggaagatgatgagaacccaaggagtagaacttgggacccacttcttggtccgcaaggaaaccaagcgcctgctggctcaagcaagattgaaaactggagctcccgaatcagagaaaaggtaatgctgatcattttttcagtttcttgatactttacggattggataatgctttgtgaatctgctgatgataaaaactgtttcgttttgaaaatttccttttgcagtatggtttgaaccagagtccaccggtgaacccgaaaggttgatgaagccaaataatcatgtttctaaaactgcatgtgtccatatggtctctgtgaagctctctttctctatgttttgctctttgcaacttctcgagtgtgcataaacatttactcaaaacagtgctgtattgtgtttacacaaacggcataagcatcttcgtttgtgtgtttgcttgtacaaacattcctgtgaacagtttgaagttagcatttccactataaccgtttcgattcaatttataatgaaagaaaacaaaaactaaaaatt

SEQ ID NO: 147211 - DNA, 1348 bp, Arabidopsis thaliana landsberg
gtaatgccagtcttgaggctgcagttaattgggtggtggagcatgagaatgatcctgacgtagatgaaatgccaaaggtgggtgttttgtcaattattacttttcagcagaatgtctgttctggaccgttttgtttcttgataattgcattccaaatctcggtttttagttcttatctcaaagtggttttttgcttgatgcgacaatttgaaggtcaaaattttctgtatatatcaccttcaacaatcttatatcttgttatatgacatgtatgtggtcctaaaattactccattgtttccttaatgttatttctatgttattgactgtttgcctaggtgccttccaactccaatgttgggcctgccaaacctgatcttacgccagaagaagtgaagctaaaagcccaagaattaaggtcgatgagtattctgttttactgtccctatttgttttcttttatagcgtgcccaatggcatatcgacactacgcttttatcatgcataacctagaccatgaaaatgtctacacttcaatttatattcgttgatccatgtctcagggaacgtgcacggaagaagaaagaagaggaagaaaaccggatggaacgtgaaagagagaaggttttctgtctctgatcctttttttaaatgtgttactgttatcttaaataacttaattatgtgcttgaaacatattgtgtcattgctgaaactgtaagcattactttgttatcatcttttaacacgttagtatttggttcaggagcgaattaggattggcaaggaactcttagaagcaaagcggatggaagaagtaaacgaaagaaaacggttagtcttttctggttataatgtcaggcttatcagctgtattcttatttttgtttttcttaatcgactacttattggttgtgtgtttcagtcttatgtttttgcgtaaagctgagaaagaagaagaaaaacgggctagggaaaagatccgtcaaaagcttgaagaagacaaggtatcttcaatgcagtagatttacgtacgttatgcattacatttatatttctcaacaaaaaaaccttgaagactcatacattttaacaggctgaaagaaggcgaaaactcggattgcctccggaagatcctgcaactgcagctgcaaaaccctcagtgccagttgtggaggagaagaaggtaaacaaaaaagtatcaaaagctagttatattttatcatctcttgttatatgctttttcttatagagacatcttttctttttggcaggttacattgccaattagaaaggcaacaaagactgaacaaatgagagaatgcttgaggtcccttaaggaagcgcac

SEQ ID NO: 147212 - DNA, 403 bp, Arabidopsis thaliana landsberg
agggtataagggctctgaccatagacaaagacaattctccaaaggtatgtgtccactcgagaaagcaaaatttgagtctgcttagaaccgagatcgcatctaacatacttacaaacttctatgattgggtttggtgcagtggaatccagcgacattagatgaggtggatgatgagaaaatcaactcggtgtttaagctctttgaggatgatgatattgaactacaaatccctgaaacagaagaaaacaggtcggtttaagggatagtaaactcaactctgaaactttcttttgatctgaatgattcctgaaacaatcccttaggttttgataatgtaccattggaaattcacaggtggggaggcaaatacgagacttcaggctacgcatctgtacgaggatag

SEQ ID NO: 147213 - DNA, 4324 bp, Arabidopsis thaliana landsberg
atcttctctgagtctctctgacactctcaccaacctaatttctcacaaaaacctaaaaagttatcgcccatggattcagatttcggaatccccagagaactctctcctcttcaacaactccgatctcagtaccaccctgagcttcctccttgtctccaggtacttctccttcttccttttatttgtatattcgtatcttccttagatctcttgcttccttctctcgttcactgtctccaatgtttggatctctatgtttttcattgatatcatctcttctgctgtttcgttttctcacaatttcgtcacgtcgcgaatattttgaatcccttcgagctgtttattttgattgtctactcgaggaacttgcaatgttgtttccgttcatgcagatctgtttacactgttattataatcgggatctagggtttatgatccttttatacttactcgtctgatttaacatttcagtttagtgtggtaggtagaattgcctttcaacgtgaactaccatgatggagtgattttctggaacagtgattgaatcgtagttttttttttggttggatgattcgtagtttaattcgttattgattcaatgtacattacaggggactactgtccgtgttgaacttggtgatggaaccactgtggcaaaggctggtgatgctcatatcattgcccgtgccttcccacatactctaggccagcctttggctcatttcctcagggcaactgctaaagttgctgatgctcagatcattactgaacatccagtgaagaggtgtgcatgcatctgcatatttatagatctctggaatttcttgttctgtggttttgttgttggttagagctagttgttttctattgtagggtcggaattgtgttctgtggaaggcaggctcctggtgggcacaatgtagtttggggtctatacgaggctctcaaagtgcacaacgcgaagaacactttgcttggatttttgggtaagtccctgttttttatctgttagttggttttcttatttctgtaacttcattgtttgcttactataaagtcacatcttacttcgtattgatgtgtgcctggtcattaatatgaaactttggctacctgtaacaggtggttctgaaggtctctttgcccagaagaccctggagatcactgatgaggtcctccaaacttacaaaaaccaaggttggtggttggtggtttgattaagattattcagaactttatctctgctgctttctgacatatggcatttaaatgtatgtcgtattaggtggctatgatatgcttggaagaaccaaggatcagattagaacaaccgaacaggtcaatgctgcactaaaagcatgcacggatttgaaattggatagcctagttatcattggaggtacctacttttcctctttttcgggtgtctgttttagtagatgttttgttcttaacttgtgtaaatatgattttttaagttcatcccagaattttctaaatcaatgtttttatttgttaggtgtaacatcaaacacagatgccgctcatcttgctgaattttttgctgaagcaaaatgctcaacaaaggtcctaatttcttcccagtttttctctttctttgtctgatcttgtatcatgaatcactttagtgacatttgcacttcacctgatatcgctaacagcagaaattaccaatatgtttcaggtagttggtgttccggtcactattaatggagatcttaagaatcagtttgtggaagcaaatgttggtttcgatactacatgcaaggtaactttgaaatctagcgcttttttttcttttactttgtaggtattgtagccaacattctttcatttcgctcaccgttcttttcaggttaataacattttaactcgttatttagactaatatcattctactgtgtacaggtgaattctcagctcattagcaatatctgcaccgatgccctttcagcagagaaggtaaatgttgattccttccaaacgttatcatgttttagaaagattgctaggacactcataaccaacctatattttgttggttaataatgtgaaatttattatggtttgataattgcgaagttgggttccttatgattctgttatcaaattttcttctcaataacatactttcctccgtattgccagtattattactttgtccgtctcatgggtcggaagcattcacatgttgcccttgagtgtacacttcagtctcaccccaacatggtattcttccaaattctgaatatattcaatcgatagtcttggcaatgctgcatctagtttctcatttgcatttgatgcgattgtctcaggtgatactgggtgaggaggttacagcatctaagctcacaatatttgacatcataaaacaaatctgtgatgctgttcaagcaagagccgaacaaggtctgataactaaaacgagcttttggtatgttggaagtgatgtcttttgcttgttccctaactttattgataaactgtctatttgtatcagacaaaaatcatggagtcatcctaattcctgaagggcttgttgagagtattcctgaactctatgctctgttgaaggtaacgattcaatactggcaaacatttctatttatcatttaatgtgctattttttattgtttcttgagttccaaaacatagtaagcatttacatgttgttgtgcgatgcaggaaattcatggattgcttaaggagggtgtgcaggttgataatatttctactcagttgtcaccttggtcatctgctttgtttgagtttttgcctccattcattaagaaacaggttctaattctttgacatggtacttttctttgttttttctcacatgtaaacgagtatgtgttcttatgataaattgtcttctttgtttctgcagctacttctccatcccgagtctgatgattctgctcagctatcccaggtaagaagaaagaaaatgatggagttactgtgctataaaaagttggaattctaattgctcatttactttcttcttagattgagacggagaaacttctggcttatcttgtggagactgaaatgaacaagcgcttggtatgttgcacatctttttcacttgtcacaatccatttttttcaaatttttttgaataaccttgcctgaatattcaagttgtccctaaaactaagttttgaaaatgacagaaagaaggaacctacaaagggaagaaattcaacgctatctgtcacttttttggttaccaagctcgtggatctcttccatcaaaattcgattgtgactacgcctatgtatgtgatcgccaaactaaaatgctattgcaacttcaatattatggacattcacaccattgattataactttgatgcaggttcttggacatgtatgttaccacatcctcgcagctggtttgaatggttacatggcgacagtgactaacctgaagagtcctgtaaacaaatggaaatgcggggctgcgcctatctcagttgagttttgtctcttatttataaggctaaagttgtttagtatatgtgttgatttctgacttcaagtttcagttttactgaccccaatctctttctctgtttaaccttaggcaatgatgacggttaagcgttggtcccaaaattctggttctactacgattggtagacctgtaattcatccagcttcagttgacttgaaaggaaaagcatacgagtaagcttttgttcctcactcattagacaaagattagaatgaacatgaaatcaagtgatataatttgtcaaatgattttgcagtctattgagacaaaacgcgcagaaattcttgatggaagatatgtaccgaaacccaggtccgctacagtacgatggtcctggtgcggatgctaaagcagtgagtctctgtgttgaagatcaagattacatgggacgtatcaagaagctgcaggaatatcttgaccaagtaaaaacttttttgtttttgtgtttttctctgctaatttcgtaagtatcgaataatgttcttcgccactttcatatttattaacatttttggggtttggtcaggtgaggacgatagtgaaaccaggatgttctcaagacgtattgaaggcagcactgagtgtgatggcttcggtgactgatgttcttactactatttcttcaaatggtggtcaatgatttgcttaaaacttaaggacaaagctcttatgaatcacacacgtcgtgtttgttctcttctttttgttttctttcttttgagatgtaacttttgttgtatgtttttaagttattgagtttggaaagacataagcctt

SEQ ID NO: 147214 - DNA, 1160 bp, Arabidopsis thaliana landsberg
ctttggtttgggttgtctttcttctcgagagagataagtgaccaaagggtttcgatttctggaaatagtttgaataaaaaagtaattttttatgtgattattggcaaagaaaagttttagttttttttagtttgtgagagatgtctggttctgtatctggttgtggttctggtggttgtagtattgcatggtttagaagagatcttagggttgaagataatccagctttagcagcagcagtaagagctggtccagtgattgctctgtttgtttgggcaccacaagaagaaggacactatcatccaggtagggtttctaggtggtggctcaagaacagtttggctcagcttgattcttctcttagaagtcttggtacttgtcttatcaccaagagatctactgatagcgttgcttctcttctgatgttgttaaatccactggtgcttctcagatcttcttcaaccatttgtatggtctgttgttcctcttctcttctctctttatcttatctttgaatttgcatgataaaaagatttgatttttgtgattggaatcatctttactcttatgggttatgttctgtttgatgtatttgtggaataagatgatctggaaatgataaagttttgatctttttcagatccattgtctttggtgcgtgatcaccgtgctaaggatgttttgacggcgcaaggcatagcggttcgatcattcaacgcagatttgctttatgagccatgggaagtgactgatgaattaggccgtcctttctctatgtttgctgcgttttgggagagatgtcttagtatgccttatgaccctgagtctcctcttcttccacctaagaagatcatttcaggtttgtttctttgtcactctctcttgtgggttttggtttcctaatctgtatcattcaatattgtttcttttatgttgcaggggatgtgtctaaatgtgttgcggatacattggtgtttgaagatgactctgagaaaggaagcaatgcacttctggctcgtgcttggtctcctggatggagtaatggtgataaagctctcacaacgttcataaacggtccattgcttgaatactctaagaaccgcagaaaagccgatagtgctacaacctcgtttctttctccacacttgcattttggggaa

SEQ ID NO: 147215 - DNA, 595 bp, Arabidopsis thaliana landsberg
ctacccgacgcagctctatctacagaggagtcactaggtttttatttttttggaaattaaatgattggttgttgagattggatttgggttttgtcttaaaactgcatttgtaagattgcatgttgttttgtgggattttgcagacatagatggactgggagattcgaggctcatctttgggacaaaagctcttggaattcgattcagaacaagaaaggcaaacaaggtttcgtcttcttctttttttcttcgtaactcatgattttgtttgttttaataaagatctggactttaactgataaatttggtttctttgatctgttgtttgatctcaacttcgtcacaacttcaccagtttatctgggtaagctctaattctctgaaacaaaagatcaattgtttttttactaaattgaaagagaaaaaaaaagagagagtggatttggtcagaagaatctcaactgctttcacgcgtaattgcaggagcatatgacagtgaagaagcagcagcacatacgtacgatctggctgctctcaagtactggggacccgacaccatcttgaattttcctgtaaaccaaaaaacaaaaatcag

SEQ ID NO: 147216 - DNA, 410 bp, Arabidopsis thaliana landsberg
atccacaaaataaaataaaaaaatggcctcaaagagctcaaccaccatttccctcatcatcatcctcctcatcagcctcgcagaagcaaacctcttaagctcgcctacaccgaccaacaactttggctcatgtcccagaaacccattgcaactaggcgtatgtgccaacgtccttggcctagccaatgttacagctggcgaccccagagcacgacagtgttgcactgccctcaatggcctcactaatgttcaagtaaccgattgtctctgctttatcttcaggccgattccgttggttttcggtattgatgtgggcgttagagaaattttttttgcttgcaatagggtttttcctatcggttttccagtgtcccaccaccacagtaactactacttaattcccctaaata

SEQ ID NO: 147217 - DNA, 518 bp, Arabidopsis thaliana landsberg
atggttcggagatcagacaattccagtgacctcaaatcttctatagataaccaatcagactattccgggagagtttcttttagtgataatgaaatgcagagtccatcagagaagattattgggaaaagttcaatggctacttcagtagatattggtttgatggatgattttctcgagatggaaaagctcgctgctttgccgcattctgaacctggaagaaaacattcagagagtaacaaggagttagagaaatctaatgctcacgttaaccaactaaagcatgaactcaaaacctcgcttcgcagaatttctgaactggaagaaaaagtagagatggtagaggtagagaaactacaattggagatggctttgaacggatccaaagagcagatcgaggcattgcagagtcgactaaaggagatagaggggaagttatcggagatgaagaaactaaaagcagagaaccaggaactagagttgttgttgggtgaatcaggaaagcaaatgaggatctcaaa

SEQ ID NO: 147218 - DNA, 873 bp, Arabidopsis thaliana landsberg
ttacaggtgggcaaagggcgagatgttgggctcaatcaaatagctctgtttgaagggaaggttgctggtgggatttgtgaacaggttcttagtcgagatgtatacagacttggccagctccttgatttcttccgtatgatgtcattcttctttacaaccgttggcttctatctatgtacaatggtatgtggaccctctttcgaatcacagtgattttatttgcctcttaccattgtattcaagttgatacctgcatccaattcctgaatgtttacctggtttaaatagagcagtcttagctccatggttcttagtttaccttcatatcaatacttagcagttagcaggcgatattagaaaagaagtttacaacaagtcttgcattactagtttctgtcggtcactttattttttaccttttatctggagctataactgatatgttctaagtttctccaagtatattttccaggaaatcatgctgatttattgacatttacatggccttttgcagttgacggtgcttactgtgtatattttcttatatgggagggcatatctggtaagcctggtgaactaatgttggttgtgacgcatgtgctatcttcatcagtgattattgtacgattaattcttgcatattagtactggattaaggtctttataaccctgcttgtgtttggtttatgctaggcactttctggagttggagctactattcgagaaagagctattcttctggacgatactgcacttagcgccgccttgaatgctcagtttctgtttcagattggtgtcttcactgctgtgccaatggttttgggatttattttggaacagggttttctccaggtactggttcctcaccatttt

SEQ ID NO: 147219 - DNA, 200 bp, Arabidopsis thaliana landsberg; identical to SEQ ID NO: 63202

SEQ ID NO: 147220 - DNA, 483 bp, Arabidopsis thaliana landsberg
ctagaaagagtctcttaaagattaaagtatctcagacaatcaacaaatctcattttaaaaaaaatcaagttaccaaaatatagtcaacctatgacaataaacagtaagcttagagtaaacaaaactaagattacaaccatataaaattcgagtctatgagcttccaatgatgttctacaaactctacaaacaaaatgtctaatacttcttctacttccacactaacttctctctctctctcgttcatcaggtctcaacattagctctgtttccggcaaggataatggagatttcaagtccgcgactgaaagcttggttgaagaggagccgagactggaacgtggagatgaaagggaaccaggaaagaagggcgatcggagaaaatatgagcatacccattgcagcatcatatatacgcccaaactcacggactgtttcccacaagcccaggaccctaagcacctgtttccatgtgatggctaa

SEQ ID NO: 147221 - DNA, 558 bp, Arabidopsis thaliana landsberg
ataccttccttgccttctttctttcgttaccatttgcgtgatccctatcttctttatcttcgccctccggattcttcaatattactaaatctgccattatctcctcgatttcgatgacgagagagccgacgcaatcgccgtcttcggagccggaggttcactctggagaggacttcgttcacatcgatgaccctaggcctaccggcgatatctctttaagcgacagcatagttaatgtggagaaggatgaactgctcgacgaagcggcggaggaagaatttagaggctccgattctgtgtttagcggcggcgatggcggtggagcggatgatgatggcggcgagtgttcatcggaggctactaaagtggagctaccggaggaattggcgaaaagtgttgtgattctgacgtgcgagtcaacagcggatggtggatcttgcgatgtgtacttggttggtactgctcatgtatcaaaggtaatcctcgttcttcgatttcatttggttctaagtttgcaaaggagctgtcttggaattgaactaatattttggtaactag

SEQ ID NO: 147222 - DNA, 228 bp, Arabidopsis thaliana landsberg
caacaactctcaagacctgtacaagctatttcacctacttcatcactcatcaccagcttcgcatcttcttctccggcttgatcttctctcgtttctagatctccgacgatcggaatatcaaatccgatcgattaattctgtcaatcacacaaaaaccgaaaaccaaaaaaaaaccatggcgtttgagaagatcaaggtggcaaatcccatcgtcgagatggatggtga

SEQ ID NO: 147223 - DNA, 771 bp, Arabidopsis thaliana landsberg; identical to SEQ ID NO: 72052

SEQ ID NO: 147224 - DNA, 1150 bp, Arabidopsis thaliana landsberg
acccagaacctccgtccgaccaattccggtgcagctaagaaccagagatagagatgcggaggatcaattcactgtacggaagaattggtctcctaaaacgagtacccgagaaatctacgaagcaagctcatacatttctcgcatctctctccttctctacggaaggtgcttatggcggtgacggtgagtttcagcagaacagctccaaagtcaagatctttgaccgagacctcaagcgaatacatgtgtagtgttcgaattcatcttacatttgcctctctctcttattattaatccagatttcgagttcttataatttgtgtgttcgattgatttgcagcgtgatcgagcggcgtggctttctcgccaaaaaaacgattcttttgttgacgctgttgcagataatctacttgatcgcttagaggtactcttttgtttgatgcatggtcgccattgagagagcaatttagcttctcttggggctaaatttctcgatttcaatcaagcttagtaaatattgtttttgctctttcttaaggattgtaagaagagttttcccactgcattttgtttgggaggatctcttggtgctgttaagagattactacgtggtcgcggttagtttatctctctcttgactgttctggttctgcattttgagtgttgttgatgatgattttggctttgttgcacaggtgggattgagaagcttatcatgatggatacttcatatgacatgattaagtcatgtagagatgctcaagacgattcactcgataactccattgaaacctcttactttgttggtgatgaagagtttctgccagtcaaagagaggtaacaaggacgttattgtaaaacctgtttttctttgtttttttccccttgctgcgactcactagagttctattacctactaatatcttgtcaaatatgttgtatgtgaagttcggttgatttgatcattaattcgttggggcttcactggacaaatgatcttcctggatccatgatacaagttttctcgttttcattgcttttgttggtgtatgtgaattggtttgtcctctgagaaaatattaataattgggttgggtttggattgtataactgcagtgcaagctagcacttgagcctgatggcctttttt

SEQ ID NO: 147225 - DNA, 3012 bp, Arabidopsis thaliana landsberg
atgcagtatcctgattcacctcgtttcaatctcgttgatgatttttcgatggtggaaccgatgctgaatcagctgagcattgagactggtggtggtagccagaggggcaacgagatacctactgcgcagtatagtaatcttcaccagctcaggattcctcgtgtgggttcggggcagatgcttgcacagaggtatggtgaagtagaaggtacatggagtcctttctattctcctcggcaccatggacatcatgatcccagaacttttcaggaatttccatcttcgccttcttctgctcgttatcgaatgccatatggggaaattcctgataagggattggatagaatgcctgaggagtatgttaggccgcaagcaagtcaccatcctttttacgagcaccaggcacacattcctgacagtgtggtgtgggtcccagctggagcaatgccacctgagagtaaaggagggtttcctgggaatgttcttcacggtggtccaggtggctatgaaggtggtaatggatgcgagaactgtcgtgtaccgtatcataggaaccatcagcttttagagcaatctaatataggcaacaatggatttccaccggttcattgtgcacattgtccaccaaacagggaaagtttcctgcttaacacagacccaaagcctactcatcatggagcttatccaaatgagactttcggacctgatagaggatggatggttcaacaacaggtgaatcctaaccctccaaggattgaggaaggaaggtcacatatttctaatgttggaagaccgaacgatcattacactcccgattatcctgtgtcgaactatcctcttggtcaacgagctggacatgaaatttccaatgaagggtttcatgataaaccacttggtggcattcccctgaattcggccaaccgttctgctgaggaacgtgggtttcattatgggaataatctctatcctccaggacctgatagtatccactcagcaggtcatagccatatgcaccaccctcaaccaaatatttggcagaacgtttcaaatcctatagctggccctccaggcttgcccatgcaaattaatggcacagtcaatcagaccgttatcaggaatccgatagaaactgctcctaggtattctactggaatggagaatcaaggtgttttggttggttctccgcaaaggatttcaggctttgatggaatgtcctcccttggccagccttcctaccctaatccccatttgcaagatagagccttccctttagacccaaattgggtgccatctgaaaacccaactgtacataatgaacatctacaggtgcgtgagctctgcctgggccattattacagacaaacctcactgctgcaccaatcatgcagacaccagttatgcagacatcgggggaaagcgggcttgctcagggaggtgaacaatttaactatgttaatactggtatttcaaacggtgttccttaccaagataagcctcaacccttagctggaggaaagaaagatatggggaacctggtagaagttaatccttctgctgctactcttgaaggggcagagctatcagttgagcgtttgagtttcttgcctgagttaatggaatctgtgaagagggcggcacttgaaggagctgctgaggttaaagctcatccagaagaggccaaagatcaagtgaggccggagttggtggaaaatgaatcagagcatatggtgagtattctgagatattaacctgttacgaggggcttaggttgttttcttttattctgacttccatttgaaacaactttttgtttttcagaatgctcaagacgaacctgagatagattctgatagtgataacccaaacaatttcaagattgaacaaacaaaggctgaggctgaagctaaatccaggggactacaggtttttattcttaaacccgtcttatagaattctgaaaccgaacaaatttctagtccttttgactttgttatcttggttttcaccttctttatctagtctataagaaacgatgatttggaggaaatccgagagttaggccatggaacatatggatctgtttaccatggaaaatggaaaggctcagatgttgcaataaagagaataaaagccagctgctttgcaggcaaaccttcggaaagggaacgtttggtaaaatttcattcctttattatcaattgaatttaacatattgatcaacgtttaagtctagtataattcttttactgcttttctgctgttgcagatagaagatttttggaaagaagccctgttattgagctcattgcatcatccaaatgttgtgtcgttctatgggatagttcgtgatggtcctgatggttctctagcaactgtcgcggagttcatggttaacggatctttgaaacagttcttgcagaagaaggataggtaaaaaagtttcacatattcatgcattatatactattttcctagagtatccaattatctgacatcacattggttgactcctccagaactattgatcgtcgcaaaagactcatcatagccatggatactgcatttgggatggagtatttgcacggaaagaacattgttcatttcgatttgaagtgtgagaatcttcttgtgaacatgagagatcctcagcgtcctatatgcaaggttctgttgttactcatctgatctctcatataacaaagagtaagcttatatgtttctcataaattttgtctttctttttccttccagattggtgatttggggttatcgaaggtgaaacagaagactctagtatcaggaggtgttcgtgggactttgccatggatggcacctgagctcttgagtgggaaaagcaacatggtctctgaaaaggtaactaattttttttatagaagtatgcagcttttgttcaattggattgaatctcatatagtccactaaccaagcctgtgtctttcgattagatcgatgtttactcgtttgggattgtaatgtgggaactactcactg

SEQ ID NO: 147226 - DNA, 2189 bp, Arabidopsis thaliana landsberg
gcctcggtgtccaagctcacttcaatggcgttacagctactcctagctgtattctcttgtgttcttcttcttcctcaacctgcatttgggattacaaggcattatacgctggaagtatgtgaagattgtttcttctgtgtaaatttcttaaaaaggaatgcagttattgatagaaagtttcgttttcgcagatcaaaatgcagaacgtaacacgtctttgccacacaaagagccttgtttctgtaaacgggcagtttccaggtcctaagcttattgctagagaaggtgaccaggttctgatcaaagtcgttaatcaagtgccaaacaacatctctctccactggtaaacaatcttaaaaccacttgcactatacattaagagcaatgtttgatgactgacagctggctttaatccgtgaaaatctcaggcatgggatccggcaattacgaagtggttgggctgatggtccagcctatataacccaatgtcctattcagacaggacaaagctatgtttacaactataccattgttggtcaacgaggcactctgtggtaccatgctcacatttcatggctaagatcaacagtctatggtccacttatcatccttcccaaacgcggagttccttacccgtttgctaaacctcacaaagaagttcccatgatctttggtaaggatgatgaggaacagaaacagacagagaatctgatgagagtttagaaacataattactgatttttatggttaaatttcaggggagtggttcaacgcagacactgaggcaatcatccgccaagcaacccaaacaggaggtggtcccaatgtctctgatgcttacacgataaacgggcttcctggtccattatacaactgctccgcaaaaggtgatggttgattcctacatctagatttaattatggtttgatgatatatgtccactaatccaagtaatcaatgatgtgaaacagatacattcagactgagagtgaagccaggaaaaacataccttctcaggctaatcaatgctgcacttaatgacgagctctttttcagcatcgcaaatcacacggttacggttgttgaagctgatgcgatctatgttaagccatttgagactgaaaccatcttaattgctcctggtcagaccacaaacgtcctgctgaagactaaatctagttatccgagtgcctccttcttcatgactgctagaccatacgtcacaggtcaaggaacttttgataactctacagttgctggaatcttagaatatgaaccacctaaacagaccaaaggtgctcactcaaggacctctatcaaaaatcttcaactcttcaaaccgatactccctgctctaaacgatacaaattttgctaccaagttcagtaataagctacgcagcctgaacagcaaaaactttccagcaaacgtgcctctgaatgttgatcggaagttcttcttcacagtaggactgggaacaaacccgtgcaatcataagaataaccagacatgccaaggtcctactaacaccacaatgtttgctgcttcaatcagtaacatttcattcacaatgccaacaaaagctctccttcaatctcactattctgggcaatctcatggagtgtattccccaaaattcccatggagtcccattgtcccttttaactacacaggcactccacctaacaatactatggttagtaacgggacaaacttgatggttctaccttataacaccagtgtggagttggtgatgcaagacactagcattcttggcgcagaaagccatcctcttcatcttcatgggttcaacttctttgttgttggccaagggtttgggaatttcgacccgaacaaggatcctagaaacttcaaccttgttgacccaatagagaggaacacagtcggtgtgccatctggtggatgggctgctattcgattccttgcagataacccaggtaagagaaacactaataaaccaacgaaagctttatagtagtgtaatctaatcaaggataataaccgagtttacaaatgtttcacaggagtgtggttcatgcactgtcacttggaagtgcataccagttggggtctgaggatggcttggcttgttcttgatggagataaacctgatcagaaacttcttcctcctcctgcagacttgcccaaatgctgagaattctttcccc

SEQ ID NO: 147227 - DNA, 2008 bp, Arabidopsis thaliana landsberg
  unsure (1)..(2008): unsure at all n locations
cagtgncggtgacgttactgttcttaacaccgttattctactacacgccattagtagttctgtcgtcgatcataatcgctgccatgctaggcctagtcgactacgaagcagccattcatctttggaaactcgacaagttcgatttcttcgtttgtctctctgcttacttgggcgttgtttttggtaccatcgagattggtcttatcctctccgtacgtatatctatcctaacttcttcattacttactcttttgtgccactcccaacaaaataatacaatcatgcaataggtgggaatatcagtgatgaggttagtgttgttcgtggggagaccaaagatttatgtaatgggaaacattcaaaactcagaaatatataggaacattgagcattacccgcaagccatcactcgctcttctcttctcattccccacatcgatggtcctatttacttcgacgactctacctacttgcgtgacaggttatttatacattgatatatatctttatatgattgttgaatcttagttatatttgtatgtgacttattaatctttttcttatgtataacattttgatagaattggaaggtggatcgatgaagaggaagataaattgagaactagcggagatatcagtctacaatacattgtacttgacatgagtggtacgtcagaaactttacaatatagccatataggatgaacatggatcatagaatcagtctcaagcaaattttgctacctcttgataattgtattattgtgacattccaaatctgattttaagaaaatgtatcctacaatttagtttaaattttagtgtaaatgttggatttcaaactatacaacgttgagtactataaattggtttctatacgtaaatgaattagctgtggggaacattgacacgagcggtatacgcatgcttgaggaactcaacaaaatcctgggacgtagagagcttaaggtcccatcccccaattattgatttaacgatttggtattatactcaatcatacacatcacatcgacacgagcggtaatattttttgaagacaagtacctaaacatttattgatatacgatttggtcttctaattttctcagctagtgatagcgaacccgggagcagaggtgatgaagaagctaagcaagtccaccttcattgagagcattggtaaagaacggatctatctcacggtggcagaagccgtcgcggcttgcgatttcatgctccacacggctaaacccgactcgccggtaccggaatttaacaacgtttaagatttcatattgaaaatttcacatttctaaaaagttttattgtcattaagaaataagaagttgaaaaacaagagtctgttgttattaaacgcactattactaccgcgtctgcgttcaaaaacataatcgcaaacgcagttaaacaattaacattggttacttgcgagtgaagtaacaacagttttaataacttcaaggagactctggctgctgaacgcaaccacaaaacacagaccgcttcttcgtccttttcttcatcgatacgcttctagttctcccatagatatagtctcgaagaagaactttggtatctgaaatcttcgacctaagtcgatgctctctctctccttcaagcttcatcaacagaaactgaatccgctgtatctctgactgtaacctcccaatcttctctgttcctcttctcgcatgttcaaatattctccttcttctatcaatatccttctctgattcggcttttgtggtcagctttcgattgacagtaaacagtttctctattgcttcctctgcttcttcaagctgtcctttgagcgttttatactcgttttctcctactttcgtcttttccttctccactgtttcgactttgcttttcaaatcttctacagtgatctgaagattctccagcttctgtaaatccgaatcaagtctttctagaactcttctcccgtttacttctcggtttggatccatgaatcagaaaa

SEQ ID NO: 147228 - DNA, 680 bp, Arabidopsis thaliana landsberg
gttttaagaaagcattttggagatcttgtgtacatacattcaaatgataaaagttcttcttcacgagactttgttgtgtatactgattcagattccgacaaggaaaacctcatggtaaggtagcatttacgttgctggaaagatttgttactaaacattacatgtcctttggattttaactgagagtgttgaagtgaattatttgatgatagcaaagttcaggctcgagagatgatgtagctatagtgtagtaactgattcttctacttaaaggccttctttgatttagataccattactgtctcttttcacagaaggaggcaaaggacgaacgcaagagattggcagaaagaaaaatacaatctgcaatcgggttccgtcaagtgattgatctgcttgcttcagagaaaaagttgatcgttggtcacaattgtttcctcggtaaactagcaagttgcttctctatacgtttgtgaaggttttgtaacttaaagatgcctaactctaacatcttgttcatctgatacagatattgcacatgtatacagcaaatttgtgggtcctcttccttcaacagctgagaaattcgtggcctccataaacagtcactttccttatattgttgacaccaaaatactcttaaacgtgaatccaatgttgcatcacggatgaaaagtcag

SEQ ID NO: 147229 - DNA, 4514 bp, Arabidopsis thaliana landsberg
aggctaaagaaaaggagttgaagaagcaaaaagctttggagaaagagaggctggctgaactgaaggtaagctctgaggaactccaattattcatttcgggttcctgcttcatatgtatgtgtaatgtgccagccaaatccttaattttccctgtaacttgaaatatttatcatggtgtgcttctcgtgtaggcaaaacaggccaaagatggaactaatgtccctaaaaagagcgcaaagaagagttccaaacgggatgcgtcagaagagaatcctgaggattttgtggaccctgaaactcctcttggagagaggaaaaggctttcttcacagatggccaaacaatacagccctgctaccgtggagaaatcgtaagtgtgtagatctttttctttgacatttatcccaagaagttcctctagataatctctgttattctgtaattgggtcagatggtatgcttggtgggagaaatctgacctttttaagacgcatgctaagagtcccaagccaccttttgtaattgtaaggcctaatccgattcttaaattcatgctcgttctggattcgaccttctttttattgtcttctcgaatacttaatttgtgaaaaccaaattgagttgagaaaatcttgagcttctgaaattattaatactatttttaaagtttctttaatcctttgattgattctgcaggttcttcctcctccaaatgtgactggagccttgcatattggccatgcgcttacatctgcaattgaggtttcattagcatattgtttggtgctatagctgtctattgttcctcccgatgatcaacggcttaatacttgttgatgcaggatacaattattcgttggaagagaatgtctgggtataatgctttgtgggtacccggggttgaccatgctggtatagctacacaggtgagccccaatctcatctcccatattagttgaagtttcagcctatagagtgaatcctcgttgggctacaggcttgtagctttatcttatacacattgtatattttttttttacttggatgtacattctaggtggtggtcgagaaaaagatcatgcgtgatagaggcatgactaggcatgatgttggccgtgaagaattcgtaaaggaagtgagttgaaaatttaaaatatgttgatgaatagtttccttttttcattatacaaaaattcttgttttgcttgtgatcatggaaaaggtgtggaagtggaagaaccagtacggcggtacaattctaacacagctacggcgactaggagcttctctcgactggtctcgtgaggtaatatccagtaatttgacctttcttggataaatgttatagaaaattggctgttttatttatttcgccactaggtgaacatatatgtaaatgatattttttatcttcacttgtgtccctgggctatccatcttacggatgtgtttcggcctgtaaatttatagtgttttacaatggacgagcaaagatcaaaagctgtcactgaggcctttgtacggttatacaaagaagggcttatatataggtatgtttaagtctgactttgttctttgatgcaagctatagaattcctgtagatggaaacagtaatataccgaaattaggattataggaccattttacctttttcagttatcttgttgtaagaaagaacatttgactgaaggtataccatggcttctgcagggatattcggcttgttaattgggattgtattttgagaacagccatatctgatgttgaggtaagtcagcagcaactgttagactaagattgttggagggcatcctgtttatgtggagtgtctaatatctgtaggttgagtatatcgacattaaagaaaaaacgctactaaaagttcctggctatgagaagccagtagaatttggtcttcttacctcgtttgcttaccctctggagggaggcttgggagaggtaattgttgccactaccagggtggaaacgatgcttggggatactgctattgctattcatcctgatgatgcaagatacaagcatcttcatgggaaatttgctgtgcacccatttaatgggcggaagttacctattatctgtgatggaatacttgttgatccaaattttggtactggttgtgttaaggtatacctctaccttatatatttgatgctgggtttctgcccctattagttgtgtttcttgtgtcaaagttacttaattcttattttgtagattactcctgcccatgatcccaatgactgtgaggttggaaagcgccacaagctggaatttataaatatattcacagatgatggaaaaatcaacacaaatggtgggtctgacttcgcagggatgccacgctttgcagctcgtgaggcagttgttgaagctctgcagaagcaggtaactttctctaactcttcacataacatatataatttttctttgattgttggtttgagaatttttgttacactatgggtagttgcttgtaagtgtcttgtagattttaactgttttgtcaatatattattcaggggctgtacagaggtgccaaaaacaatgaaatgaggcttggactttgctcaagaactaatgatgttattgagcctatgataaagcctcaatggtacgttaactgcagcatgattggaaaggaggctcttgatgttgctatcactgatgaaaacaagaaactcgagtttgtaccaaagcagtacacagcagaatggagaaggtttctttcatttatcttttactctataatggtttcttaatctaccccatctatagaagctcttacagcacagctgtatggataagctgcgatggcggtttaagatgtcattacaccatctattaacaatctttaccttacagatggctagagaacatacgtgactggtgtatttcaagacagctttggtggggacacagaataccagcatggtatgccactctagaggaggatcagctcaaggaggttggtgcatacagtgaccattgggttgttgctagaactgaggacgatgctcgagaagaggctgctcagaaatttttggggaagaagtttgaactcactcgagatcctgatgtacttgatacatggttttcttctgggctctttccattatctgttctgggatggccagatgtaaccgatgacttcaaagccttctatccaacttctgttcttgaaactggacatgatatcctctttttttgggttgctcgtatggttatgatgggaatgaaactaggtggtgaggttccattcagtaaggtacatgtacattttaagtcaaacaaggatcacacctccttttagatgcaagtatcactgtgaccggtacttatatgcaaaaaacatattttatgtctttgctataggtttatttccatcctatgatacgtgatgcacatgggcgtaaaatgtcaaaatctcttggaaatgtcattgatccacttgaagtaataaacggagtaactcttgaaggtcttcataagagattagaagagggtaacttggatccaaaagaggtgattgttgccaaagaaggacaagtgaaggactttccaaatggtatccctgaatgtggcactgacgctcttcggtttgcgctcgtctcttacactgctcaggtactatccattgcaccgtccctaacaagctccttctgtgtatgttctataaactaaaaattgcgtttcttgattcttttctagtctgataaaattaacttggacattcttcgagttgttggttaccgtcaatggtgtaataaactgtggaacgccgtcagatttgcaatgatgaagcttggcgatggttatactcctccgcagactctaagtcctgaaaccatgcctttcagctgccaatggattctctctgttctaaataaggcaatatcaaagacagtggtgtcactagatgcatttgagttctcggatgcagccaacacaatatatgcatggtggcaataccaattctgtgatgtgtacattgaagcaattaagccttattttgctggtgacaacccaacgtttgcttcagagagggctcatgcacaacatgctctctggataagtctggagactggtttgagactgcttcacccatttatgccttttgttactgaagagctatggcaacgacttcccgcacccaaagacacagaaagaaaggcttctatcatgatatgtgactacccatctgccatagaggtgagtaagattttcggattttccttgtaacttgtcataattgttcacgtttataactcttttattctgatgctgtgaacccagaactggtcaaatgagaaagtggagagcgaaatggacaccgttctggcaactgtgaaatgcatgagagcacgcagggcagggttgctggagaaacagaaaaacgaaaggtctgagtatatgattaaagccccattcgaggaacacaatgaaacatttcattaaccatcccgcattttttaaaatgattctcgctgagagg

SEQ ID NO: 147230 - DNA, 536 bp, Arabidopsis thaliana landsberg
ggctctagtaaagttgggtaaggacaggcctgcttgtaaactggaaatggtgaaagctggagttatcgactgcgtacttgatattctccacgaagctccagattttctatgtgctgcgttttcagaactgcttcgaatcctcacaaataatgctactattgccaagggacaatctgctgcgaaagtggtggagccacttttccatttgctgacgaggttggagtttggagctgatggacagcacagtgctctgcaagttctggtaaatatcttagaacatccacaatgccgcgctgattatacacttacaccgcaccaagtaattgagcctctaattccgctactggaatctccatccccagcagtccagcagttggcagctgagcttctatctcatcttctctacgaggagcatctgcagaaagatccattaacgcaacttgcgattggtcctctaatccatgtgctgggatccggcatacacctattacagcagagagctgtgaaagctctcgtcagcattgctctaacatggg

SEQ ID NO: 147231 - DNA, 2519 bp, Arabidopsis thaliana landsberg
atgatgcaactgggtggtggtactccgaccactacagcggcggctacaaccgtcgcaaccgctacagcgccgccacaatcaaacaacaacgattcagcggcaacagaagcagcggcacagcgtgttgaggtgtcggaagagatgcacgaccgtgggttcggaggaaatcgttggccgcggcaggaaacgctagcgttgttgaaaatacgatctgacatgggaatagcgtttcgagacgctagcgttaaaggtcccttatgggaagaggtttctaggttcgcgttttcttccccctttcctctttattcccttttcctttttttggtatacttctttttccactctctctttttttcttctctgaattgtttgttttctaattgggaatgattatgaaacttgttttttaaaaaaaaattgaacgttagtttaaagatctgtgttaattgtctgagatttggttcaattttgtcttttgggatttgcttgaatttcgccgaatttgtaagagttgtctttttggtttgtatagttcagtgagattcagattcggacagttcttgaagtgggtttcattaaaaatttaaactttatttaacagttagataatataagttgggtcatgttatattcatgagattgagaaagcaagactcttttgtcacaaactcatgctgattgatccacttctcaaccatatttatcctttttctttttttccataacaaaattagtctatttacttcatgaattttttgatgaatttgtgaatcttttttttttctttggttctgataggaaaatggcggagcatggttacataagaaacgcaaagaaatgcaaagagaaattcgagaacgtttacaaataccacaaacgaaccaaagaaggtcgtaccggaaaatccgaaggcaaaacttatcgcttctttgatcaattagaagctctcgagtctcaatctacaacctcactccaccatcatcaacaacaaacgcctcttcgaccacagcaaaacaacaacaacaacaacaacaacaacaacagctccatattttcaactcctcctccggtaacgacagttatgccgacgcttccttcttcatcaattcctccgtatactcagcagattaatgtaccttcgtttccaaacatctccggtgattttctatcggataattctacatcgtcttcgtcttcttattcgacttcttctgacatggagatgggtggtggaactgcgactacaaggaagaaaaggaagaggaaatggaaggtgtttttcgagcggttgatgaaacaagtagttgataaacaggaagagcttcaacgcaaattcttggaagctgttgaaaagcgagaacacgagagattggttagagaagagtcttggagagttcaagagattgccagaatcaaccgcgagcacgagatcttagctcaagaacgctctatgtccgctgcaaaagacgctgctgttatggcctttcttcaaaaactgtcagagaaacaaccgaatcagccacaaccgcagcctcagccgcaacaagttcgaccatcaatgcagcttaataacaacaatcagcagcaaccgcctcaacggtctcctccaccgcaacctcctgctccgcttccgcagccaattcaagcggttgtgtcgacgttagacacaacgaaaacggacaatggtggtgatcagaatatgactcctgcagcttcagcgagctcgtcgcggtggccgaaagtggagatagaagcattgataaagctgaggacgaatcttgattcgaaatatcaagaaaacggaccaaaaggaccattgtgggaagagatatcagcgggaatgagaaggttaggattcaacaggaactcaaagagatgcaaagagaaatgggaaaacataaacaaatacttcaagaaagtcaaagagagcaacaagaaacgtcccgaagattccaagacttgcccttactttcaccgcctcgatcttctttaccgcaacaaagtactcggtagtggcggtggttctagcacttctggtctacctcaagaccaaaaacagagtccggtcactgcgatgaaaccgccacaagaaggacttgttaatgttcaacaaactcatgggtcagcttcaactgaggaagaagagcctatagaggaaagtccacaaggaacagaaaaggtacaaactttgcttttccttgtcaaaatgtgattggtttaatgttctttgataactgaaatatgatttgttggaattgaagccagaagaccttgtgatgagagagctgattcaacaacaacagcaactacaacaacaagaatcaatgataggtgagtatgaaaagattgaagagtctcacaattataataacatggaggaagaggaagatcaggaaatggatgaggaagaactagacgaggatgagaagtccgcggctttcgagattgcgtttcaaagccctgcaaacagaggaggcaatggccatacggaaccacctttcttgacaatggttcagtaa

SEQ ID NO: 147232 - DNA, 3393 bp, Arabidopsis thaliana landsberg
gaatctttttacagaaacacgaacaagtttcagaatctggtctgactctttgtaaccttctcgtttaagattcattgtacgtattcaaatctacatttctttgccattgttggaatctccgcctcgatcgtttcttatcaaaggatctggtattcgatttttgctatcgtttcaaagcatggtctaatgatgatcctgatctccgactgatccaataacggttaagcaacgctgtttttgatcctccattgttgtttgccatcgatcaacactcagaaataaggtaattaacgcatctcgagactcattgttttaacaatctttgttttgtttcttccaaattattctcgtgaatatccgtaatctctccgtcttttaatgaacaacacatatcatatgcttttgtttgttttgttttgttttttcaacatttcaataattttgtctttttttcttcgatttaatttgtttatttcctgctataataaacgaaaactataattccatgtaatgttcgttgttgttcatagtgatttatcataacgagcaacaacataaaaatcaagagaataagaaattagagttatgctgcttatttgaattagacaaaacctacttttacttgttaaggaaatgaaaagatgttaataaagatgagcacatcgtacgtggcgcacgtggaagcacttctgtacgacggacccagtccaactcgaaccccacacacatagcaaaggttgttaagttggctcgtaggtgaatttaatacctgttatttcctttatagctggctaattacctaaattcgatccataataacacattcctactatgccaacatttaaccctagtcaaactaattaaaacgtttcttactttttggcctattaaaacgtttcattatgttccgcaaatagtatgaaatatataaagattttctaacaaaaaattactaagaacagttagactgattgagattgtttttatttccttttatttaattttcttttattatactctgtttatttgtgtttaataattaggattctatttgtcttgtcttgtttgctatagttggagttttgttcataaagaatggcgtttaatacggctatggcgtctacatctccagcggcggcaaatgacgttttaagagaacatattggcctccgtagatcgttgtccggtcaagatctcgtcttaaaaggcggtggtatacggagatcgagttccgacaatcacttgtgttgtcgctccggtaataataataatcgcattcttgctgtgtctgtccgcccggggtaaaaaacaagttcaacctgtgggagtgttctcgtttcagatatcgagttctataatcccaagtccgataaaaacgttgctatttgaaacggacacgtctcaagacgagcaagagagcgatgagattgagattgagacagagccaaatctagatggagccaagaaggcaaattgggtcgagaggctgcttgagataaggagacagtggaagagagagcaaaaaacagagagtggaaacagtgacgttgcagaggaaagtgttgacgttacgtgtggttgtgaagaagaagaaggttgcattgcgaattacggatctgtaaatggtgattggggacgagaatcgttctctagattgcttgtgaaggtttcttggtctgaggctaaaaagctttctcagttagcttatttgtgtaacttggcttacacgatacctgagatcaagggtgaggatttgagaagaaactatgggttaaagtttgtgacatcttcattggaaaagaaagctaaagcagcgatacttagagagaaactagagcaagatccaacacatgtccctgttattacatccccggatttagaatccgagaagcagtctcaacgatcagcttcatcttctgcttctgcttacaagattgctgcttcagctgcgtcttacattcactcttgcaaagagtatgatctttcagaaccaatttataaatcagctgctgctgctcaggctgcagcgtctaccatgaccgcggtggttgctgcgggtgaggaggagaagctagaagcggcaagggagttacagtcgctacaatcatctccttgtgagtggtttgtttgtgatgatccaaacacatacactaggtgctttgtgattcaggtaatatgtgttcaaagttactactttcaagcaaatcctctgtttcctcacatcatgatccttgaatctgctagctaattagtgttatgtcgttgcagggatctgattctttagcttcttggaaagcaaaccttttcttcgagccaactaagtttgaggtaaagatcttgatcttggctagggatgtacatttggtttttgattcggttatttaactcggtttatccaatcgcttaggttacattacaattattttggtttgtgtttatcctagagaccttaagatattgatatgaatgtcgcaggacacagatgtattagtccacagaggaatctacgaggcagcaaaaggaatatacgaacagttcttaccagaaataacagagcatttgtctagacatggagatagagctaagtttcagttcacgggtcattctcttggaggcagtctctcattaatagtgaatttgatgcttatctctagaggactcgttagctctgaagctatgaaatccgttgtcacgttcggttcaccgtttgtgttttgtggtggtgagaagattctagcggagcttggtcttgacgagagtcatgttcactgtgtgatgatgcatagagatatcgtcccacgagccttttcgtgtaattatcctgaccatgttgctctcgttctcaagcgtttgaatggctccttccgtacacatccttgtctcaacaaaaatgtaagtcttactataatttcctttttggcttaacgttttgaacatcttaaattaaaaatacggatgttgaagttttttggttgtgtttttgcgttttgacagaaactgttgtattcaccgatggggaaagtatatattctacagccgagtgagagcgtctcgccgacgcacccatggcttccaccgggaaacgctctgtacattttagaaaatagcaacgaaggttactctcctacggcgttacgagcatttttaaaccgccctcacccgctcgaaacgctgagtcaacgcgcagcttatggctcggaaggttcagtcttgagggaccacgactccaagaactacgttaaggccgtgaacggagttctcaggcagcacacgaagctcatagttaggaaagccaggatacaaaggaggagtgtttggcccgtgctgacatcagcaggacgtggattaaacgagagcctgacgacggccgaggagatcatgacacgtgtctaa

SEQ ID NO: 147233 - DNA, 844 bp, Arabidopsis thaliana landsberg
tcatcgacctttgtgctgtttttgcagttgtaggtatggggaaaactgtagatttcttcatccacaacaagctaagccaaataatccctttggctttggtacacaaaaccaacaacaacaacagcagcagcagcaacaaaatagttcgatcccttttggatttggtgtacaaagtggtggttccagcagaccgaatcagttccaggtcaatttgtttttttcctcttttaagatgcaagtattgctttgatagaatgcaagttatcgttcggctttggatgagaaaaatggtgcatcttctttaagaaacgaaagcattttgcctgttgaatgaatggtgacatgatgatgcttttgcaaatcagaatacttggtcacgaacggcttctacacctactggtggtggtgctgctgcttctacacagcagactggtaaacagacgcagccggcagatcataagtgagtgtatatatgtttacatatgcttgttctatcaattatcaaccttttagccgtttgtttctttggaaatttactgtttctctcttggttactatacaaagatgcacagatcctgctgcgtgtaagcgggtaatgcaagacgattttaagaatgagagacccatgtggaagctcacatgctacggccactggaaatagtatgtattacttcatttggttcagcatccttgatctttattcattctttataaacgtgtctgattttttctatcttttttttcttctagttttccatgtgatgctaccggtgatatcagctatgaagaactacgtgcagtggcatatgaagaagctaaacgaggaatacctctacagtcgatt

SEQ ID NO: 147234 - DNA, 753 bp, Arabidopsis thaliana landsberg
aaccctccaagagaacatacacagagaaacctaattgcttgtctgctcataactttacattttgctttacctttgtcttaatgctgggttcttctttgtcctcctgtctcttattcttcttcttctactatcttcctctgagacacaaaacagaggagataacagagtggagattttcaagaattggtaatgagaagaatcttaaagttccaaagtttttcagagtcaacaaccttctgaggccagagttaagaagacaagaaagtagaagaagaagatgtcggcgaagcttttgtataacttgtcggatgagaatccaaatctgaataaacagattggatgtatgaatgggatctttcaggtgttttaccggcaacattatccaccgagacgtgtcaccggagatgagctcaagtctcttccttcaggtaacactctctctctcttttctctttcttagcttgctatgtcctctccatcaaaacctgaagaaaaattatacgtttgagaggaaaaagttcttcaacataagacattgtttttgtattctagttcctgactaagatcctaaaaacaaggttcaggaccactaaagatgcaagaaaccaaagctctataacatgtcttgtctttagaattctctatacttatctataggtgtattatctaacaaaactacgtatttgttaaaagttgaaatttggtggggaaatttttgcaggcaaagcaagtgacaatgtcggtgataccaac

SEQ ID NO: 147235 - DNA, 483 bp, Arabidopsis thaliana landsberg
aggtggcaacaaaaactgaatcaaacaaaaacgcagggaatgcggtactctatgagtgtgttgaaacaatcatggccattgaagacaccaatagcttgcgtgtgcttgctatcaatatcttgggaagattcttatctaaccgcgacaataacatcaggttcaaccccctacacctcaattttatttgataatagtatggtattatatatgtttgtaaaggaactagcttacttgtatttttcttctgtctatcatctttctttggatgtgcttaactctatgaagcacacaatgctcttctgactaaccagcgttgccttttctaatcttgatttcgtttctctcaaaaacgctgcattcccttatgaaattcatactttcgttctctcagatatgttgcattaaacatgctgatgaaagctatcactttcgatgatcaagcagtgcaaaggcacagagttacaattttggaatgtgtgaagg

SEQ ID NO: 147236 - DNA, 1227 bp, Arabidopsis thaliana landsberg
ggttcgaagatattgaagaaagaagagaccgatgacgatgatcatgataacagacctatcaagtcatctgtatctgggtctcgagctaagccagtgaagaagaaggaagagattgataaagacgatgagaagaagcctgtttctaagaggaattcttctgttggtgtctcaaaggttcgatttttatttctttctctctctgtttgagtataaatattgaggatggtaaaatatttgatgaggcattgttttgattatgagtctctctctttgtttataggagaataagaaaccacagaaagaagaagaagtaaagaaaaagagagaaagaaaagtatatgatttgcctggtcagaagagagagcagcctgatgaggtatttttttgctgctctgtttctctgctttttagatttgttgttgaattcgtctgaagaatttcttttgttgattttgcaattctgcagagagatccacttaggattttctacgagtcactttacaaacaaattcccactagcgacatggctcagatttggtaagctcttctattcctttctctgccttacattgttctgcaactttaaaacacttacacttaatgttttgtgtttggtatgtatctgattatttgtgtttgatcactcaatctgcaaactgagtcctacaccttaaattattcccccgcccttcatgcaaacttgcgtttgattttagatggtctcttgtgttttgcgacacggtttaagctagttcgcataaattttgaacatcataattggactcacattgtatgtaagaaaggggagtcctttcaaaccagtcactcaaagcattgattatatgatctgtgatggttatgtgtaatatttgcttttagattgctttgtttatttgaaaacccttttgtggttttgatcacaggttgatggagtctggattgcttccagccgaaaaagcaaagaaagttcttgagaagaaactgcaaaagggtggaaaattaagttctccagtaaaatctgctgcttctactccaagaagcaactccaaatcagtgaccgtgaagaagaaggaagtacaaaagtcgccatctgaagctttgtcaaacaaaaagaagggaaatgattcgaaaccaaccacgaagaagaggaagaagaactctgatgatgacgactcagatgatgattttttggctagcagagtctctaaaaaggctagagccaagtag

SEQ ID NO: 147237 - DNA, 1559 bp, Arabidopsis thaliana landsberg
gtccttcaaattttggagctttaccgtcgcatatatgaagaatatcttgcagttccagttgtgaaaggtatgaagagtgaaaatgagaagtttgctggtggactttacactacaagtgtagaggtatgtaatctttttgttctgagacttaaccttttttcttgtgggtttactctctgtgaagttgaactttgattttataggctttcattccaaacactggtcgtggtgtacaaggtgcaacctctcattgtttgggacaaaactttgcgaagatgtttgagatcaactttgagaatgagaaagcagagacagaaatggtgtggcagaattcttgggcctacagtaccaggacggtaaatacttggaagtacttagattatttttctcatgtgctctacaactgttaacttatcattttcaaaccttttatagattggagtgatgattatgactcatggagatgacaaaggcctggtactccctcctaaagtcgcatctgtgcaagttgttgtgattcctgttccctacaaagatgctaatacccaaggaatttatgatgcttgtactgctactgcatctgccttgtgtgaagccggtatccgtgctgaagaagatttaagggacaactactctcctggatggaagtattcagactgggaaatgaagggtgttccattgaggattgagattggtcccagagacctagaaaatgatcaggtcagtccgtttaatatctcatcaattccttcgacatataatattgaagtaagtgcctggtttaaatatgtaacttgtaatgtagctaaacggatttcatttatcccataggtcagaactgtgagacgtgacaacggagttaaggaagatatcccaagaggtagcttagtcgaacatgttaaggaactgcttgaaaagatccagcaaaacatgtatgaagttgctaagcaaaagagggaagcatgtgttcaagaggtaaagacttgggatgagtttatcaaagctcttaacgaaaagaaactcattttggctccctggtgtgatgaagaggtatgttacagcaaaaacttcttattccagcttatagaattaaaactcaagaagataacaattttaagttccttaaacttaaattctttgtaggaagtggaaagagatgttaaggcacgtacgaaaggtgaaacaggagcagctaaaaccctttgttctccatttgatcagcctgaactccctgaaggtcagagaccctctaaatttagaatctgtttgagaaatttggctcataaatttagtccatccattgacacgaagcttcaatgttttcgatgcaggcactctctgctttgcttcaggaaaacctgcaaagaaatggacctattggggcaggagttactaagtgttcatcatgttttgattcaattcatgaaaatttacttttggcttgtaaagactctctcaagtgcattgtgctttgatctgatattttgaccaaaagctatttgagttattttgactgtgattgcactaagaattataaagagttgtttgattcaaagata

SEQ ID NO: 147238 - DNA, 2186 bp, Arabidopsis thaliana landsberg
  unsure (1)..(2186): unsure at all n locations
gataatattcggaaataaaataaaattagggttttcctcagtctctctctcttatagacgccaaccacgttttccagctcttgttctttcgattctcagagaagacttttcagaacatcctccaactttctcagataagcaacaatggtgaaaggtcccggtctctacaccgaaatcggcaaaaaggccagaggtatctttttattatctccctcacttcttctctttcatttcgttcaattgaatctgtttatggcgtagacgatctgattgttgctacttagtgtcccgttctgtcttctaatctggactttcttttgattccttaggatttttgattcttttgctcatctcttagattttccttttcccggtcccgatttggctaccgggatagatcatagatgcatgcgtagatttcgagtattcaatcgggtagagattcataagtaatggatttcaatcattggtgctaatatgagtaattcctgggttcaatgtctccgtcactctcgtttaagctctcttcctttctcaatagaccctgttttgtttatcgttgatctggaatagccaatttgaatgctgtgattctctttcatgtttagcatttctcaccatttaagtcccctttgagaatattttgttaataagctgtctaaaactgttgctctgctctgtgtatttgcagatcttctgtacaaagaccacaacagtgaccagaaattcagtatcaccactttctctcctgccggtgttgtaagtttctcatttcattatagatgattagggtttatggaatgtcgtcttctgtattctgtttccacttttgctttattcattagcttctgaggtttgtgtcgaattagcattgttatcttatgtaacggatttcttactttgttcttatgtttcgtgtgatggtaaacattggatttcttctatcttgggcatcgttgctcataatctggctctttctttgttttaggccatcacctcaaccggaactaagaaaggtgacttattgttgggagatgtcgcttttcagtcgaggcgaaagaacattactactgatttgaaagtttgcactgattctactgtaagtgtatttgtgtactcaatttcatctcctgtttttcttgtatattgagttatagttttttgtttgtttgttgggctacttaccttacaactttgtgtgtattggtttcagtttctgatcaccgctaccgttgatgaggctgcacccggactgaggtcaatcttcagcttcaaggttcctgaccaaaattctggcaaggtatattttattaattcaacaacatttctttgtattgttttaaagtttcatcagttgagagttgacttctcatttttatcgtgtttcgtcttataaacaggttgagctgcaatacttgcatgagtacgccggtatcagcacaagcatgggattgactcagaacccaactgtcaacttctctggtgtgattggctccaatgtcttggctgttggtactgatgtttcatttgacaccaagtctggaaatttcacnnnnnnnnnnnnnnnnnnnnnnttcaccaaggaggacttaattgcctcccttactgtgtaagtgatttttagtgagaattctggatgaaagatggagttctcaatgtttccatttaatatcttttgattttgttgtttgttaggaacgacaagggcgatctattgaatgcatcttactatcacattgtgaacccgctgttcaacactgcggttggagccgaagtgagccacaagttatctagcaaggacagcaccataactgttggaacacagcactcgcttgaccccttgacctctgtgaaggctcgtgtcaatagtgcgggtattgcaagtgctctcattcaacacgagtggaaacccaagtcattcttcacaatctctggagaagtcgacacaaagtcaattgacaagagtgctaaagttggattggctctcgcactcaagccttgaaactgagatggaagaagaagttgcaatagtttttttaaactagtttctttctgcgtactctgttttttctctgcttggttcatggtttgagtgggcaactactgatctttcccattttcctgccggatttgtagaagaataaaaaggttgaaaatgatcatcttgagatggtgatgaaactctt

SEQ ID NO: 147239 - DNA, 1262 bp, Arabidopsis thaliana landsberg
gctcaagaaaaataatctccaaaaaagaaaaagaagattgaaaaccttgagaagggttctaaacagctgaaggataaagtgcgtaacatcagtaattcttttttttttttaatgtggcacatccctcttcttccaatatgtttttagtctcaccagccatgcttatgaaaattttgacttatctttccctgggagcttagatcagtaaacgcaaaatctatggagttgttccttgtttaataccctgtaatatagaacttgtgcattttaaactgacgaggttttttgttataggctttggagctgcaaaccaacatagagaacgctggtggtgaaaaattaaaaggacaaaaggcaaaggttgagaagattcagactgtaagtttgcttttgttcttagcatgctgttagtgaactcacagttaagtgtgtcctaatttatgttgcacatctttaggatatcgacaaaaacaatacagagatcaatcggtgtaatgttcaaatagaaacaaaccagaaactgataaagaagttgacaaaggggattgaagaggctactcgagaaaaagagaggctagagggtgagaaggaaaatttgcatgtgactttcaaagatataacgcagaaagcattcgagatccaagagacgtataagaaaacacagcaggttttgacagttcttatacctgttatctatatactatctggatagcagtcacagatcagtcctttctttttgtttagttgattgatgagcacaaagacgtgttgactggagcaaagtccgattatgagaacctgaaaaagtctgtggatgagttgaaggcatctagggtaacaaacaactaaatctttttctttcggtctatatttctttgcgttgttttcatcatctgaactttagtcgaatacaggtagatgcagaattcaaagtccaagatatgaaaaagaaatacaatgaattagaaatgagagagaagggctacaagaagaaactcaacgacttgcagattgcattcacaaagcacatggaacagtaagtgcggtaaacccttcattatatgattacctcgtttacatctaaaattcgtcattctccattgcagaattcagaaagatcttgttgatccggataagcttcaagcaacattgatggatactaatttgaatgaagcttgtgatctgaaaagggctcttgaaatggttgccttactggaggctcagctaaaagagttgaatccaaatcttgactcaatcgccga

SEQ ID NO: 147240 - DNA, 1506 bp, Arabidopsis thaliana landsberg
ctcccctgagtaaccaaattcaatggccgacgattgggatctccacgccgtagtcagaggctgctcagccgtaagctcatcagctactaccaccgtatattcccccggcgtttcatctcacacaaaccctatattcaccgtcggacgacaaagtaatgccgtctccttcggagagattcgagatctctacacaccgttcacacaagaatctgtcgtctcttcgttttcttgtattaactacccagaagaacctagaaagccacagaaccagaaacgtcctctttctctctctgcttcttccggtagcgtcactagcaaacccagtggctccaatacctctagatctaaaagaaggttcgtttcttcacccaattttcgataaagtttcaaccttttgtcaaacccatcaacaagtttacgaaattctgttgaattaatcaaaattccgaattttgctgtatagaaatggttaaaagtctcaatttttgtcgaacccatcaaatttgattgaatcaagaaggctaaaaaagtctctgtttttatttggttgcttgttacagaaagatacagcataagaaagtgtgccatgtagcagcagaagctttaaactccgatgtctgggcatggcgaaagtacggacagaaacccatcaaaggttcaccatatccaaggtaaaaccaaaaaaattaccagaaaaaaaaaagtcatttattgagttataaatgtgtgtattctttcaagacaaaagaaacttgtctgtttttgtgattctgtctgattttggtttgttaaattattatctgcgttacatttttggtaaaggattctaattaattctcattttcatgaaaacagaggatactacagatgtagtacatcaaaaggttgtttagcccgtaaacaagtggagcgaaatagatccgacccgaagatgtttatcgtcacttacacggcggagcataatcatccagctccgacacaccgtaattctctcgccggaagcacacgtcagaaaccatccgatcaacagacgagtaaatctccgacgaccactattgctacttattcatcgtctccggtgacttcagccgacgaatttgttttgcctgttgaggatcatctagcggtgggagatcttgacggagaagaagatctgttatctttgtcggatacggtggttagcgatgatttcttcgatgggttggaggaattcgcagccggagatagcttttccgggaactcggctccggcgagttttgatctctcttgggttgtgaacagtgccgccactaccaccggaggaatatgattagattacgacggcttagaatactcttattaggacagatttataggattaaggaattattctcggagcatatgtaaaaataggataaaagaaaatgttctttgttactttttttcgggttttcttcctattgtttctaaacatcttagaaaaaatttaattgtatattccttaagctcgatacatcttgtttaact

SEQ ID NO: 147241 - DNA, 1949 bp, Arabidopsis thaliana landsberg
cagagagaatcaaaacaatggccactgtgaaaatctctctttccttggcttcgctatcaccatcttcttcttcttcttcaattcaatctaagttatcaccatctttcattcccaatgcggcacctgcaaaggtggtgaagttgcgattcaatggaaagtccctgagagcaaaaccaatggtatacagatcatctcgctccgttggagtcacctgctctgcttcatcttctctgacgactcttccctctgctcttctcttcgattgcgatggcgttcttgttgataccgagaaggacggtcacaggatctccttcaacgacactttcaaagaggtttctcaattttagttttttggtcattagctcttagcttcggtgatgataattggaatcttttgcagagagatttgaatgttacgtgggatgttgatttatacggcgaggtacttaaaatcggaggtggggaagaaaggtttacaatcaaaattgcatttactataccaaatcttgagttagtctctcgtttgaatgaaattggagtggctttgttttggtaggatgactgcgtattttaacaaggttggttggccagagaaagctcctaaagatgaagcagagaggaaagagttcatagctggacttcacaagcagaagactgagcttttcatggttcttatcgagaaaaagctgcttccgcttcgacccggtgttgcaaagttagtgtcacttctaatgttctattctatattctcgatgctattacttgaatgtcccttttgagtttgatttttttaaagtctaaaacttttaacccaaaacaaggtttagcaaacttactaatgattgatactcctgaatcatgatgctatgaatgtttgtaaggcttgttatttcaactaatcatatacatgttcttgtttgttctgagccctcttgctaaaactttgcaggttggttgatcaagctttaacaaacggagtcaaagtagctgtgtgcagtacttcaaatgagaaggcggtatgatcaatcaggttctactacttcagtttcctgagaccataaccatatatcctcaaatgttgtatcctgatgagtttcggtaaacaagactacgcgcagctgcatcgttaacatgaatatgcgagcatcgtcttagcttagaagaactgtataatcggaaatacttttctcatttcttgcctgatttcaggtttctgctatagtttcatgcttgcttggaccagaacgagcagagaaaatcaagatattcgcaggagacgtagtccccaaaaagaaacctgatccagtaagttactcactttccatgctatcacaacatatgttttgcttgcttcgtcttggttaaagaccgagtcatcaaactttttgtttcttaacaggccatctacaacttagcagctgaaacccttggagttgatccctcaaagtaaagtgttactaagattctttacaggagagaatgagtcagtttagaaaactctcttaagatatggatttgtgtatgtgcagatgtgtagtggttgaagacagcgcgatcgggctagcagctgcaaaagctgcgggaatgacttgtatagttacaaagagtgggtgagttttagtctgaaatcagaatcctattcataattccataacaatcagaattgaaatgatcattcgttctttcatctttggaattgtagatacacggctgatgaagatttcgagaacgcagatgcggttttcgactgcattggagaccctccagaagagagatttgatttggcattctgtggaagtcttctccagaaacagttcgttagttaaaaaccacaaaccacattaagaaaattgtttctatatcaacattgttgtgtatagtcatttgaacagaacattcatgtaaaaccatatatataatataattcgattataacataatgaagaaaa

SEQ ID NO: 147242 - DNA, 493 bp, Arabidopsis thaliana landsberg
caagtctctgtcttcgtctccttcctttcttcttctctctgtcatcattttgcttttttttcttctcctacatgccctagattttgttctgaaataaaaaatggctcacactaggactttcagttccagaaaccgtagcgtttctctctcaaacccatctttctccattgacggatttgacaactcaactgtgactttaggctacacgggtcctcttcgaacccagagaataagacctcctttagtgcaaatgagtggtcctattcactctactcgcagaacagaacctctcttctctccttctcctcaagaatctcctgattcctcttctaccgttgatgttccacctgaagatgatttcgtcttcaaaaacgcaaatctcttgagatctggacaattagggatgtgcaatgatccttactgcactacttgcccttcttactacaaccgccaagctgctcaattgcagacttccagagtttctgcctctagg

SEQ ID NO: 147243 - DNA, 743 bp, Arabidopsis thaliana landsberg
tacaaattgaggatcttgctggaagctgtcattcaaaagatagcaaaattcgaagttaaacctgacaggttttccgttatcaaggtaaccttgttaatagacatcgcccctcttttaaaattaccacgacgcttctttataaggtctgtacgtggtaagatattgccaacttcctccctacatccaacaagccctgtgaactgatgtacctactccattttttctgctcccctgtcctgtaataggaaacagtcacaaaggcataccaaaataacaaattccaacaaccacatgaacaagcaacgaattactgctcactagtattacaagatcagatttggccttggacagaggaactagatgctctttctcatttggaagctgaagacttggctaatttcgttccgctgctattatcaaggacatttgttgagtgctatatagcaggtatatcaacattatccctactgtatgattgtatctggtctcttatctttttccttttcttatagcccttgtggtgtctcattccagggaatgttgagaaggacgaagctgagtcaatggtcaagcatattgaagatgttctttttaccgactcaaaacctatttgtcgtccgttatttccatcccagttcctgacaaatagggttacagagctcggaacaggaatgaaacacttttactatcaggaaggttcaaactccagtgatgaaaattctgccctagtgcattatattcag

SEQ ID NO: 147244 - DNA, 1470 bp, Arabidopsis thaliana landsberg
agcttgtttctcagcagatgctgtaaccaagcatgtcgaatttgtaaaagagtacaagcaggattttgagcgtcaccttgatccagaaagtacaactacattccctgccacactcgctgagctgaccgctcgactgaaaaagtggaaaaatattcttcagagcaatgttgaagacaggtttcctgctgtgttaagattggaagatgagagcagggttttgcgtgactttaatgttgttgatgtggagataccagggcaatactttgctgaccaggtagaaataacactattaagtctggaaatttgaactacgtttcccttgcacttaaaaatggaacactttttttattttgatttgattgtgaaaataattatgctcaattatccaggaagtagcacctgatcatacagtaaagttggatagggttggagcagacgttcctattgttcgaaggcatggaagcagcttcaggcggttgactcttattggctcagatggctcgcaaaagcactttatagtccagacatcattgacgcctaatgctagaagtgatgaacgcatcttgcagcttttccgtgtaatgaaccaaatgtttgataagcataaggaatcaagaagacggcacattggaatccacactccaatcatcattcctgtctggtctcaggtgatttttataccatgaattcagatttgatgtttcattggatgagtattggttttaacaaacatttggtttcaggtccggatggttgaggatgatctcatgtacaacactttccttgaggtgtatgagaatcactgtgcacgaaatgaccgagaggcagatcttccaattacccactttaaggagcaactcaatcaagctatgtcagggcaaatatcagcagaggcaataggagatcttcgtctgcaggcatatattgacatcacaaaaaccttggtcaatgacagtatcttctctcagtacatgtacaagacgttgatgagcggaagccatatgtgggctttcaagaaacaatttgcagtccagctagcagtctccagtttcatgtccttcatgctacaaattggtgggaggtccccgaacaaggtcttgtttgcaaaaaacaccgggaaaatgttccagacagattttcaccctgcttatgacgccaatgggatgattgaatttaacgaacccgtgcctttccgcctcacaaggaacatgcaagctttcttctctcagtttggagtcgaaggtctcctcatgtcatctatgtgttcagcagcgcaagcagtaatctcctccaaggtaaagggataattcaaaaactatatatacaaaaactaagtgatgcaacaagccactgattgatctctgtgtctctattgtcttgcaacttttcagcaaaacgaacatctacggtatcaacttgctatgttcttccgtgatgaattgttgtcttggtttggaagaagacctcttg

SEQ ID NO: 147245 - DNA, 994 bp, Arabidopsis thaliana landsberg
gaaagatataaagtcagcttaaagctctcgcatggcgtctcaagattctcatatgttattgagcttctttatatctactcttttaatcactgtcgtgacctcgcaaactcgatgccgaaatttcaagtcgatcatcagtttcggcgactcgattactgatactggaaacttactcggcctctctagtcctaacgatcttcctgagtcagcctttccgccatacggagaaaccttcttccaccatccgtctggtcgtttctccgatggccgcctcatcatcgacttcattggtattttaaacgttttaacgttttgaattggctatgttttgattaaactttgagagagtctctgtaaagcaagatcataatctttgttttagtgcaatttttttcaatttaattggattccagtttttgatttttatactgtaataattttttgttttaatatgtattaaaacctgaaaaatacgaaagcattttatttcttggtttcttttgttcacagctgaattcttagggattccacatgtgcctccgttttatggatctaaaaatggaaactttgagaaaggagttaattttgcggtgggaggagcaacagcactagaatgttctgttcttgaggagaaaggaactcattgttctcaaagcaatattagtttaggaaaccagcttaagagcttcaaagagagtttaccatatctttgtggctcctcatcaccaggtagtgaagatcaagcttttatttgtttccattgaaaataataatattttgtatttgcaatgaattgagttaagttgtaatgattttgtttgttttagattgtagagatatgattgaaaatgcatttattctcattggagaaattggagggaatgattacaacttcccattatttgatcgcaagaacattgaggaagtcaaagaactggttccccttgtgatcactactatttcttcggcgatctcgcgtaagagttttcatcga

SEQ ID NO: 147246 - DNA, 667 bp, Arabidopsis thaliana landsberg
tggagatgcattgcatttggagcacatgaatcatcaagcacaggtattttttttgtggaaccaaagaagtgtcctggtttcacgtttaggaaatcgattcttgtggggaaaaccgacttggttgcgaaagaagttcgtgtttttatggagaaattagctgaagagtatcaaggaaacaagtaccatctcatcacaaggaactgcaaccatttttgcaatgaagtttgtcttaaacttgctcagaaatcaatccctagatgggtgaatcgacttgctcgcttaggtaaaccaatcacaagtgactattgttatgtttttgtttggcataagagagatcacatcaagtaatgcaggtaactgtttttgtataggggttctctgcaactgtgtgttaccacctcgtttgaacgaggcaaaagtgagacgagtaggaaaaggagagctttcggaaagtgagaagaagaaactaagaaaccgatcacgatcagatcctttactgtcttcttctccgtcttcatcgacacctgataatcatcgttcacacattcgagcaaaatcaagtggtaatcatccttcttcttcttcttcttcgtcttcgggttctaagaaaaatcgaagacctaaagctcaagaccagaagtcgccaagcgtaagcatcaagacttga

SEQ ID NO: 147247 - DNA, 470 bp, Arabidopsis thaliana landsberg
ctctcctctctttgtctctctcgcttctgtgatttgggcttttcagaatgggaaatgcgaacggcaaagacgaagacgccgccgccggtagcggtggtgcagatgttacctcgtcctcggcgagatctaatggcggcgatccttctgcacgcagtcgtcaccgtcgtccttcttcagactctatgagcagttctcctcccggaagtcctgctcgatctccatctcctttcttattcgctcctcaggtttccctctctcgattttctctctgtgtttaatcgttgaatttgatttctagttttgaattgaatcgattgaaacattcgtccaaggaaataatagtaagagaatctttttgattatttcattgagtaagagaatgttcgttcacttgacttttcatttgtttcactaattgtgagacactttcttcatttagataggattctagtacaaaatctccagccttt

SEQ ID NO: 147248 - DNA, 1420 bp, Arabidopsis thaliana landsberg
atgtttaaagctttcgtcttctgtaactttggagaagaaggatccagtgaaagaagatggtaagagcaagacgaacgagaaggcacaagctaagccaaataataatctcgtttgaagaaaattttcaatatatttgttttgcatcccttgtttttatcatatagttttcttatttttaacaaaggttagactcttgagaatctaaagagtttgaaagatgttatctatgtatggtttctttatcttatcataactaactaaacatgttgtgtggtgttgatgaaagattgaaaggattaatcaatcacattctctagaaccaaagtcgagaattcttttaactattagtctcttagatttgcttccattactaatctttcaagtttgaggtgtaactcaaatttctcaacattttttttcatgcaaatctaaatttctgcaaatacaatgaaattataccattaaacaatccaccatatataatatacgacataagcatcgcacaataaaaaaccagtaacatttgaaaaggggaggagaaagaaaacatgaatattatttaacaaaaaaaattaaataaactggcgaaattgaccgtctactagttaaaaaaaaaaaaaaaaaaaaactttgaagtccccaaatatctgggccttttagtggatgtggcccaaattctaaatgggtttgacttggatccggttttggcgagactagttcagtttaataatcagccgtcgaatccaaagactgaagaaggtagtcttaaagaaaaaccctagaaaccattacttatctctcccactggctctgtctctgtcaaatctcggatcgatttcgcggtgggctcgattcgtgattcctcaaagttcatcatccctaaggtaattttctccccaagctggtagactcaatttaccgatttttgtgttgcacttaaaaagccgatatctaaattagaggtttgcgtttttttggggtaggcactgtcacttaatggcatgggaatcgaaaagctacgctaggagagatcgtcttcttgagattaaggccactgttcgaaagtggtgggaagacgaggatgtattcagagccgaatcttgtgagaatcttccaaaaccaggagaaaagtttttctcaaccttccctttcccgtatatgaatggttatctacacattgggcatgccttttcattgtccaaggttgattttgcttctgcttaccataggctaagaggagctaatgtgcttcttccatttggtttccattgtactggtatgccaattaaggcttctgcggataagcttcgtcgtgagattgaacagtttggtaaccctcctgtgtttactgctgaagacaccaccaaagttcctgaagttcaggaggagagcagtgatactatagctttaccggttccgg

SEQ ID NO: 147249 - DNA, 513 bp, Arabidopsis thaliana landsberg; identical to SEQ ID NO: 10251

SEQ ID NO: 147250 - DNA, 290 bp, Arabidopsis thaliana landsberg
cttcttccacaagcgaatcatctgctacatcagagactgtagaaaccctaagggctaaactgaatgagcttcgcggcttaaccgctcgtgagcttgtgacacgtcaagatttcggtcagattctcattacggctgcgagttttgaagagctaagttcagctccaatcagttacatttctaggttagctaaatacagaaacgtcatcaaagaaggacttgaagcttctgagagagttcacatcgcgcaggtacgagcaaaaatgctcaaagaagttgccacggagaagcaa

SEQ ID NO: 147251 - DNA, 5615 bp, Arabidopsis thaliana landsberg
ctgttgcctatctgttagagacccttgttttgctaacacattgattggattccttggctcctgaaacaaaatagcaagggatgagaaactgtagagtactatttcttaattgggctaacaagatatcgtacctttgttgcctgaatctcttttgtttgatgttcattttcaagattctgcacagttatattacattattgcaaattgttatatacataattcttgacttagaaaactttatgttgacggaagttttgcaccttttcagacgcaaaaactcttgcaggaggcattgtcttttctgcagactctgtctgtcttcgaagagtttcattttctgactctagaattgcaaccttatccttcaggctgataagaggtttattttctttcagatatacagtgatatcagatacaatttcatatttttatttcatcttttataatttaggtcgactaaaaattttaaaatccatgcagctatgcctgatagaagaaaaagaatctactaggctgagaaaactgctcagctcacaggaccgtacctgtttaactctccaatctcttcaacgcttgttgaagcggccaaagcctgctgacgcaaaacctgattttcggattcaaggtttgacaggttcgtatgtaatctggaatttacaatcaatactcatgaactctgactgtagaacagaaatatgattacaaatgccttaagcaattagtaaatgtatacctttcgatgatttcttgaaattcgacggcctttgattttgcatcttctgcttcagttacacttgccctgctatcattctcaagtgcaaaacatttcacttcaaactccttaatttttccttttaatttagctacctcaacctacattttgaagatattgtatcaggaaaagtatctgctagttagtggaacttgtagctcaaacttacctccagttcattgttttgactgttcagtaactccagttgagtgttatctacaactggaacctctttgatgattggtggagcttgttcaatggctaattttgctgcttctttgtctcgtatgattgcagcgtaggcttcatctagcttctcttgcaattcagttaaattattttgtagttttgcgatttcttgtgctttggcgtcttcgagatcagcctaatgacacaattaagcatgggcttcatttggaacttttccaaggaccagtttctaatgttgttgacaataccttttgatgcttctctaattcgagacgccaggttagctcttccacacgtttctctaacttgtccttggcttcctttagtgccccagtttctctggcagcctttgttggaaagattaattgttacttgttagtaacttagactgaagcagttttctaattttgcattccattgcctgcctcgtggacagattagattgattcttatgagattaatcactcaaagtgccctcttatcaatgaaacttaccattctgagattttttagctcttttcgagctactttagctctccatagacattgtaatgctaatgttgcttttttgtgcttcttataagcttcatgaacttggtgtcttctccattccctctgttagaagatatgtcattaagatttgtcataaaatttatcaaaatcatcatcaccgtactatctaatcctcagaaaagtaggaataaccatattgtttgacgtctgattaatcaagcaaaagttattaaaatcttgatcccttatgcgtgaagagtaatccaaattttgaaataagaatggttactgcttttgaatataactagtttcagattatagaagacaagtccggagacatatgatattttggtagagaaataagaagtgtgattaaatagtcaaaatctagtacctgaattataattgctgcctttgttcttcttctgtgtctatgcttgtttcgagcagacattgtccgtaaaccagtctgaataactgttgctgatgcctggagcttagtatagtttttccttgctctgtgagcacgaatgttcttttggatacaaattgaagcagcttctcttctcatgttttgatacaacttgcgagcaagttttgctacataagcaatgcacatgacacagttaatttaaagattactgttacctggctgaaatttgaatcattctgtgacattatatcagattaggctgctctattgatttaaagtattaattcatagctgtgtgttgggtagggtgttactattgagacattggtagaagaataaaacctctccaaagtttttgcatataaattgtagcccttttctgcccaaggaactcttttcttatcagataagttctgatctgcctctgaatgagtttagtggcaccagccaagacctcggttcttcttgcatctagttcagccatctgtccggccctaagaaatatctttgttttccctatctgaatatgaataatcataatgcaatcgtagattacactgttaggattgagtttctttattctttcatatctgacattcttgtattctgattttgacatacctggtagccttttagacccatcttgtcgcagatcgaagcacatgcggatttttcgtcggatctgtcaatagataatgtaattttctcaatgttgattggatcaggataatagcatacaactaataacctgtgttctagatttttatttattgagtatttttacccctctggaacgtctgttgctagcatcacaaaacgatctaggaattcatcgaaagctcgtttcgttggataaccagcacaactgattcttatagcttccagtacaccctgttcacttatccagatacggtattagtaaatatccctgtgggaaaacatgaacttgtttaactaggaaacctgaggctttaggcttactccgcatcttagttggtttaggacgttgtcgttctcaaaaattccgggcttcagaactgcatttggtttcacacatctaatataatggggctctgttgtgttcagcgtctccattagagcttggagttgttgctgggggtaggttaggtcaggaatcaagatcttgagcaatgtgcaaatgatatacttactagtggcttaccttgaaacgggtccctatggatgaaaatttggactgctttgatgcgtcttctggaagtggtggaaacaaattggcgacaaaagagcacttagatgcatctagcaaagcttgatgttctgccacaacataatccttgtttttgtcaagaaattgctctgctgagtacgtaacctggagacagaaaaatgtgcttagtaactagctactgtatttacttcagtttagcgtctaaaattgtgtttgtctcacatctcctgcatagtggttgacagtgaaggctgtttgggcaagcttaggtttgctgaaacgcttgtgtcccttatatgtttgatacatcttctgtgcaaacgtctcatgagtcgacttgggaaacatgctgcaaaggtgaaccttatgattatgcctagaggagccagttttacttcttactatggattagtattgtgaaactgtccttcccctaaaagtaggattacacttaccatgcttcatcaagtagggcaattatgcctcctggtttctgaaaagaagaagatgtcattgataattttttgtgcttgtacatgttgtggagccaatgtcatccatataaatgatgttagttgcatagtttataccttctcaataagatctaagacatcctggttatcaacaaattcaacatagctccagtttatttcctccctcgtgtattcctcttgctccatcttgaatacatgctgcagagaaaacattgtttcatgtgaaagttgcttgcaatgtgaacaggttacagtgattttactttctacctgattgaaatgctgttgtaacttctcatttgtgagattgatgcatagctgctcaaaactttgaaacgaatagtgatattagatcgtaagttttatgtgtactcatcattcaggtttatactttctgtcaggtctacctgttgatcttgaagctttcaaaaccataaatgtcgaggactccgatcaagcttttagcatccgggtcttgacctattgaactgttgatcttatctacaatcctgtcattattgattagtgcacatgtcacggtgggagattgctcaaactgagaactatttatttagagtcctgaaggaaaaccatgttaaaggtgtgttcggtctctcctataatgtgtatgcagtttgttcggtctctcctataatgtgtatgcagtttctattttacctctgcgccattataattcttgtggaaggcagagcagcttttgcctaatgattgttagaatattcatttttgtttcaggggttggatttacataccagtcaaacagcctggagtacactgtcttggctaaagcatcacggtttgaggctgccgattctggatcaagcggctttgtaatgttaccatccggagtgacaataacacgcttgcagagtgaatcttccatcatcttctcattgcacctacgtcaagtgaaagattgaaaattagtcagcatttccattggaaaatgcagaatttcgaggtctagtggtaagatacatgagtaattccgctgctgtttgaagatgatatcttgacttatcatccctgagttttgaagaatctgcttcttctcctttgataaaattgacatttccaaggtggaggatcgcagctacgactcggaatatggcatcctaaagttgacgtttctggttagtatttgaaatttctacaaccatatctttagaatgagagtcatgagacaaacctgtgcctcttgtccgattcccacaatgtccatggcatttctagtctctaaatactctcttgcatcatctacattggaaacctcgtagcagttcgtctggtttagatagtggaacgtccttggatcccctaccttgaatttcttagcttcctgaaaatcaaacatactgtaacaattgtcttaccaataattggttcagctcttttgctttcagcattgttactgaagacttacctcaggcggtgctgcacagagcatgtagaagcagtgatagttcctctcagggtctgaaacttggcaaacacgagaccgttcaagaagataagtgcggatggcagctccagatattttcccacgcttgtcaaattggatctcaacaaattttccaaaccgactgtcggaaacacacaatattacaaacgagtcaaaacaaaagatgccaacagaaaaaggaaaaatatgtccacagtaagtgtttcacagacaccaccttgaattgttgtttttcacagttttggcgtttccaaaagcttcgagcactggattagactaaacatagaaaaaaataaaatggtggaagcttgttcgacacagataaaaactcagagcaagtatctcacctctaaaacttgttgttcaacgcttctcccttcggtatctgatctgcctcccatgaatgcaagatatctcatgagcattttggttgtctctgtttttccagctccgctctctccactaaccaaaatggcctgccttcttgcctcattaatcat

SEQ ID NO: 147252 - DNA, 5304 bp, Arabidopsis thaliana landsberg
atggatgaagagcttctgctcactagaatccttgcaggaatcgaaggaggagacgatgaatctgactatcatgaactcgtcacggatctcaaatctctacttgatacagacgatgatgaaattctcaatcgattctacggtagtctctcctcaatggcttcttcgtttctccgctgtatctccgccgccatggattctccggttgaatcaggccgtcttgctattttagcctccgacgcttatctcagtctacttctttccacgaactgccccgttttcactttcttctctccgattgcgtttctttctctacttggctcaattcgccgctacctcaaacgccgtgacgattcgaccggtcaagggagtaattcgcagcgggagaaagggaataagaagaagagaggacgtggtaagaggaatttagggtatgaagatggggaagagactgaagaaggtggattcgatgcgaaattggtgtttatagtgttagagaagcttggctcggctctgagttttgttcatttagatagatttcctgatagtttgaaatctttggtacaaactgtgagtgagattcctttattggtgttggagtactctggagttttgaattatgatcgattgatggaaatgtgtgggaagattttaggtggagtgttgaattctgaccatggaaatatggcactcactgctgctgagatttcaaagtctttgacaccgttgcttcttatggggaaacatcaagcgagaagttttgcgttgggatttgtgtcaaggaaattgatgagtttggctaaagataactctatattgaaaaaagttgtttctaatttgcctaagtttctggttcataaggcacctgagaaggccgagccgcgtggattcgctgtggaggcggtactggagattgtaaaggcaatggaggttgagggccaatcagagtttgttgattttgtaatgaagatgtgtcaagggaagtctaattttagagtattagctgttgatattatacctctgttgataagctcattagggaaccctttaggagttattagttcagagaatgggttgaatgattcgtggggcttaggttgtattgatgctttagttcagcggtgttctgacacgagcgctttgattagagctcgagctttgtccaacttggctcaagttgtggggttcttgtctggtgatgaaaggagtaggtcgatactgaaacaagcccttgggtttaacggtgagacttcagagggaaaaggtgcagtaactgaccttttgaagaaaaggtgtgtggatgagaaggcggctgtaaggagagcagctcttcttctggtgacaaaattgacatcccttatgggtggttgctttgatggtagtatcctaaagacaatgggaacatcttgttctgatccgctcataagtataagaaaggctgcaatttcagctctttccgaggtatgttttctgtaactcagtttcttctttctcatttacccgatcataatatgtgtagagttagtggaattatatacgggtttgctttgtccttaattagctcaaagttaaagagaccaaaatgtgcaagccaaaaatatttttagatgaatgaatgggagaatacatagcaactgcttccttcggtttcatactaaaatcagataatatttatactcaacttatccctgaatataggttaggctaatgacttgttatcatatttcttccgcgtccttttttttcctctgataatgcaaattcattgtcttctgttcactgtaggcattcagaatatgtacagatgaaattgtgaccactgaatggttacattctgttcctcggatgatcatggacaatgaaactagcatccaagaagaatgcgagaatgtctttcatgaactagttctggagagaatattacgagctggaaatgtgctttctccagacagtgcttctctccctagcaaccggaacactacttcaaaagatctagacagagacattgaagccttgtttccagaaggagttttggttctcttaagggagctttgcaacagtgaggtttctccttgggttacgaaaatatgtggaagtttgggaaagaagaagcgactaaaaccaagagttgcccttgcgcttcagtgtatcataaaggaatctgaatcactgtggttgagtcgttcaatgccaataaatagatggacagctcctgctggtgcttggttccttctatcagaggtttcagtttatcttccaaagtctgtcgaatgggaatttcttcaccatcattggcagttgcttgacaagaatgacgtacaaggtttgtcagaattctgtttatccatctataaacatctcaatcaactgattcatgtctttacttcttcctactggtagtgtaattctctggttttagtcctaacttctaccctagctaaaccaattttcatgaatgtatgtatcataatttggctatttctgaagggctagatgaacaaggtgatgaacaaggggttgagtgtaattcttctacatgggctggcgatcgagtttgtcttttgcaaacaatctccaatgtttcccttcagctgccagcagagcctgctgcagatctggctgacaatttgctgaagaaaatcgaaaaatttaacctgcattctgctgaggtaatgataaatatttaacctgatatcttctatataaaatcaagctcatgttggaaagtgcagaaagttactggtttttgtctagaaggatgtattctataagattttgatatttttttggtacttttctgtaacctgaaacttgaacgcttgaattgagcagatcattattcactggtttgaaaatggttcatctatcttcatgaacttagtcaatgccattgaatgacaggtcgatgcacatgtcaaagcattaaaaactttgtgcaaaaagaaggcaagcacctctgaggaggccgatatgcttgtcaagaagtgggtagaacaagttttatcgaaagcatctaaggtcactgagaagtacatcgagggggtttccagtaataatcattcttttgttacaccagcaacacttggaagtagaagaagcaagagactggatactgtgtccaagaaattatcaaaagcagtcacagcagtatacaccattggatcttgtgtcattatatatccttcagctgacacgaccaaaattgttccgttcttacatactgtcatcacttcaggaaattcagactcaaagctgaaaaacaaactgccccaagctaatgtttgcttgaagcaaaaagctcctcttctctatagtcagtcttggttaaccatggcgaagatgtgtttggctgacgggaagcttgctaaaagatatatccctctctttgcacaggtctgtctgcatttgctgattctagtggccattttatcattttgattatttctggaaaggaaaattttcgacccaggaacttgattcattggatgggaggctcctttgtctcttcaatctatttcaacctatgtgaacccgtagatgccttactctcgcaggaacttgaaaagagtgattgtgcagccttgcgtaacaatcttgtgttagcgatgacagactttggtgttcactatacagccatgattgagtggtatttcattcacagaacattaatttttcattgtacttgtctcaaatgttaaacataattgcgacattctaatggtttgtttacctggatagttacataccgaagattactaaacgtcttcgggatccttgtgaagttgttagaaggcaaaccttcatacttctctcaaggttactacaggtattgctattctccacatattctttatcttccgtttttagaaagtattggattgacaattaataagcaggcttgttttcttaattcagagagactacgtgaaatggagaggagttctcttccttcgattccttttatcgctagtggatgaatctgaaaagatacgccgacttgcagactttttatttggaagcatccttaaaggtatgagaactcatgtgagcaaccatgaaatgcattcttttattcccctgttattgtaaattcttacagagagacatgatctctaggattttgattattgttatgccccatattgcttatagtaaaggcgccacttctagcttacaacagtttcgtggaagctatttatgtcttaaacgactgccatgcccacactggccatagtaatccagattctaaacaatcaagaacaaaggatcaagttttttctatcaggtacttgtgttaaagttatatagtctatgctcatacgcaaacttgacattttggtgtgaatgatcttagtgattctctttgtttcatttgttctgtagagggaatgatgaaagggctaggtctaaaagaatgcagatctacattactctgcttaaacaaatggctccagaacaccttttggccacattcgccaagttatgtgcagagatcctcgcagctgcttctgatggaatgctcaacatagaagatgtcactggtcaatcagttctacaggtaacttccgaaatggctacagagcctttttcttcttcttgtgatttccgatttttactcgttttgtctcggtgtaggatacgtttcagatcttggcgtgcaaagagatccgtttatcagtttccagaggagcatcgtcggagacagcagatatagaggaagaaggtggagatgcagcaactgcgaaaggaagggccataacgcacgctgttagaaaaggtttgattcagaacacgattccaatcttcattgagctcaagaggcttttggagagcaagaacagtcctctcacaggttcgctcatggactgcctccgtgtcctcctcaaagactacaagaacgagatcgaagaaatgcttgtcgctgacaaacagcttcagaaagagctcatttacgatatgcagaagcacgaggctgcaaaggcacggtccatggctaaccaaggggttgcctgcgggacaagtcatagaaacggtgaacctgaagcaccagcagcaagcgaggagaatgtcagagattcgggattggaatcaagagtagtttctgcggctgctgatgtggtggcggctaaggcagctaggtcggtgttgagagaagtgaacggtggagctgcaacgccgcctctgagcgcaatgagtgttccgaagctaaggtcgagccgtggagttagccagagtggtcgaccatcagctgatgtgttggagtctctgagaagaagaccaacgttcatgtctgatgatgagagttag

SEQ ID NO: 147253 - DNA, 884 bp, Arabidopsis thaliana landsberg
atggcaggtaaaatttgttaacaaggttacacatgccgccgcaatagtaagacgtaaaatgaaagagaaaaatttataaaaaactatcattcgtatcatttgttttcctttagtgtttctttattaaagtggtggcattttctttcaagttgaaacagagttagttatataaagtagccatacacattcaccacggacggctaataatgcttgttttcgaaagagggaaatgaatcacttttgcgggagacaatatggatctttataaaacattggagctaaaggaattaagctgcacatccctgttaaaagtgggacagtttaggggaagctgtaaaagctgtaactgatcttcttggcatgcagacttgtaaggttagtctcttccacttttttctcatactctactgagacttgagggctaaaattattgttgataaagtcttttttgagtatatgaccatttgttgtgttcctgaaattgaaactgacactggataaataacaggggacggagacaattccgctcaatgcaaggtcacacacgtgtctattgtcaggtgtgtacataggcaacgtgaaagtgttagtgagggcacagtttggaatggacagctcaaaggacattgcaatgaagctgacagttagagctgaagacgtttctgtcgccgaggccattcacgagattgttgccagcggctaaaacctcttgcgtttcttcaatatcagagaatgtcatctattcctgctgctaaacctcaaaaatacatcaactattataaatagcatagtattactttctttcttttttccttgcattattactgtcaaatacactatggaggttttctttttattttatgacggtgctttttgatttctca

SEQ ID NO: 147254 - DNA, 1751 bp, Arabidopsis thaliana landsberg
tcggaaaactctaagatgcatcgcggcgcggcggttttcggacggaaacgcagactgatacttctccatggcagcagaaacttcgtcagatccttttgctcttcttcttcactatctggtgagagggattcacattttcgctatttcatttgaacttctggaagctgtgcgatggcttgagattggtttatgattcttacggtgccgaatttgaacaattagtgaatcgaagttaacgattgattatgtgcagaacatgaatgtttcattaaggatatagcaaaagctcagcctcctaagcatctgatgcagctgctgaatatattcacagctagaggtaagttcaaatcttacactgacttggctgatcgtattttcgaagttattgtttgttaacctgcggaaatggtgacttttgcttgtggtaatgacaatggatcaggtaaatccatagtttctcctggtgccaaggaaggcttgttaccgcttactattccattggtgaaaatgagcccgggtatgattctggacttgaacagaagttcttatctgaggttgtaacttgtaacactctcatattgagtttgtatgactttcatttttcaggttcttcaattgctctattacggtggccaacagctccttctaggttagagcctccttgctcttgttatattgtcatgtttctcttcttttgtagcttatcattgtttgtggtgtttgcagtatggagatgcctgtggtggaagttcagaaacatggggtttggtttctagctaataatgtaatgagtctttttatagcattactgatgcgttaatttagggttatttttgttgagtgttcattctcatatctgacttcattggccaacattcaggttgatcagttcattcacagaatattggtggaagaagatgtttccaaacccgaagaatgcagccaagaaatcttcaatgctgctggtgaagctgggaagaaactttacagtaagggtgactttgccagttcaagactgatggatttagatgcctatcttttaagaaaggtacatatattgagcctgttaatatcagaatcttttctgcacatggatactgggatatgattattagctttgtaattcaggttggattgtttccagattctcttgaacgaaaagttattcggcatatcgagaatggagaccatgtaaggctagtaataatatctatcctgttgtagttgacgtgttttctctttttaaactatcttcacgtgctaatacaaggtttcagctttggtggctaccgagttttatacaaagagagggaactttcccggatttgcccggccattcgctttcaacgcaaaagttttactgaagttcgtatgatcctttctcatcatccctctttctcccttgtgaacgacccccaggtaaatgcttacgtcctttctagaaaactctaagacctctatatattttgtagacttgggcgtaacttagaagcgaaagacgcagctaggggtgctttgaaatcttcgtggtggaccttaggatgcagatatgaggtacaattccttgactatcgacaagcaattttggtaatcgaaaagagaagggaaaaaagtgttgaacatttgaaacgggttcccaggaaattgctcaaatagcagagtggggagaagagcaaattgcgcagtataaggagagagttacaggagaaggaaaacaacgggatatagacaggggaaagccaatggctcag

SEQ ID NO: 147255 - DNA, 1235 bp, Arabidopsis thaliana landsberg
cgaaagacttaaaatcaacgagctcacggggatgtcggccgtttcaatctccgccgtcaaatctgattttttcaccgtcgaagccatagccgttacacaccatcggacgccgcatccaccacatttcccttcgctccggtttccactatcgctcaagtccccgccggctacttctcttaaccttgtggctggatcaaaacttctccacttctggcgtcgtcttccttctattaaatgctcatatactccgtcgttaggtaaaaatctgatctcccccattattagcgcctctcaatttcgatcgaagttgaacttcttcttctcctcacagatttatcggaggaacagttcacaaaatttaaaaaagcatcggaaaagggaaacttagttcctctattccgatgtgtattctcggatcatttgactccgatacttgctcaccgatgtttggtgaaagaagatgatagagatgctcctagcttcttgttcgagtctgtggagcctggttcgcaatcgtccaacatcgtaagccttcctttttgatgattgttctcagtgtttgcattttgtttggttcaatgaaattgaactcttggaggatttttctcttagggtaggtatagtgtagttggagctcagcctacaatagaaatcgtggcaaagggaaatgtagttactgtgatggaccatggagctggtcttaggacagaggaggaagtggatgatccaatgatggttcctcagaaaatcatggaggaatggaatccacaaggcattgatgaattgcctgaagctttctgcggtgagtggagaaatctgtttttaaatagagtgatgtttgttttagcattgctgatttgtttggatggttgatttgatttgtaaccaggtggttgggttggatacttttcatatgacactgtacgttatgttgagaagaagaagctgcctttttctaatgctccagaggatgataggagtcttcctgatgttaatttgggtctttatgatgatgtgatcgtgtttgatcatgttgagaaggtatactagtatttgcatcttcctgcggattatgaattgaagagtttatctagtttttcttgatcctgttgagcacagaaagcatatgtgatccactgggtgcggatagataaggatcgttctgttgaagaaaatttccgtgaaggaatgaatcggttggaatctctaacctctagaattcaagaccaaaaacc

SEQ ID NO: 147256 - DNA, 1308 bp, Arabidopsis thaliana landsberg
cacgcaacttcctcaagctgctggagttggttattctttgaaaatggacaagaagaatgcttgtgctgttacattcatcggagatggtggcacaagcgaggtttataatctttattaattctcatttctttccataagaatcaacatttcaagaattgaaatttatttagtcttttggggtttggttgtttgggactagggagattttcacgccggattgaattttgcggccgtaatggaagctccggttgtgtttatatgtcggaacaacggttgggcgattagtactcatatctcagaacagtttagaagtatgaaactaacttaacttcctctgtttttcattacaaattagaccaaaacaaatcctctgttttaatgtgagcctatgtggtttgattacaggtgatggaatagttgtgaaaggtcaagcttacggtatccgaagcatccgtgtggacggtaacgatgcacttgcggtttatagtacggtacgctcagctcgagaaatggctgtaacagaacaaagacctgttctcattgaggtaaaaaaatcacactagagatttatctcaaagtttacaactcttgaatttggtgaaataagattgttgttgcttttgttttgcggcagatgatgacatatagagtaggacatcattctacatcagatgattcaactaagtacagggcggcggatgaaatccagtactggaaaatgtcgagaaaccctgtgaatagatttcggaaatgggtcgaagataacggatggtggagtgaggaagatgaatccaagctaagatctaacgcaagaaaacaggtagagattctgaaaaccgctacgttatattaatgttgagattgaaattattttaaccgttttaatcggttgtgtgtgttttgtagcttctgcaagcgattcaagctgcggagaagtgggagaaacaaccattgacagagttgtttaatgatgtatatgatgttaaaccgaagaacctagaagagcaagaacttggtttgaaggaattagtaaagaaacaacctcaagattatcctcctggctttcatgtttgaatctagaggaactgtgtggttaaaatacctcattctcatatatgatgtatcatgtccatatcgacttctcattgcagactatttatattgtccacgtatcgaatagtaatcaagtatcaatgtagagaccagcatttggagcatcatgaaatggccttgagaatgttattttcatggtccggctgacccttaaccggttcaaactggagtaaatgagtgaatgttaatgctcga

SEQ ID NO: 147257 - DNA, 832 bp, Arabidopsis thaliana landsberg
atgacgggttggaggcttggatatcttgctggtcctaaacatattgtggcagcttgcagtaaattacaaggccaggtatctagatataaacatatttctctctaaatctgtatcgaaaaaatgcagcgatcatgagatgaaatcggttctggtttttgttttaaggttagttcaggagctagtagcattgctcagaaagcaggtgttgctgcgcttgggttaggcaaagctggaggagaaacggttgcagagatggttaaagcttatagagaaagacgagatttcttggttaaaagcttaggtgatatcaaaggtgttaagatctctgaacctcaggtacctctccgtttatctttgaagctattactggctagtttcttcttcgtctttttcttgattgttggcattgtttacttgcagggagctttttatctctttattgacttcagtgcttactatggatcagaagctgaagattttggtttgatcaatgattcgtcgtctcttgcactatactttcttgacaagtttcaggtaaacttcgtctacaaaatgttcttctttaccttcaagaagcacaaaacagctcttgaacatagacttgagaaagatttggacatttttttgttctgtttttaacaagttcatatgtttggctctgtttgtttaaaaggttgcaatggttcctggtgatgcttttggagatgatagttgtatccgaatatcttatgccacatctctcgacgttcttcaagcagctgttgagaagatcaggaaagcccttgagccactccgtgccactgtctccgcttaacaagtcggacacagaaat

SEQ ID NO: 147258 - DNA, 1982 bp, Arabidopsis thaliana landsberg
gttgttgagctatcatgattattttcaacgagggaacgtgggattgatcgagaatcttctgccattagcgttgtcttcttctaagatcttgggggaggacgtgacaatctctcaaatgaatggtctagagaaaggtgatgtgaaattggtggattcttcaggggatcgcgtcgattactatataagagcatctattaaaaacgccttctcaaaggtaatagaaaacatgaaggccgaaatcgaagaaacagaggaaggagaagaagaagcggcaactatgttgcttcggctagctaaggagacagaggatcttgctttgcgcgagagcgagtgttttagcccgatacttaagagatggcacttggttgcagctggagtcgcctcggtttcgcttcaccaatgttatggttccatcttgatgcagtacttagctggtcgatcgacaatcactaaagagactgttgaagttctgcaaactgcggggaagctcgaaaaggttcttgtgcagatggtggcagagaattcagatgaatgtgaagatggcggtaaaggccttgttagagagatggttccgtatgaagtcgattcgattatcttacgactactaaggcaatggattgaagagaagttacaaacagttcaagaatgtttgagcagagcaaaagaagctgaagtatgtttattaaagctttacttgcagttcaagtatacaaaatgtatcatctatacactcaatatttttttctgtagacatggaacccgaaatcaaaatcagaaccctatgcacaatctgctggagagttgatgaagctagcgaatgatgcaatcgaggagttctttgagatccctattgggattacagaggatcttgttcatgatcttgctgaaggattagaaaaactcttccaagaatacaccacattcgtagcatcttgtggtaagtgaaaggatacaaatttctcatttcatacaaaccattggttactaattggtgattgttttgttttttgtcaggttcaaaacagagttacattcctacgcttcctccacttacaagatgtaaccgagactcaaagttcgtgaagctttggaagaaagccacgccatgtgctgcctcgggagaagaacttaaccaaatgggtgaagctccaggtggcaaccacccgcgtccttccactagccgaggaacccaacgcctctacattcgtctcaacactttacatttcctaagctcacaacttcactctctcaacaaatccctctcactcaacccgagggtcctccccgcgacgcaaaaacgctgccgcgaacggaccaaatcatcgtcttatttcgaattcactcaagcaggaatcgaatctgcatgccaacatgtctctgaggttgcagcttaccggttaatcttcctagactcatactctgtattctacgaaagcctatacaccggagatgtcgcgaacgggaggatcaaacccgcgttgcgaatcttgaaacagaacttaacgttaatgaccgcgattcttgcggacaaagcgcaagcattggcgatgaaagaagtcatgaaggcttcattcgaagtcgttttgacggttcttctcgcgggaggacattcccgagttttctgtcgaacagatcacgatttgatcgaggaagatttcgagagtttgaagaaggtttattgcacttgcggcgaaggactaatcccagaggaagtggtggatagagaggcagagacagttgaaggagtgattcagcttatgggccaaccaacagaacaacttatggaagactttagcatcgtgacatgcgagtcaagcggaatgggtttggttgggacaggacaaaaacttccaatgcctccaacgactggacgatggaacaggtcggatccaaacacgattttgcgagttctttgctatagagacgatcgtgtggctaatcagtttttgaaaaaatcgtttcaattgggtaaacgaagatga

SEQ ID NO: 147259 - DNA, 678 bp, Arabidopsis thaliana landsberg; identical to SEQ ID NO: 49516

SEQ ID NO: 147260 - DNA, 458 bp, Arabidopsis thaliana landsberg
gcaggatgaggatgatgaagaaaatgaagaagaggagggaggtttgagcaaatctggtaaagagttgaagaaactgcttggtaaggctaatggtttggacgaatctgatgaagacgatgatgatgattctgatgatgtaagccctcttttgacatattttacttcttaaaaaattgttaaattttcaatcaaactcattttatctggtttggatacacgcaaatcatcatgaatgtcattcttaggaggaggagacaaactacggtacagttacgaactcaaaacagaaggaggcggcgaaagaagaacctgttgataatgcacctgcaaaacctgcaccatctggacctcctcgtggaacacctcctgcaaaaccatccaagggaaagagaaaactaaacgacggcgattctaaaaagcctagcagctctgttcaaaagaaagtgaagactgaaaat

SEQ ID NO: 147261 - DNA, 1280 bp, Arabidopsis thaliana landsberg
tttctcatacagcaaaaatgttctgaagagggctatactatgactactatttccaacgccaagaggatctatggagaaaaaatgctttgaaaaccttgcctgctctgttgaattcatctaatatgctggcatgtggggaggatctgggtctcattccatcttgtgtacatcctgtatgtgctctgttttctttctcttggttcatccaacttctttataaaacttgtgtagaagcatatgctaaaattaatagttactcaggttatgcaagaactgggattggttggccttcgcatccagcgcatgccaagtgagtccgatgtgaagtttgggattccgtctaattatgactatatgacggttagatatttttcctcagacttctgtctttcttacttatagcttcctaccgttcattttctgagaattttgtaatgggtgagtgattcactgcattattcaaactatcgtcttaatatttcaggtgtgtgctccttcatgccacgactgctctacactgcgagcttggtgggaagaggacgaagagagaagacaacagtacttcaaggaagtgattggtgtagatggaatccctccaagtcagtgtattccagagataactcatttcattctgaggcaacatgttgaagctccatcaatgtgggctattttcccgcttcaggtaatcatcaccactgtccgacttctcagatttattagaactttttatgaggctcaataacagtatgtgttgtttgtttttttcctctggaacaatttaggatatgatggctctgaaagaagagtacactactcgtcctgcaacagaggagacaatcaatgatccaacaaaccccaaacactactggagataccgtaagtatttactactaactaacacacaatcctaagaactataccagtgactgttttttgtgcatataggcgtacacgtgactttggactcgcttctaaaggacactgacctgaagtcaaccatcaaaaacctcgtttccagcagtggaagatctgttcctgctaatgtttctggtgaagacatcaacaaaagccgaggagaagttatagccaatggctcgactaagccaaacccataaagcaataagccttctgatttcctgtttggttccacatatgttgcttattagttattatcattatcactcaaaatagtacaagctctcaacatcattgtccataagacataaaactctgtatttgttgttcctgtccaaaataaaatcctcaattttcggtgttaa

SEQ ID NO: 147262 - DNA, 677 bp, Arabidopsis thaliana landsberg
  unsure (1)..(677): unsure at all n locations
tgtcagcttctatgttgctgataccgccaatgcttcagcacacatcatttgctgtttggtttgnatatggtgcaaggttagtctctttggtntgttctgaatattcgaaaattttccctgccaagtgatagtaacgacaactcttactttagaatatgttccaccatcatatccatttcattaacaagtatacttttgaaatttccccacagtgctgtatgcccatacttggcactggagacatgtaggcaatggcgcttaagtaacaaaactgtggccttcatgcgtaacgggaaaattcctactgtaaccattgagcaagctcagaagaactacactaaggtaagaatttcagtacacgttcttaagatgttttcacaagtctttgaccttaaggattcttaaagactcatcttttagttgttaaaaaattatagaggattctgacttacacatggcttatcttgcaggcggttaatgcagggcttcttaaaattctttctaagatgggaatctcattgctttcaaggttccatttatctcctctaatatattctatcttagatttttacaactactgacttaacatttttctttgttcagttattgtggtgctcagatatttgagatatatggtttgggacaggatgttgtgatctgcatcacggaagtggtca

SEQ ID NO: 147263 - DNA, 588 bp, Arabidopsis thaliana landsberg; identical to SEQ ID NO: 50091

SEQ ID NO: 147264 - DNA, 676 bp, Arabidopsis thaliana landsberg
cctctctttctctctctttgctaaaggtatttgaacaagaagaaaacagcagaagaaatggaacaacactatcagaacacttcatccgttgattacagcttaaaggaaggagaaaccattgttctccaactcaaaaatgtaagatttacagttattgtctggatacatttcccacaaggtttctttttgtttttcacatcaaaatgattgaaacagagaagcgataaagacagcaagtcaaaaacggtagagaagagtctgggcaatctctcgttggaggataaaggcaagtcaatagaaaccaccattccttcaatcatcctgccacctccacctccgggaccgctttcccctgtcacaactgctcagaagtccccgtcaagtctgccgccaagcctcagcctccaaagatcgtctgaacaacaagatttagatacaaagcgagaagaagaagaagaagagaagaaagaagacctaaaagccaaagatggaggggttgaagatgcaccagatgatgactttggagatttccaagctgcgggttgatttaaacttataatcttttttaccatacacaaagatcgttttataagtaatgtgactgatcaaagtttggattgtttgctactgagagcttatcttctgtacaattccaaaatacaagcctatttctctg

SEQ ID NO: 147265 - DNA, 324 bp, Arabidopsis thaliana landsberg
acaagttccgagccccagatgtgatgaccaagcccaagtttctctccttcgaccaaacgtgaaccatttgagcatttttcacccttgttcttctttttttcactgtccctgatcagagtatcctttatcggcactcataaattatctaaaaatgggtactaataatccaaaccccataaaatcagaattgggagcataatatcagaggagctttttttctctaaattatatgcacataaaatgatttaagcatagtcggcagccttttcgtatccgaaaataaacgtcgagtgactatgtacttcgatcgagtgttttgatgct

SEQ ID NO: 147266 - DNA, 594 bp, Arabidopsis thaliana landsberg
gatgtgacttttcacactcgtgttctggagaacaacaagcaatgggacgcagaacaatgcatcatcctgacatgtagtttcactccgggctcatgctcttcgacgtcatataagctgacgcaagccggttatgaatggggacggctgaacaaagacacaggcagcaatccccacggttaccttcccacccactacgagaaggtccaaatgctcttgagtgaccgtttcttcgggttctacatggtgagaacacacagtaaccccttgatttttgtgtgtttgcccttgattgatagatattattttattatatagcactgaaataatgagacattgttgaatgataggttcctgagaacggaccctggaactacaacttcatgggagcgaatcacacggtgagcataaactacagcttgaaactcggaacccccaaggaatactatcaccaagtccatcgacccactcatttcctccagttcagcaaaatggaggaggatggtgacctcgatcgtgatgactcttttgcttaagacttttttggatgtatggtgtatattgagtttgcaaattgttaatgattagactgaaaag

SEQ ID NO: 147267 - DNA, 1424 bp, Arabidopsis thaliana landsberg
actgcagagaagcaggtgttaggaatctccagaaacagatcgagaagatttaccgtaagtaagttttgctacaagactccgaattgattcctcaagccctcaatgtcgaacaccatttacttttctgttgtagattgcacttaaattagtgcgtgaaggagcagtccccgaagagccttcagttgcaagtgatcctgaagaagctgaaatcgtggctgatgttggcgaatccatagagaatcatactgtcgaagaaaacactgtgtcctctgctgaagaaccaaaggaagaggcccaaaccgagaagatagctattgaaaaggttatgattgatgagtcaaaccttgcggattatgtaggaaaaccggtattccatgcagagaagctctatgagcagacaccggtaggtgttgtgatgggtctagcttggacatcaatgggtggttcaacattgtacatagagacgactgttgtggaggaaggggaaggtaaaggtggcctgaatataacgggtcagctcggtgatgtgatgaaagaaagtgcacaaattgctcacacagtcgccagaaagatcatgctagagaaagaaccagagaatcagttctttgcaaactccaagcttcatctccatgttcctgcaggagccactcccaaggatggtccaagtgcaggctgcaccatgatcacatctttactatcacttgccacgaagaaacccgttaggaaggaccttgcaatgactggagaagtcacactaaccggaagaattcttcctattggtggggtaagtaactccggacttctctcactctattctattagagcctctctttttttttccttttttgacaatgtacacaaaaatgttacaggtgaaagagaaaactatagcggcgaggcggagtcagattataacaataatatttccacaggcaatccggaaagactttgataagctggcgagaaacgtgaaagaagggctcgaagttcatttcgtggatgaatatgagcagattttcgagctagcctttggctatgacaaacaagaagactgagaacacacataagccacgttgaccttctgtcatctgttgttgtctccatttaaacaacactaccattcttgattctctttgatctttttcttccttcaagaagaaagttattctgtaactttttttttatgattagggtaatttattggtggttgaattttattattttggtatataaccaaagccaaatatcataataagacatcagaacaaagtaaaaaaaacaaagttgtttctcattttgtgcttgtaatttcatcaacatattcgcgtattactttcactgttgctatgtgttcgatcacacttcataacagactagtaacttgttggcataattttctgttttatattcctttctactggatt

SEQ ID NO: 147268 - DNA, 427 bp, Arabidopsis thaliana landsberg
ccgtattattccaaaatttggtgaaagcaacgcctaaagcaaaaatgtctcttctctaaccttttttttttttttttgctctccaacttccccttcattttctggggaaaagcgagccaaaaaacgcaaaagcgatccacaagaagcaattgttcgatatcaatggggaagaacaataagatcggaagcgttgttcggatccgtcagatgcttaaacaatggcagaaaaaagctcacatcggatctagcaacaacgatcctgtttccgatgtacctcctggtcacgttgctgtttccgtcggtgagaatcgtcggagatacgttgtccgtgctaagcatttgaaccatccgattttccgacggcttctagctgaggctgaggaaaagaaaggattcgctaacgttggtccgttagcgattccttgtg

SEQ ID NO: 147269 - DNA, 695 bp, Arabidopsis thaliana landsberg
ctaaacttcactgacattaaaaaaaattcaaaacctttcaaaaaaaccaaaacatcaacaatgttcggcgtcgtcttccccaatcgaagtttccctatagacatctcaaccttcactcaaatcgacacattccactgggttctcgacatgaaccacttcgtcggtaagtacccatctcccagaaaccaaacttttcaaaaccctaattcccaaaatcaaaaaccctaatcgaaaaatccaatctttttctttttttacaggtgaagcttatgatcaaatctcagagatgtgtatcttcttgttaaacaatttcaatcttccaccagataaagctttagctgtttatgttcaatctccaggatcagcttttgtgttctgtggtgctgtaactttagctagaccttctgctgttttatcacttcaatggcctgaacctggtagtgcagcgaagatgcaactcacggcgggtgattcgagttccttatcggcgaagatcggtgtttcggtggaggatgtagcagcgttgaggtcgttggatgttgttgcggagaggaggattgagaaattggctatgaaagttggagagaatttgtttaactttatgcagtctttttgtggtgttgatggaagtaaattggttgttcctatggatattttggatcgttgggttaagaagtttcaggagaaagctaaac

SEQ ID NO: 147270 - DNA, 420 bp, Arabidopsis thaliana landsberg
ctcctttcttcttatttctgagcaaagttttttcttcctttcatattgtgaggatgtccaaaaccaatatgaaattttgcaatagttattttctggtcgatccgaccaaagcaagttttcttgatctccttttgcttttgttttcctccaacctgaccagtgcaagattcatcgattctcctccggatacgcttaaaggcttccggagaagtttcgcgagtcgatggatccttgcgttggccatcttccttcaaaaagtattaatgctcttaagtaaaccttttgcattcattggtcaaaagctcacatattggctcaaccttcttacggcaaatggaggcttcttcaacttgatacttaaccttatgtcaagtgagaaaaattaacaatatagcatacctttagttcggtatatttaac

SEQ ID NO: 147271 - DNA, 761 bp, Arabidopsis thaliana landsberg
  unsure (1)..(761): unsure at all n locations
gatccccctcgaggatgttgttagctgcaatcgatgaaaagaaccaaggactttacacctttctctntttgcccattgatttcaaggtaaaatagcttngngnttcaaagttccaaaatcactaactgatacaacgagcggttaataaatctttggttttgcagaacaaatgcaatgtgggctatgcattcatcaacatgctcaatccagaactcatcattccattttatgaggtttccttccctctccgctttctttcttatacttttagctaagatcactcgaaaggtgaactaacaaacatccaatatttgcaggcttttaatgggaagaagtgggagaagttcaacagtgagaaagtagcttcattggcatatgctcggatacaaggaaaatctgcccttatagcccattttcagaactcaagcttgatgaatgaagatatgcgttgtcgtccaattatcttcgacactcccaacaatccagagtctgttgaacaggtaaagttactctttggtctgaaagttaatgctaaaccttatggaagttaatactgcataatatagttagcgatgatctttagacttattactcggattaagtagctatggtattcttgttcttcataggttgttgatgaggaatctaagaatatggacctcctcgactctcagctcagtgatgatgatggcagagagagaagctgacacaggagttgagagacgactcaatgttgtgataatggctgttttttttctttc

SEQ ID NO: 147272 - DNA, 1196 bp, Arabidopsis thaliana landsberg
ctagttacatatcttcaacaaagtgaatctcatgaggatattaccgaaaagcggaggaggtgctctttgcctcctctttgtgtttgctctttgttcggtggctcattcccttagccgtgacgtcaaggttgttggcgatgtcgaagtcattggctactcagaaatcagcaaaatcaagatccccaatgcattctcaggtctagtatatcaatatatgctttataatcttatcaacggtgatcacgtccatatatatatgcatgttgtactaatgctacggtcgataaatgtcccttctataggtctatataatttgattgattatgcatatataaagacactcttctcgtaacttaatataattgaattttctttcgttgcaacgtttgtttgaaataggacttcgagttacgatagaatgcaaggcggccgattcaaaaggccattttgttacgaggggaagcggagaagtggaagaaacaggaaagtttcatctgaatattcctcatgacattgtcggtgacgacggaactctaaaagaagcttgttatgctcatcttcaaagtgccttcggcaacccttgtccggcccacgatggccttgaggcctccaagatcgtgtttctatcgaaatccggcgcaaaccacgttttgggtctcaaacaaagtcttaaattctcaccggaagtttgcatctcaaagttttggcacatgcctaagttccctttacctcctccgcttaatctcccaccgttaacgtttcctaagatcaagaagccttgtcccccaatttacataccaccggtggtgatccctaagaagccgtgtccaccaaaggttgcacataaacccatctacaagccgccggttcccatctacaagcctccagtgcctatctacaagccaccagtggttatccccaagaaaccgtgtccaccaaagatacacaagcccatctacaagccacccgtgcctatctacaagcctccagtggtgatcccaaagaagacatttcctccacttcacaagccgatctacaagcacccggttcctatctacaaaccaatcttcaagccgccagtggtggtgattccaaagaaaccatgtccaccacttcccaagtttccacacttcccacctaaatacattccacaccctaagttcggaaaatggcctcctttcccttctcatccttga

SEQ ID NO: 147273 - DNA, 650 bp, Arabidopsis thaliana landsberg
gacaagaagatgattgatggtatgcttctgcttattgttgagaaagtcgtgcaagaaatcgaaagaggtggattcaataaagttggatcagctccaccttcaccgtcatcggagtttagcgatgatctatgggctactatctgggaagttagtaatacagtgttgaaagatatggagaaagagaggaagaaggagaagatgaagcaatacgttcaatctcctgaagtgatggagatgtgtaggtttgctggagagattggtattcgtggtgatttgcttagagaacttagatttaaatgggcaagagagaaaatggacgacgctgagttttatgagagtttggaacagcaacgtgatttggataattcgattagggaatctgaaactgtggatggagaagtagaagaagaagggtttgttccttctgatgaagttgaatctaggagtatctcccttcctaaacgaaaggggaagttgaagtacaagatctacgggcttgagttgtcggatccgaaatgggttgaaatggctgataaaattcatgaagctgagcaagagcctgattggagagagccttaccctgtgactggaaagtgccaattggttatggagaagcttgagtcgttgcagaagggagatgatccttcaag

SEQ ID NO: 147274 - DNA, 810 bp, Arabidopsis thaliana landsberg
tcccaatcctagatcctctgttttctcttctctgtttgctttcattttctctggattcggatctgaccactaataaattattatcgtttcagacaacaaaactcaaagatcgaatctatcttttgtccttagagtctggaaaaagcagctctcttttgatctcctctttagattcttcaaagctttagatgcttatctctctttctctctcagattccatttgaataaatgccattttgacagatcaaatatctcccacttttctctctctctctctctctctctctctctgtttgagctccaccattatcgaaaactctgtttttttctttctttcttgattcgatcaacaatcgttgaaaacatgaacagaggaatcgaagttatgtcaccagcaacatatctagagacatcaaactggttgtttcaagaaaacagaggaaccaaatggacagctgaagaaaacaagaaattcgaaaacgctttagccttttacgacaaagatactcccgacagatggtccagagtcgctgccatgcttcccggtaaaacagtcggagatgtgatcaaacaatacagagagcttgaggaagacgttagcgacatcgaagctggtcttataccaatccctggttacgcctctgattcattcacacttgattggggtggctacgacggagcaagcggtaacaatgggtttaacatgaacggttactacttttccgccgccggaggaaagagaggatccgccgcacgaacggcggagcatgagaggaagaaaggtgttccatggacagaagaagaacacag

SEQ ID NO: 147275 - DNA, 1595 bp, Arabidopsis thaliana landsberg
cttagtgaccaaacccaaagaaaagtagtgagaaacaaaatcgaggtaactactagatgaagacgatgaagcaattgaatattgctgttgcggttgtagtgacggttcttattggaatgttgggatcatcggaggcacaacttcaaatgaatttctatgcgaagagctgtccaaacgcagagaaaatcatttcagatcatattcaaaatcatatccacaatggtccttctcttgcagctcctctcatccgaatgcacttccatgattgcttcgttagggtactatttaatctctaatccacatttctatttttacttgcaagtgttagatatgttcgtactttatgtacatatataaattaataatcacacattaaaatcaacacatttgaacttcttttttaataaaaatggtaatttgatagtaaattttagctagagcagagtatttgagatttattgcattctttttaatattgacactgattgtttttttaaaagggatgtgatggatcggtgttgataaattcaacatctggtaacgcagagagagatgcaccaccgaatttaacacttagaggattcggtttcgtggaaaggattaaggctcttcttgaaaaagtgtgtcctaagactgtttcttgcgcagatatcattgctttgactgctagagacgcagttgtcgccaccgtaagtgttacaaaactataaactcgtgacttaattcattagttacgcaaactaattgtaattataatctaaaatttgacagggaggtccttcatggagtgttccaacgggaagaagagacggtaggatctcaaatttgaaggaggctacgaataacattccacctccaacgagtaatttcacgactttacaacgacttttcaaaaaccaaggccttaatctcaaggaccttgttctgctctctggtacgttcattaacccgaaatagccaaattggtctccggtaggtttttataaccggtttactatttttttttgttcaggggctcacacaattggtgtctcacattgttcttcaatgaatactcgtctctacaacttctcgactacagtcaaacaagatccatctctcgatagccagtacgcagcaaatctaaaggctaacaaatgtaagagccttaacgacaatagcaccatcctggagatggatcccggtagtagcagaagcttcgatctcagttattataggcttgtcttgaagaggagaggcttgtttcagtctgattctgcattaacaacgaactcagcgacgttgaaggtgatcaacgacttggtcaacggttctgaaaagaagtttttcaaagcttttgctaagtcaatggagaagatggggagagttaaagtgaagactggctcagctggtgtgatcaggacacggtgttctgtcgctggaagttagtaagcttggtcggaatgtggtgtgttatggtcattgttgttttgtgtgactttcggaaaaaacaaatgttgttaatttaattttgttgttgtttgatttgtgtttatgcacccaagaatgatgtgttatggttcaattaatatgtgaatcatttaaatttccaataa

SEQ ID NO: 147276 - DNA, 4320 bp, Arabidopsis thaliana landsberg
atgcctggctcggcttttatccctctgagtctggctgctgcgaggaggagagagtctggtggtgaaggaggaacagttggtgagaccgcttggaacatgagggcaatgtctagagccgaaggatcattgcttaagttcatgaaggaagagatccctggagttacatcaccaatggtgtatgttgctatgatgtttagttggtttgcttggcatgtggaggaccatgaccttcatagtctcaattacttgcatatgggtgctggtaagacttggtacggtgtgccaaaggatgctgctctggcttttgaggaggttgttagggttcatggttacggtgaagagctcaatcctcttggtgagtatgataagtgttatgtgttagtgactcatagttactcaatgtatcaattcattgttctgattgttggctttgttgtgtctctgttctttttgttgcttttaaatgcttttctttccctccaaaagttgtcaggggtagaagctgtatgcaagcaaactaattggttatgcctcttacattgttgtcttattagtgacattttctactcttggtgagaagacaactgtgatgtctcctgaagtatttgttaaagccggaataccgtgttgcaggtaatggttttttatgtttgtgctctgtttatctcatcatcttgttgtttgcatgtctcttctttggtctcttataattggcacactttttcttcttctggtttttcacgcaagtggtttttttgtatcaggttagtgcaaaatcctggagagtttgtcgtcacctttccgggagcttatcattcgggatttagtcatggtgagtaagcgacctatatttagtatctttaagtcaaccattcaaaggcctagtatgttgaaataacttatattatccataaaaacaatcgtgggggttgtacaggatttaattttggagaagcatctaacattgccactcccgaatggttgagaatggctaaagatgctgctatccggcgagctgctataaattaccctccaatggtttctcatctccagctactttatgactttgtattggctctaggttctaggtactctttcttttctatagacacactcaaactttttaagctgcttgaagggctcatataaggtatgtttcactcattgcagagtgccaacaagcatcaatcccaaaccacggagttctagattaaaagataaggcaagaagcgaaggagaaagattgaccaaaaagctatttgtgcaaaacattatccacaacaacgaattgctttcttctctcggaaaaggatccccagtggcccttctcccacagagttcctcagatatatcagtttgttctgacctgcgaattggatcccatttgataaccaaccaggaaaacccaatccagttaaagtgtgaggacttaagttctgatagtgttgtggttgatctcagtaacggtttaaaggatacagtttcagtgaaagaaaaatttacatctttatgtgaaaggagcagaaatcacctagcaagcacggagaaggacactcaagaaactctgtctgatgctgaaaggaggaagaatgatgcagctgttgcgctttcggatcaaaggcttttctcttgtgttacatgtggagtcttaagctttgattgtgtagctatcgttcaacctaaagaagcagctgctagatatctcatgtctgcagattgtagcttcttcaatgattggacagctgcttctggatctgcaaatcttggtcaggctgcaagatcacttcatcctcgtaagttacaggtcgcactttcggttattggctgttatttagcatttactaactttttttcatcatgcaggaaccaaagagaagcatgatgtaaattacttctacaatgttcctgttcaaactatggatcattcagtgaagactggcgatcaaaaaacttcaacaacttccccgacaatagcgcataaagataatgatgttcttgggatgttagcttcagcatatggagactcttctgattccgaggaagaagatcaaaaaggcttagttacccctagttccaaaggggaaacaaaaacgtatgatcaagaaggttcagatggccatgaggaggctagagatggtagaacttctgattttaactgccagagactaaccagcgaacagaatgggttaagcaaaggcggaaaatcatcacttctggaaatagctttaccatttattccaagatctgatgacgattcatgtcggttgcacgtgttttgtcttgagcatgctgcggaagtggaacagcaacttcgtccttttggggggattaacttaatgttactgtgccatccaggtaacatcaaaactacaagattcattttattagtatttctgtatcagttatgcaattctttagtctttttcatcattttgacgcacaacatttgcagagtaccccaggatagaggctgaagcaaagatagttgccgaagagctcgtcatcaatcacgaatggaatgatactgaattcaggaatgtgacccgagaggatgaggaaacgattcaggcagcgttggataatgttgaagctaagggtgggaacagtgattggaccgtaaaattgggtgttaacctttcttacagcgctattctcagtcgctctcctctgtacagtaagcagatgccgtataactccatcatatacaaggcgttcggtcgcagctctccagtagcgagctcaccctcgaaacccaaagtctctggtaaaagatcgtccagacagaggaaatatgttgttggaaaatggtgtggtaaggtttggatgtcacatcaggtactattgtctaacctgaatccatactaattcagacattagtacacttctgtttggttcaatttgcttttctttcttcaggtgcatccctttttgctggagcaggacttagagggggaagaatctgaaagaagttgtcatcttcgagttgctatggatgaggatgccactggaaagagatcgtttcctaataatgtttccagggattcgacaacaatgtttggaagaaagtattgtaggaagagaaagataagagcaaaggcggtgccacgcaagaagcttacttcttttaagagggaagatggagtttctgatgacacatcagaagatcattcttataagcagcaatggagggcttccgggaatgaggaagagtcttattttgagacagggaacacagcttctggtgattcatcaaatcaaatgtctgatccgcacaagggaattatcagacataaaggttataaagaatttgagtcagatgatgaggtttcagaccgttcacttggggaagagtatactgtacgggcatgtgcagcttcagagagctcaatggagaatggctctcagcattcaatgtatgaccatgatgatgatgatgatgatatcgacaggcagcctagggggattccaaggagccaacagacaagagtttttaggaatccagtttcatatgagtcagaagataatggcgtttatcagcaaagcggaagaatatccataagtaataggcaagctaatcgaatggttggtgaatatgattcagcagagaattctttggaggaacgaggcttttgcagtacagggaaaaggcaaaccaggtcaacagccaaacgaatagcaaaaaccaagacagttcagagttcgagagacacaaaaggtcgctttttgcaagaatttgcatctggaaagaagaatgaagaattggattcatacatggagggacctagcacacggcttagggtgagacatcagaagccgtcgagagggtctttagaaacaaaaccaaagaagattggtaagaagagaagtggtaatgcttccttctccagagttgcaactgaaaaagatgtggaggaaaaagaagaagaagaagaagaagagaatgaggaagaggaatgtgcagcataccaatgtaacatggagggttgcacgatgagtttcagttcggaaaaacagttgatgttacacaaaagaaacatatgcccaattaaaggctgtggtaaaaacttcttctcacacaagtatttggttcaacaccagcgtgttcactcagacgaccgtcctctgaaatgtccatggaagggatgtaagatgacgttcaagtgggcttggtctagaaccgagcacataagggttcacacaggcgctaggccttatgtttgcgctgaaccggattgtggtcaaacattcaggtttgtctctgacttcagccggcataaaaggaagaccggtcattcggttaagaagaccaacaaaaggtga

SEQ ID NO: 147277 - DNA, 2627 bp, Arabidopsis thaliana landsberg
atggcgcataaaggtggtggcaaaggcaaggaaatatcgatgacacgtaagcagacgggaaatcttaaaccgagtggagaagcctccaaatctcttttttctctctctctctccaaaggccaccacaatctcttcttctgtgtatgtattctttttttctccgatattcgtcgatctctcaaaaatatcctcaaagctaaaaaagcaagagtagagataaccaaccaacaaactcataggaagacatatttactttcaggtctttcttctactaccttttccgtggtttttggttgattgattctcagatgagattttttcccgaatcatttgatgtcttttttttaaataagttcttggtaaatcactgtttctactagcattttttgttttctcagcttagatttgttgtttgatttgacatcttatctgattgagattttgttcttctgaattgttgttacagggtttagctgtttgattcagcttcgatttagtgtacagtgtgttgattagtataaaaaggatttaaaagaatctgggagatgtgtatagtgattgttcttgctggcgaatgttaacactacgtcgtattgattctcgattggtagaagaagaaaggtgttagttagattgtccgttcgtctagttggggtttagtaacggttcctgctattaattgcttctggatggctagttcatcttcatctgagagatggatcgatggtcttcagttctcttccttgttatggcctccgccacgagatcctcaacaacataaggatcaagtcgttgcttatgttgaatattttggtcaatttacatcagagcaattcccagatgacattgctgaggtactataatacctaatgagtttaataagagtattctcttaatagtgacgttttgattcatgtataatttatctgtatcaggtggtccggcttcagtatccatcaactgagaagcgacttttagacgatgtgctgggtatgaacttctctatcaacatttatgatccacacttctctttttgtgtgtgaatgtctatctgattttcggtttctgatgaaacagcgatgtttgtccttcatcatccggagcatggtcatgcagacattcttccaatcatttcatgtcttattgatggctcgttggtgtacagcaaggaagctcatccgtttgcctctttcgtatctttagtttgcccaagtagtgaggtatataatagctgtctagtatcatgcttactgatttggtgtaacctataccattttgtgctaacatgttcactatcctaacagaatgactattcggagcaatgggctttggcatgtggagaaatccttcgcattttgactcattacaaccgtcccatttataaaactgagcagcaaaatggagatacagagagaaattgtctgagcaaagctacaactagtggttctccgacttcagagcctaaggctggatcaccaacacagcatgaaaggaaacctttaaggcctttgtctccatggatcagtgatatactacttgctgctcctcttggtataagaagtgactatttccgatggtaagtagactctgttactgatgcttctatgtgttcatgcgccggcctccttcttttattttggtctctctgctgaggtctatgtattgaggttctgtagtggattaagcttactgacaactaaaaatgttgcttattatttacaggtgtagtggtgtaatgggtaaatatgctgctggagagctcaagccgccaaccattggtgagttcaagaattccatgttaatatcccctggaactggattttgatgataattctgatcaatagagttgttctatcacttcgttcataaatgtgtatccatcacctgtggctatagaatgtgttttgagttgcttcctataactttcatgttgtcctactttggcagcttctcgaggatctggtaaacatcctcaactgatgccttcaaccccaagatgggctgttgctaatggagctggtgtcatactgagtgtttgtgatgatgaagttgctcgatatgagactgctacgctgacagcggtcgctgtccctgcacttcttcttcctccgccaacgacatccttagatgagcatctagttgctggccttccagctcttgaaccatatgcacgtttgtttcataggtattgtttctgagcttaccctttcaattagggtttattggtagtagtctgttgctagttttaaggttgtgcttcctcgaatccctagatcagaattgttttctcactttcctgttttactgtcagatactatgccattgcaactccaagtgctacgcagagacttcttcttggactcttagaagcaccaccgtcgtgggctccagatgcacttgatgctgctgtacagcttgtggaactccttcgagctgctgaagattatgcatctggtgtaagggtaagcgtaatatgaatctcttaattaccctccagaaagctaattgtgtcccttgttataaaaaaagtcagctttggtatgtcatcaaagaaatcagctttgatcacattctttgtcttggtgccgctacccaggaactggatgcatttgcacttcttgcgggct

SEQ ID NO: 147278 - DNA, 1441 bp, Arabidopsis thaliana landsberg
ggaacctcccagacccatcaatgcttctctctacctttgtgactatcaagttttacacggaagctttgaatgaattggtggagtgggatgacaagtttggtttcattgtaatggatggaaacgggactctctttggaactcttagtggtaacacccgtgaggtacttcacaagttctctgttgatcttccgaagaaacacggaagaggaggacagtctgctcttcgttttgcccgtctccgtatggagaagcgtcacaattatgttaggaagactgctgagctcgccacacagtactacatcaatcctgctacaagtcagcctaatgtgtctgggctgatacttgctggttcagcagatttcaagactgagttgagtcagtctgatatgtttgatccccgactggctgcgaagatactgaatgtggtggatgtatcatatggaggagaaaatggttttaatcaagctattgagctgtcagctgaaatcctggcgaatgtgaagtttatccaagagaagcgtctgattgggaagtactttgaggagataagccaggacacggggaagtatgtgtttggtgtggaagatacgttgaacgctttggagtctggtgctattgagacactgattgtatgggaaaatctagatatcaacagatatgtgatgaagaacagtgcgactggtgaaactgtgatcaaacacctgaacaaggaacaagaagccaacactgagaacttcaaagtagccgacagtgacttggctttggacgtggaggagaagctgtcgttactgaagtggcttgacacaatgagtacaggcgttttggttgtgcgctagagtttgtgaccaacaagtcacaggaaggttctcagttttgcagagggtttggaggaatcggaggaatacttcgttaccagcttgacatgactgcctttgattccgaggatggagaagctcttgataatgattcggaatgacaatcaatcaaatcctcaccatcgctggttggggaagatggcgctccggcatgcctgaaccagcttgcgcgggctgtcggggtcgcgctgaagaatttgaaaataaattgaagaagcatcttttgtgaaggtaaaagatcgatctctttaaacttaggtttcttctttgaaaaccctaccttaatctcgatactggtgttaaaacaggtgatgaatgaaggaaaatgtggagagtgaaaaagccttggctttggtagcgttgttggtgcctagatatttatggagttttattttgagttggtgtttctttaataatttactttggtcagtttttatttcagaatttgattactcttgtctgagagaatcgctttaatgatttgggtttttattacatggatgtctttaaaaccttaattaaatcctaaattctataaattcaaagaattaatctaaaattcggca

SEQ ID NO: 147279 - DNA, 3104 bp, Arabidopsis thaliana landsberg
  unsure (1)..(3104): unsure at all n locations
aatttttcaaactcatgaatgaggtagagaatgaggaccttgtttttactttggagaccatcgtagataagtttggcgaagagatggctccttttgcttttggattatgtcaaaatctggtaagaaaaattggttctctgagttgatatttcttgaatactcaaacttggtaataaatatgtatttctgcctttgcttttgttcaggcggctgcgttttggagatgtctaaacacgtcagaagccaatgacgactctgatgacatgggagctttagctgccgttggttgtttgcgtgccataagtacaatccttgaatctgttagcagtctcccgcagctgtttgttgagatagaaccaactatacttccaataatgcagaaaatgttgaccactgatggccaaggtatactcatatagttttgggatatagtttgtagactccgagtataattaagttatagttgtgtccagaggatgtacatttggactgatttggtagccaactagccatttgggtccattacattagtatggttttttttttcagaattgtataatccatttttttgttctgtcagccttgtgttgtgttgtagcatcacgatcttaagtttattaatttccttttctagctatttctatttaataattgacactgaagcatctatattctcatcctatttgctattggcagaggtatttgaagaagttttggagattgcatcatacatgaccttttattcacctagcatttccttggatatatggagtctctggcctttaatggtggaagcattggttgattggggaatcgatttctttccaagtatggtttctctcacatacctctaaatttttctagactttggattttatagttgactccatcacggtagcacttccacgtcattcatttttttgcatacgttcactcacgttactctttgaaattttagatattttggttccaatggacaactttatatcaaggggaacggctcattttctcacttgcaaagagcccgactatcagcaaagtctatataacgttctttcaactgtgagtatatcttctgatagtgctagtgagttagatgtctgtgcttgttgattgttgtaaggaactgtcaggttataaaattcttgcaaatatcatgtagcatagaatcttcctttattgtttaacaaaattttcgagttcattttacatgcctattgtggtaaaaagttgttggcatcttgtttattgtgaaaacactaggaatactatatgttacattcagtactacatgccatttttttgctaatatatatataagcatctcttatgtttttccgcacaaggatagcttatatatgtctcacgtttccacttctacagcttatgaccgacagaaacatagaagacagtgaaattgagtctgctccaaagcttattgaagttgttttccagaattgcaaagggcaggtggatcagtgggttgaaccatatctgcgtctcactgttgaccggttacaacgggctgagacttcgtatgttaaatctcttcttatacaagtggtaagaactatgtggaggatttgttgacctgctactggttgatttctacttaccggtttatgctcttacattagaggagatatgtatgtcaatgtcactgtatgaatcaagtgggtcctattgaactgattctgttgtgtgatgaccacaatgatgggttgaaatttccaagtttttttaatagcaacagcaccagcgttatataccatgaagttctcaacataatatcttgatttctgttcgcaggtggcaaatatgctttactacaatccaggtttgacgcttggtgtattgcataacacaggacttgcttncaaagtctttgacctttggttccagatgttgcagcaaaagagaaaaagtggcctgccagcaaacttcaaaaggtactgttgatgatttttgttatgtcacatcttgttcatgttaacttataagcgtaatggttggaaattctattgttcgctttgatagctgataaaggggttgttactctcttggtaccagggaacatgataaaaaggtttgctgcttgggtttgacttcattacttgctctccctgggggtcaattccccgatgaagcgctgcagcgtgttttcagggcaacacttgatcttctagttgcatataagaatcagctagctggtatgtcctgctcatgagtcatgatccattttctcttcacttggcatggtaatctttacatttattccctttccaatcttcctcgcagaagcagctaaggagacagaagtagattatgaagaagaaatgaatggactccagagtgatgatgatgattatgatgatgatgggtctgatggggagatggatgatacagaggaaggagatgaagcacaaagtgttaaactgcagaagttagctgcacaggtttgtgaagtgtttgtatcgacttgcttctgcgaagcatggtttttttttgctggctttgactgttttccaattcgtttatccttttcataggcaaaggccttccactatgatgatgatgatgacgacgattctgatgatgactttagtgatgaggacgagtttcagtcacccatcgatgaggtggatgcctttgtattctttgtcgatgcaatcagaggtaccattaaataaaaatcctatggttaccagttttgaccacataaaatgctatatggagcttcatgttctctggcgtatcttgcttagtaatcacgtccttgtttattatacagttatgcaggcatcagatgcgcagaggtttcagaacctgagccagtcactggacttcacttaccaggcgattgcaaacggaatagcacagcatgcagagctgagaagagtggagatcgagaaggagaagcaaaagaagttagcagctgcttctactcctgttactgctctatgatttttaagctttggatcaaagtcagagtctgatacacagatggtgtcatttttgtgagagattctcgttcaataaatatttggcatagtcgcttgcttaaaggttattcaaatgaagaagcagattttgtgaattttagc

SEQ ID NO: 147280 - DNA, 983 bp, Arabidopsis thaliana landsberg
tccctaacaagcacatccctcacagattccacactccaccatctgtcctctcttccaaacctagtcagtctcggagtccgagatggagttttgaccagcaatggtcttgagaagtttagaccacctaacaggctaagaacactcgacctccaaggttgttggcttttaaccaaagatgatattgctggtctctgcaaaaggtaccctcacatcaaggtgaggcatgagcatgctgactcttcttctctcgaccagaatcaacttcttcctcggtcatctactccacagagttttggaaaggtagcaaggaggaacaaccagaggccggagagttctgttgctgttcccaggagttttttaggtacgcccttttctcactaacgtgctttattataacaattcttgataaggaagaagaagggctcaaagtttaaatgtgtgatatgtgggtacagatcagagggtgaagtacaatagggaagagttggttgctctacaaaattcgcctttatcacaattgctgccatgggaagaacttgtcagtgtaccggaacttcttgctgattccgtgatttgaagcaaatggggtgaacaagttggattttagtaccacctgaatgaattagtagagatcttagcatgtcttgttgacagatttggcctcattttcttttcctcaaaattgtatgacgtctgaaatagacacagtacacggtatgttttagcagaaaatattgtattctttgcagtgttatcggatattatttcccttttcaaacatgtgacctgactaaatttacgaagaatattaataaatagtttccgaaaaacatatactgagacagcgccatgtattttaaaattttattaaaaagaaaagttagatagcattctttttttttttttttggcaaagagatagcattcaagtatagaacataaaagtaaatttccaaaaaaagatagaaaagaaaaacagtgtag

SEQ ID NO: 147281 - DNA, 3257 bp, Arabidopsis thaliana landsberg
ttgttttggttccactggtgaagcttcaaacatagacgagtatctatggttaatgggcagagcacattacaaacccgtaatcgagtattgtggcggaactgagattggaggcagttttatctcaggttctttgcttcaacctcagtcgctggctgcttttagcacagctgccatgggttgcaagcttttcattctcgatgaagatagcaatcctattgtaagaaactttatggtctcatagatgatacagtatttcttctgaaagatcttacagtatgaaggttgtgtgatatttcctttccttcctcgttttagcctccatatgctgcaggagtaggcgaattggctctttgtcctcacatgtttggagcttcaagcactcttctgaacggtaatcacttcaaagtttacttccaaggaatgcccaccttccaaggacaggtaatccaacctttgtcatatttatacagaggttttcatctgttttaagtctgtgccttgcctgcttttcgatagatcttacgaagacatggggatttatttgaacggacttcaaaaggatactaccgtgctcatggacgtgctgatgacacaatgaatcttggtggtataaaggtagccttactgtacatcttcgtatatagtattgaaatgcacaagcctaacgcattgtcatcataatcatattctgtgttgattgttattgtgcaggtcggttctattgagatcgaacgagtctgtaattccgttgatgacagtgttctggagacagcagccattggtgttccacctcctagtgggggtcctgagcagctagtaatcgctgttgtgttcaagagcccagaattttcaaatcccgacttgaacctgttgaagaagtccttcaactccgagatacaaaagaaactgaatcctttgttcaaggtttataccaaaaacaaaacacaagagagttgaagttgttgtgtggctaatgtgaatgttttttttcatctggcaggtatcatctgttgtgactcttccttctctaccgaggacggccacaaataaggttatgagaagagttctaaggcaacagcttactcagaccggtctaaactcgaagctatgaggcaatttctctctaataccaaatgttgggttttgccattcacaggaaacaatatttggtctttgctgtaagaatccacatccatgtctgtatcaagaaatgattctcaattcacataaataagagtggagctagtgtacatacatctagtgagatccttgtccctcaatttgaatctcaactttggttatgattttatttcgtaacaaaaaccatattaaataaaacttgctatccaaaacgcaacagaaaacaagaattatcaaattcgtttatcacctaatagtaacaagcttttgaccatgtaaaaaaagaaaattgatgattggggtgaccaattaagaggtgtactatttacttatttacgaattaggggtgaaattcgaatattttactagatacatggacataaacgcgaaaagacgaaagatgaggggggaagtaaattatctaatgtacgccaggcggcgcaagatagaacgattcgcttatctttcccttatttcttttctcaggggatacagagagaagccaaagctaatagaagcacgaacggcgtcgggttagtccgacggaggaaccatgtcctcgtctcttcttctctccggttctactgtatcttcttcgtttatcgctccatctaagccgtaatattctctctctctctctcccttcatcttattttcaaattactcgtggaatcgattttgggactttctttgtcttccttctactcggaagcggaaaattcggatttgttaaagtttagggtttgtttatgtaagttccagaaattgattgaattcgcaagagcttttgttaatcgtgttgttgttgtgttctgaatttcagttctctcgtacgaaattccagtaagacatcactgttaccatttcgtaatgtttcgagaagcttcaaaaccgtcaagtgcaccgttgattcttcatatggaggtatttgtcacttcttctctctcaatttataaaaacccttttctcaatttgttagttgctattaggaattggtcgtttcttatccaaaaatttcaacttgtgtggaacaaatggagtatgttaggattctttaacaacattgacttctcagtgaagaatcataagctggcttagcgtttccactttgtgtgtttcacttatctttctcaagttttgagctttttttgttgttgctcatgtctagctactactctgaatgagaagtgatattacatgtttctgtttcactcataaacgaacgactctgtgtaggcaatgttcccacgttccctcggacgagagtttgggacccgtacaaacgtctaggagttagtccatatgcttccgaggaagaaatctgggcctctcgtaactttcttttacagcagtacgctggacatgaaagaagcgaagagtctatagaaggagcctttgagaagcttctcatgtctagttttatcagaaggaataagactaaaatcaatcttaaatcaaagttgaagaagaaagttgaggaatctcctccgtggctcaaagctcttctcgatttcgttgaaatgcctcccatggacactattttcagaagacttttcctctttgccttcatgggtggttggagtatcatgaactctgcagaaggcggctcctgcgtttcaggtttgttactttatacaatggcccttgagtttctcttctgtcttgttcacatgtatgggttctgaaatcttttgttgtacttgtaggtggcggtatcattggctgcgtgcgtatattttctgaatgagaagacaaagagcttggggagagcttgcttaatcgggtaaaatactactagtcctatcgaattagctgaaacgaaacttaaaaggtcactcgtttttttcatgatttgtttggctcttatgattgcagaattggagctttagttgccgggtggttctgcggttcgttaatcattcccatgattccgacgtttctcattcagcctacatggacactcgagctcctaacatcactggtcgcttatgtgtttttgtttctttcttgtactttcctcaagtaagttacgttgtggttttatccaaactctttttgttcttttcgcccagacatttacagaacctttcggaaaaattagtgaaagttgttaagtg

SEQ ID NO: 147282 - DNA, 4524 bp, Arabidopsis thaliana landsberg
atgaggaagaggaaaccgtcgtttgcttgtatgtctcggagaattacgtgtgctgatgattataataaattaaaagtaagagagtcaaatatttgtttaaacaagaaaacggtaagaaggatgagaccaggttttgtggtagaacaagtccgggagataagatagttgcgtgactaggaaatggcgtgtctacacaagggcaccttttgatttcgatcatataacaaagaagtagataggcctaaaagagcccatggtatgtatgtatgaggcagctattgtgaggcctatatatgggcttacctcattgtccatttgtttccaaattattcatatgatcaacgatagatgatcaaatgaagatatatttctaatacatttagttttatcattgtcaaaatatatatttctacaaagaaactttacaacatgatcggattacgtgaaactaaaaagagggaagaaacttgatagagacaaagaggagccttttgttataatcatattagttatcccaggctgagaaagtgatgattcctccatgcatttaaaaaattgtaggtacataaagaaaagaaaaaataaataaaggtggtagatagtggagcaacggccaagagtaagataacattctatatctctaaagttgcaagttgggttatatttaactaaaagtggaaatactaaaaggggaaggcaatcataaaagcataaccgaatagtcaaattgacgagtgtgttggacgattctgttcttctacccctctgatctctcacaggggatcaaatagttttgatacatagagccacaacagtgacattagtgtgttgttgactactgtaagggttgggttttgaaaagagacatgaaggagtgttattaggttgattgtcttcaagtacctccagtgtcaaacaaacattgacgattgattctcttcccataatttattgttatgcattacatatcacagtaaacggactttcaagtcaacaccgcatttatttgccctcttcattgtttcacgtacgtaatcaaggaccaagggattttgttcttttggctaccatggccacaagatgcttttggtgttggaccactttgctcttctgctctcagctgcttaccggctttgcccgagcttcctctgcaggcggcgccaaagagaaaggactctcccaaactcccacctgggccgttgccctcgtctgtacctttttcattcttgtctccgtccttctcgagaaggctcttcacagagttgccacggtttgccctgaattaccttttttctttcttccgcatgtgtatcccccgcctctaaaatttatttgtctctttctcagtggttgtgggagaaacataagaactctctgcttgaagccttggaaaaaataaaggccggtaagaccagagaattgttttctcctaccgtatttggttaaaaaaactaagatatatgaaatggatgcagagctgatgattctaggattcatttccttgttgctaaccttcggagagcagtacattctcaagatttgtattcctgaaaaggctgcagcctctatgttaccttgtccagctccttctactcatgaccaagacaagacccaccgcagacgtctagctgctgctacgacctcttcccgctgcgatgaggtcatctctagcttcccttgtactaaaaaatttacgctctagctctatctctctaacacttttttgttgtccgcagggtcatgaaccactcatacctgccacgggtttgcaccagctacacattctattgttcttcatggctgcctttcatatcctctacagtttcatcaccatgatgcttggcagactcaaggtacgacaagccctgattttcttatctcaaactttcgtaatcctagctattcatcattttctgtaactgcagatccgtggctggaaaaagtgggagcaggagacatgttctcatgattacgagttttcaatcggtaggcgagttcttattcattaaattaaacctttgttttataggttactaaagtggctcctctctatgcatagatccatcaagattcagactcactcatgagacgtcctttgttagacaacattccagtttctggacaaaaatccccttcttcttttatgctgtgagaagcatgcatttacttcttcttgagcatgccctcgtggcatcaagtttgttgattaaaaattgatttttgctcgctctctcaaccatctgatttacaggggtgcttcctacagcagtttttccgatctgtcgggaggactgactacttaactctgcgccatggcttcatcgctgtaaggcaaaactcaattctctcttgtatttgccttccactaatggtgtgatgcttatgggtgagtctcctttaggcccatttagctccaggaagaaagttcgacttccagaagtatatcaaaagatcattggaagacgatttcaaggtggtagttggaataaggtacgtagcacaaaacagtgctagagctagtactgcgttgagaggtgtttgttgacattgctgatactgtactgtgcagtcctcttttgtgggcatcatttgtaattttcctacttctgaatgttaatggtgagtcagctttgcatttgcttgctcttttaccaagccattggttattgttctactgaataaattatcccattcctgtttaggctgggaagcattgttttgggcgtcaatcctacctgtacttgtaagacaagttatactcttgagcgaatcttatactgtgtttgtatgtctcatttttacaaccccttgcagatcattctagctgtcagtacgaagcttcaagcgatcctaacaagaatggctctgggaatcacggagagacacgcagttgttcaagggatacctctcgtgcatggttcagataagtacttttggtttaatcgccctcagttgctacttcatcttcttcacttcgccttatttcaggtacttgcattgttttcagttccaaacaaaactaccattgcatgttacatatacttgtcttcaacttttgtgccatgctgtctaaatgccccttctttttgtatagaatgctttccagctaacatacttcttctgggtctgggtaacaacatctctctatattctatgcgcaatacactagttgtttgccttttggaccatgtacatattctcttctattgatacaaatgacttgatacatttcgttaatttggcatgcagtattcctttgggctaaaatcttgctttcacacggatttcaaactagtcatcgtaaaactctctctagggtaaaatttattcttattcttctctagtgaataaactaatagatatatctctcttggaacgattagctcaacaagtttgataaatttgcagcgttggagctttgattttgtgcagctacatcacacttcctttgtatgcactagttactcaggtacatttatcctaatttcagcctttactctccagatatttgtgtctacgaagctatatagtagtaactaagcaacaaacttatgttgttgttgtgggcagatgggttcaaacatgaagaaagctgtgtttgatgagcaaatggcaaaagcgttgaagaaatggcacatgactgtgaagaagaagaaaggcaaagcgagaaagccaccaacagagacccttggtgtttctgacactgtcagcacctctacctcatcctttcacgcctctggagccactctactccgctccaagaccactggtcactcgacagcctcttatatgagtaatttcgaggaccaaagcatgtctgatcttgaagctgagccattatcccctgaaccaatagaggggcacactctcgtcagggttggtgatcagaacacagagatagaatatactggagatattagtcctggaaaccaattctcctttgtgaagaacgttcctgctaatgatattgactaatattcaaaatgaatgcagaacaaatccatcatccggtctttattttctattacatgtatgccaacaattgcttcgccaagtgttaccaactaggttttctgtataaggctgtattttagagctcttacgtatctaaagaaaaagtaaagcgatacataacaggtcggcccagataagtattacatcgtgcaactgactattactgccagaatctatcaaaaaacaagacacggactttgataaagattgtataaagaaaggattaaaccgtagctcacgctgatcttttacaatatctgatataaacagactcactcaggttcttcctcgtcatcagtgtcacctccaaacatggaagccattttcatcgctaaatttgcagctatttccctcctctggaaatcaggcatcaatcgcaagttgtcccggatgtttcctatttctgacatcaactgttccacatcttcaaactcgtaacatttttcattttctgtgcccaaaggtgtgtcatcaagaactatagctctgtcagagtcatttagcagctct

SEQ ID NO: 147283 - DNA, 1322 bp, Arabidopsis thaliana landsberg
gcatttccagtgcagaccttatgatccattcaacgacttaaccagtcctatccaaaccatcctttgtgaagacagcaaccaaagcatgtactgtcagttactagccggtctgattcaccgtcacaaggtgatgcgtttaggagcagtctttgcttcagcgtttctccgtgcaatctcttatctcgagaagaaatggagtcagctctgtgaagacatccgcaccggtagtctcaaccccatgatcaccgatccaggttgccaaatggcaatgtcttgtcttttaatgtcgccgaatccagagttagctagcgagatcgaagagatctgtgggcggtcgtcgtggaaagggattctgtgtcagctctggcctaaggcaaagttcatcgaagcagtagtgacgggctcaatggctcaatacatacctgcacttgagttttttagccaggggaagattccattggtttgtccaatgtatgcttcctctgagacttactttggagtcaacgtggaaccactctccaaaccatctgacgtcgttttcactctcttgcctaacatgtgctacttcgagtttatccctctcggcaaaaacgggacactctcttttgatctagacgacgatgaacaagtcccctgtgataaagtcgttgacttggtcaatgtcaaactcggccgctactatgaactggtcgtcacaactttcgcaggtatttaaagaaacgttcttttaattagtgttttggattggttgatgattgattcatgcgcaagcaggattgtaccgttaccgaatcggcgacgttcttcaagtggcgggtttctacaacgaagcaccacagttccggtttatctgcaggagaaacgtggttctaagcatcgacttagacaaaaccaacgaagaagatctacacaggagcataacgttagccaagaagaagcttggaagcaacgcattcctggcggagtacacgagctacgcggacacgtcatcagtgccaggtcactacgtgctattctgggagatccaaggtcatctcgagccgaaactgatggaagagtgttgcgttgcggtggaggaagagctggactacatatacagacagtgcaggacgaaagagagatcgataggggcattagagatcagagtggtgaaaccaggaacgttcgagaaactgatggatctgattataagccaaggagggtcgtttaatcagtataaaacgccgagatgtgtcaagtccaacagtgcaacgttcaagctcttgaacggacacgtaatggcttctttctttagccctcgtgacccgacttgggttccatga

SEQ ID NO: 147284 - DNA, 587 bp, Arabidopsis thaliana landsberg
aagagaactaaagaacaccaacaacaacaaaaacagaggaagaaaatataaaccaaatttttcttgttgcaatcattagaaattaaattcaattcttcgattcttccgagctggttctcgaattgggtttgctgcaaattgtgaatccaataaaatttgttcgtgttgttgtgttgatggtgatttgttagggttgatccgatcaaaatttcaattttgtatcgtaaaacgatgaggtttctaagcctcgtcggaaactcattcggttgttctgcgtccggcgaacgcttagtatcagcggccagagacggtgatttacaggaagctaaagctctcttagattacaatccaagactcgctcgttactctacttttggcgttcgtaactctcctcttcattactccgccgctcaaggccaccacgaggtaactgtaattacttgaaagatcaatactttgtgagattagagattctaaagttctgacttttatggtgattggtgatttgggttttgtttatcttcagatggtttctctgttggtggaatcaggagttgatattaatctccggaacttaccgtggacag

SEQ ID NO: 147285 - DNA, 1013 bp, Arabidopsis thaliana landsberg
aaaagatggcactgttatcgttgccgcacgcacaggcatggatggacagataaaggtgtgccttcttcctgtttcccatgtgtgctttatgacttagtttacccttttcacttcctctgtgcaggtctcggagagagatgaaagggtgatatgctacatagttaattctgctgagtattgccacaaaacagtaagcttgttcttgtctattattctgttttcttgcctttttcacatttggcaccctcagcatatacgttgatacctgtgtatcctgttgcgacggatcaatggggttgtatcatatggtccaatcttcttttaggccagtcatgtagaaaaagccagtttaaatattgataatcttcgcatcaagttccaagaaactttcatgggtctagttactttctcgatgtgtttgtgatgtgatcttcctccactgcactgaacttcatatcttacacctccaagttatcaattttaccaattcaagcgtagttgtgaaaggtttatttgcaacttttcttatatatttgtgtcactcatgtggtacattttcaaaatattatttgctgcctctatactaaacaatgtaatgcaagctgttatgttgttctgggatacaagatgtgtgcttatgttagtaggattctatctaaaagttttgattaagtgaacaacaatgcggcacttcacaaggactatttgctgtttgtatcgcagtctggtgaactggcagaaaacgtctcagaaattattgacccacattatgctgatggtgtagacatgtcagaggtccaggtacggattacatgaaagactttatagttttcctttatataggatagttcttaagctgtgctgctgtgtaggatgaattttcagccgtcataacgaaagcattggtaacgctggtccttggacttgagactaaatttgacacagaaatggcagtgatgacacgtgttccatggagcacacttgagagtgttggtgaccagtctgggtaagat

SEQ ID NO: 147286 - DNA, 1786 bp, Arabidopsis thaliana landsberg
atgcagtcaagaggtttggtagatactgagaaacaacaacaatccacaaactttgcagttcaaagagattatgaaagagaaaattctgcaacttccaaccatgcaatgtcatccagaacgagagttcagtcttcttcatcttcatctaaccaggtatatcaatccccgattgtgattatgaaacctgccaagcttgttgagaaggctggtattcctgcgtcatcccttattcccattcacagcctaactggcatcaagaagatccgtagagaaaaacctgatgataaaggaacttcagcaagtaatagtaaacgggtgacaaaagattgtagtcctggaaaccgaagagctgaatcatgtaccagctcgtttgataagaaatctgacagcagaaatgtgcggtcttcttcaaaaaagcctcagcaggtttccaaagaaagtgcttcaaagagttcaggatctgtaagtccaagattacagcagaagaagcttgagtatgataagcgttcacggccaccaacccctcctgattctagcaaatcaaggaaaccgtcaaaccaacaacttgtggaatctacttctcctggtggcagacgtagacccaagggtcagaagagtttgcagcaagttgatgaccaacttagtcaagcaagcaatgaatctaggacgtcaagtcatggcatttgtactcaatccgaaacagaagcctctgcttgtgtagaaaaatctactgaagctgatggtggtaaaagtccatctgtaatcgaggcagccaaagctgtagtctctaacttaatgcagaatgtgagttctgactctcatttatatttctttagtgttagatgacaaatttttttcacttagttctcacaaggtttgtttttattttgttttcagaaatccagtccaaggtttagtgaagatggattgtcagctaacctttcactagttgctttggaacatccaagtcctatttctgttctcgacgcttcaacgtacagagagactgaaccatcacccgtgaagacacaaggtaacaaagggattctatctctagtgtcctagtggtcatcaactatcacagtcataaaataagaacttgcaaacatcaaagtcactttaggattctatgaccaggagttaactcttacatttgtctgtagcttgtttagtttgggaaagtttctcttttacgatttttttccaatgtaaggattgggtgttcagttccttccatttttgactcagagctgatcatgtgataggtaatgttgcccatgattttggtgatgaaaattgtgaggaccagtggaatccagcatacagtttctcagaaaccacatcaagcttttcgccagagataaaccgtaagaagctacagaatgttgagcacttggttcaaaagctcagacgattgaactctagccatgatgaagccagccaagattatattgcatcgctctgtgagaacgcagatcctaccaccgatcatagatacatttctgagattctattagcctcgggtcttctcctaagagaccttggctcaggattgacaacgtttcaacttcacccttctggccacccaatcaatcctgagctgttctttgttcttgagcagacaaagggaagcagcactacgcatctgttacacaaagaagaaagtaaggttctgaaaaatgagaagctcaacccggaacttgtgtttgatctcgttaatgagaatctggtggagaaactagcgtcagttgaagccacgacgaatccattgatgaagtcatatgct

SEQ ID NO: 147287 - DNA, 2408 bp, Arabidopsis thaliana landsberg
atgactggtggtaccagtggtggaatggaagcaaagtctaataaatgggatgataagaaaattgaaggttagtttgacaccagctggtttaaagcctcttcacttctgatgtattttcttagaacagatatttgtttgtgcaggtttgaagaaaaataaagaagattttgaacaacaactagaaaatattggatctattcgagaaatgcaaatgaaagagtctgaaatatcgggtaaaataagtggacttgaaaaaaagattcagtatgctgaaattgagaaggtaacaaccaatttatcttttctaagatgagtggtctcatatattttacttactgttgtcaagagaaccctgattgggataagaatgccatacagtagcacccattttatctttccttctgctaggaggagctgtcactattcagaatatactaattggggaatttgtttaacagaaaagtatcaaagacaaacttccacagcttgagcaagaggagcggaatatcattgaagaaattgatcgcataaaacctgaactctctaaggcaattgtctatcttttctgatatttggtagagttaatacctgatgaaaatagtatgactgaatgtcattggtatttaatgtaggcaagaactgaggtcgataagagaaagacagaaatgaataagttggagaaaagaatgaatgagatcgtggaccgtatctataaggattttagccagtctgttggggttccaaacatacgtgtatatgaagaaactcagctcaagactgctgaaaaggaggccgaagaaaggctggaactgagtaaccagcttgctaagttaaaataccagtatgtctcttctgctctgtttttctggttacataccaactacacatttacgatgttactctcttttgatttcttttgcccgtttttgtgctaacatatagctctgattctgaagttaacatgccattcctgatttttcgttttttgtaaaactaaacactatcttgtgcatcatattgttgtcacattttgactttcacgtgcctactaaaaagaagggactacggaactgtgtgaattttgtaattattatgcagctatggtctactctatcttgtattaccaagtgtgtgagggtcagtatcctgtagcctgtaaaaacctgtgttacaaacctctactacacgctaactggttggctgagttgacatactgctttctattgaatggagcttgagttgtatgatcagagtaaaagtaagtaatttagttggttcatgaaaaacattttttcgaatttcaggctggaatatgagcaaaaccgtgatgtggggtcacggattcgaaagctagagtcttctatcagttctctggaaactgatttggaaggtatacagaagacaatgtctgaacgtaaggagacagcggtaaaaattactaaggaaatcaacaattggaagaaggaaatggaaggtatattgattctatctttacatacatctgatgacatttttagttctatacttttttttaatctcagtgccattttgagttgtcaatttgaggatttcattcgtagcagacattatcatgaacctgtaaaagtacattgtctgtatctatgttggagctctgttactgaattgatatattcaaatatggacttttctaattctttttagcggttatatctatggatatctacatgctgttttcaaccaattgtctgtttgcattacataatccttgatgtttggttgattgctctttgaacaaattttgagatgtacatggtctgctcgacatcttgcgtaaatgtatggttatgctacgtctgaatctaattcagaaagaaactcatatcatgataaactgcttgaggctgacagatggttgatgtgaaaattcagtatgattaattctgtagcgctgctactctcttcattgcttttgcttgtataagcataagttacagaaccatatactttgattataaccttacctgtctaatgttctttgcctagcaagaatctgcactggtatcttctttcttagagactatctaatgctcctgcttgcagagtgcaaacaaaagtcggaggagtatgagaaggaaatcctggattggaaaaagcaggcttctcaagcgacaacaagcataaccaagctcaatcgtcaaatacattcgaaggtacaatgaagattcatctaaccctttcctaaagatctgatatgtttgagtatagatacactaaagcttccatattctatcaggaaacacaaattgagcagctgatctcacagaaacaggaaataactgagaagtgtgagctcgaacatattacccttcctgtcttatcagatgctatggaggaagatgattcagatgggccacagtttgacttta

SEQ ID NO: 147288 - DNA, 875 bp, Arabidopsis thaliana landsberg
caggaaagttccacactttcggcaacttgaagtagcagcacgatttacattaagtccagagaggatgggagcagtagagcttatgagtgatccatcgagcttatgcacagtcgagaactatgtggacaacgttgatttatctgatacgcaattggtgcagaccgtgagaaaggctcttacatctgtcaaaactgtgagtgttgtgcaagttttgcttcttcctctgcttatgtgtttacagttatatatatttgatgctatattatctgttatgcttcttgatactagttttattaattctttgctaatgacagggggactcagacctttatagtgagatggttggagttatggcacgggacatcacagaatttaaggatcctgatgtagtggcgcagcttgaggtgtgctctattctttgtatggcaatcaattctttcttatttgttctttttctgtttgctaaagtgttttcatttttcaattgaactggcagacagtcttgaaagctctatcaggcgctgtggcttgcatagatgtccttcaccatcaaaagcttctttctgcggtaagtttctattgcacgagcttacaattgcttccaatttaaatagttttaagatggatcctcccaaatcttaccctggatttcatcccaattgttatgtctagctttttcgaatgaaattgtgggaccacagacctgatgtcatggatgcattggtgaaccttgtcatatcactggtacacaactcaacatttacccgcctattgttattagtctagatgaagagctagaccatttaacttttgccttttttccatcgcaggctgtcactagtggaaagtatttagactcttgtctgaatatgctc

SEQ ID NO: 147289 - DNA, 729 bp, Arabidopsis thaliana landsberg
atgaatttgatattagttgcccggaagcatttaatgaccggtgccagtaaccagacgtttcggactatgttaggtgagacaatgaatagagacacatcaataaatgtcaccgatacatatacttcatataatctaaagtatttcttgaaaaaatctaacatgtgaactaatgaaaatctatcaattacaacattaaattcaacgatatggacttccatcttcttgataacgatcttcaaaagtaagtaagacagcaaacctatttaatatttttaccttattattccccaactagttccttttccacttttaaccatcaccctataagtggttataactagtaacttgaaatagaaacactctatctctaaaagaggcaaccaaacaaacaaggtctagctttttataaccaaactctgcttctgaacagagttagtcaaagagagagaagccatggaagctatgaaggagactgtggaggagagcttgagagagatgagagagacgtttgcgagtgggaggacgaggagtctgaagtggaggaaggcacagatcggagctatatacgagatggttaaagacaacgaagacaagatctgcaatgctctgtttcaagatttgggcaaacacagtactgaagcttttagagatgagcttggtgttgtcttgcgaacagctactgttgcaatcaactgtcttgataaataagccgaccccaaacatgtaaga

SEQ ID NO: 147290 - DNA, 577 bp, Arabidopsis thaliana landsberg; identical to SEQ ID NO: 44730

SEQ ID NO: 147291 - DNA, 2947 bp, Arabidopsis thaliana landsberg
ttctatgcagatcatggagtctttctacttctgtgatctttttagctttatcatctcagaaatctgataaacaactcaacaaaaaccctaatatttctcagttggccgatgtcacttctctggctccggtagcaccaccaccgccgctacaagtaagccgtctcttgctttcatcttctctttattgtatattaagttcgtatggttgatatgatcgtacgttaccatcaaataaaggaaattaattttgatagtactattagaaactcactaaagatcttggatgcatgcaaatgaagtctttttttttttttggatcaaaatattatacacttgtaattgattttaataagttgaattttcacgtttataaatttgcatacaataagttgtcgttttcagtagttgccacaaagatacaataagtgaaacagttagacgttattttccaataatgttgtaaatacttttttttttttagtgtaaagtaattttcattatattctcatgtgtaacgaaattattactttatgctaacaatttgttaggtgttttaagtttatgggccaagaatatatttatagaaccaaaataataatattaagacccaatctgtaaaaagcccaaaatgtttaaattgtttctttcttcaacagacgggaaagctagcgagtgcggttcacgcgcggagaacgggaacgatcggaaaatggttccaccaccgagaattcgtcggcgggaaggtctccgccgtaaagaagagagatagagttcgcgtggagaaagctcatctgcattccgccgtgtccattgcgtctctggcgacggcaatcgccgcagtgaccgcttcaggcaatcaagacggcttcgctggatcaaagatgagctcagcccttgcctcggcgtcggagttgttagcttctcactgcctcgaattggcggagcttgccggcgccgatcacgatcgcgtcgtctctgctgtccgatcagctgttgatgttcgtggacctggcgatttgttgactctaactgctgcagctgcaacaggtacattgattgtttgacttcaattctcaatccttgattgtttcgctctattgaatttgactagtccattgtagttttgagttgatcattcaattatgattctcggtttttcgataatgtagcattgagaggagaagcagctttgagggtaagactaccaaaggaagctaagaacagtgcagctataagcccctgtgagagagttttaccagagactcatagttgctcttctgagctcgatcgcactagcacgaccgatgaactcatatctgcaaaaggagttgaagaatcaactggagagctaatgcagtgcacacgaaacggtaatgtttcagtaagagcttctttactaattgttgtgaatgatgatgatattataattcaagaatcaattggaaacaaaaaaatttcacttaccacgagattgatgaattgactcatggactttccaggtgttctgcggtggaagcatgtaaaagtgtacatcaacaaaaaatctcaggttaaacatcgaatactcattgaagctaacaaagttatatgctggttgaattctagagttgaattttgctcggtttctcttttgcaggtcatagtagaaatcaaaagcaaacacgttgtaggagcattctccatgaaaagcaaaggttagtgagctactcttctttctttcaatgtctatggtgttcatttgtataagcagagtgatcttgggactttgtccaatgctttacaataatccagtggttgaatcactacaggcattgtaaatgatgtatgcgagacagtctcaggcctgcaaaatggaaaagacacggaaaacacagaagaagagctctatttcggaatcagtacagggaaaggtctgacaaagttcaagtgcaagagcaaggctgataagcagacatgggtggatagcatccggaatcttctccatcgagtaactgctgttgaggtcgacacttctcttgaaactataaacattaacgatagcacataaatcatgatgtcttgtgttaacggtgttagtgttggttattttcattacaagccaatgatatgtattgtttcaagaacatatacatatctgcaagtaggtgtagtgtttttcatcttcgtcacttgtttttatttcagtcaaattgtaaacattgttttgtggaaataatgaagaagattataataaggcttgatgaatctcaccggagaaatgtccatgtgtttctccatggcttcttccccgatgacaatcacggtgagtttctctgtcacttctgcatacttgattttcttctgtctttctaatcagttgtctatagtctccagtaaagactcgaaaaaacccagaatcatgcgtttataagataaaaataaccaatagtcagtaaatgatgacttaaacataagaatctttcagagaaaaacggataaaaaagtactagtatcacaattgctttaacttcgttcagaaacagtaaagagaaacgactagtttggttgttacctctttgatttcttgttagtatcaaccttcgaggtccgggttttcttgttagtatcaaccttagacgtcgaggcttcttcgattcttctctgtgttttctttggccgagtatcttcaatgtctttaagcttgtagtaatgaggagctatttcaattagccactcaggcttcatttcagttgtatgcctcatatattccttggtagtaagtactagttcatgatacaccaaccacttactaggtgacgccccaaataagcctgagttagggtgtacataaactgtctgaggttctttgactcttctgtacgatccattcttttgtaactttgcagaatgcgggaagaatccggccaagattgctttctttattgcgtctaaatcattcgggttggaa

SEQ ID NO: 147292 - DNA, 3658 bp, Arabidopsis thaliana landsberg; identical to SEQ ID NO: 34234

SEQ ID NO: 147293 - DNA, 1688 bp, Arabidopsis thaliana landsberg
gttttcctgttttttttctccttcctctcctctctctctctggtttttttttgccctatccatagggttttcttcgctctctatctcctcgatcttcatgtgcatctctctctttggtataatcggagctaattcgttcgttttcttcttcatcttcgtcggatctctcttttttgctctttcccacgggttttcgcttgagaaatcaagcgttttcgtttttcctgggagttttgagctcaaatcatgtctcagatctttagttttgccggtaagcttcctgatctctgaattttttttcatctttgaatttgatttatcagattgaatttttttatttctctgttagatttagacgtttccgtgtttgaggtgatttacgtacgaggaataagatttggcttataggatagtgttcaccgatgacttgattcttcctagatctatatatatatatatatatatatatatatctatagatctgagttttagttttggccgttgacgagctatagatcttatctgcaatttctctgttttggtatattggatctgagaatcattaggttaatttactgaatctgattttgattcaatgatctctttagctcataagaatttctcctttggtattttacaggtgaaaatgatttttaccgtcgtggcgcaatatacccaaacccaaaggatgctagtcttttgttatcgcttggtagtttcgctgatgtttatttccctccaagcaagagatcacgtgttgttgcacctacgatcttcagtgctttcgagaaaaagccagtttccattgatgtgctaccagatgagtgtctttttgagatctttaggcgtttgtctggaccacaagagaggagtgcttgcgcttttgtctccaaacagtggcttacgcttgtaagtagcatccgtcaaaaggagattgatgttccttccaagataactgaagatggtgatgattgtgaagggtgtttgtctaggagcttagatgggaagaaggcaacagatgttagattggcagcaattgctgttggaactgctggtcgtgggggacttggaaaattgtcgattcgaggtagcaactctgctaaagtttcagatcttggtcttcggtctattggtcgtagctgcccttctctcgggtctctttcactgtggaacgtttctaccattactgacaatggacttttggagattgctgagggttgtgctcaacttgagaagcttgagctgaaccgctgctctacaatcactgacaagggtttggtagctattgctaagagctgccccaacttgactgagctgacattggaggcttgttcaagaattggagatgagggtttgctagccattgcaagatcctgctccaagctgaagtcagtctcgatcaagaactgtcctcttgtcagggatcaaggaatcgcctctctactgtctaacaccacctgttccttggcaaaacttaagcttcagatgctgaatgtcactgatgtgtctcttgctgttgtgggtcattacggcttgtcgatcactgatcttgtgctcgctggattatcacacgtgagcgagaagggattctgggtcatgggaaatggtgttgggctccccaacctaaactctctgaccatcacagcctgacaagagtgactacatggggcttaatcgtgaaagggcgc

SEQ ID NO: 147294 - DNA, 596 bp, Arabidopsis thaliana landsberg
  unsure (1)..(596): unsure at all n locations
gctaatcatttgcaactccgacgaacgattcatcttctccagcaaggtaaatcatcttaatcnattctcttcccttcgattgaatgtctcaaaatcgatttcctggttttcaaaatttctaatccctttatctttgctattgaatacgaaactgatttaccaattcgcttttgaatctttgaacagtagatagcaatggatacttcaagtccttcagcttttgtgaacggagctttgttgaggagattcattggccaaaaagtcagaactgtgattcaagtgactggttcagagattggatctgtggttggcaaatctactgatgatcttcagatcgttgttagaggatcgtctcctccttctcctcttactacttaccttgaggttattggaattgcagagagtgataacgctattcgagctgaaacttggaccaattttggcaacacttttggtaatttagtgattccattactgtgtcgagtttatcagatttgctattgagttgtgttttgatgttttggttgttatttttggttgcagatacacagaactacaacgagctatgtaagctagcaaatggggagttcaagcac

SEQ ID NO: 147295 - DNA, 936 bp, Arabidopsis thaliana landsberg
ttttcatgattctttttttgtttgtatatagatggtcagcgattgggactcgggttgccaaagagaacagacaacgagatcaagaactattggaacactcatttgaagaaacggttagtgaaaatggggattgatccagtgactcataaacccaaaaacgagactcctttatcttctcttggtctatccaagaacgcagctatacttagccacactgctcaatgggaaagtgcaaggcttgaagctgaagcaagactagctagagaatcaaagcttcttcatttacaacattaccaaaccaaaacatcatctcaacctcatcatcatcatggattcactcacaagtcattgttacctaattggacaacaaaaccacacgaaggtaaaccaaagaaacacactatagtctgtgcaaaatttaaactttggaactttgtttgagttttgtaagacaatgcagatcaacaacagcttgaatctccgacatctacagtgtcattctctgagatgaaggaatcaatcccggcgaagatagagtttgtcggatcatcaactggtgtgactctgatgaaagaacctgaacacgattggatcaattcaacgatgcacgagtttgaaactacgcagatgggagaaggaatcgaagaagggttcacgggtctcttgctcggtggtgattcaatcgaccggagtttttccggcgataaaaacgagacggccggcgagagtagtggtggtgactgcaactactatgaggacaacaagaactacttggacagcattttcaactttgtagatccttcaccgtcggattcaccgatgttctgaatctaagggttgatatttgttgggaatgtttttgattcttttttagtttctagtttttgtgcttaaactctgattagacaatttttaaactaatccaatttttgcgct

SEQ ID NO: 147296 - DNA, 1666 bp, Arabidopsis thaliana landsberg
atggaggtgcggggaatcgaaccccgtgcctctcgcatgcgaagcgagcgctctaccatatgagctacacccccaattggtaacaatactaattttatttattatatcgaaatacttaaaacagaaatttatattatctgaaaattatctgactaagcaaaacatgatccagtttttgatcatgtttactctatattaattactttacaaatttttgatccagttttctcaattttttctagactcgtatcgatatggcgaatcatgaaacgatatttgatcagctaaagaagcagattccagtagatgaggaagaacctctgattttgaatcgagactcaagcgttggtctcgtcatcgttgacgttgttaatggcttctgcacaattggctccggcaatatggtttggttcaatttctcgaaaaaaacaattgtgactttgcttgtttttgtttcttaatgccttccaagtatttgtgatattgcttaagtcaaacgtttttgtaaacgaagtgaaaagaattgtgactttgtttgtttgtttttttgtttcttaatgtcttccaagtgtttgtgatattgcctaagtgaagctgtttgacttggcaggctccaacaaagcataatgaacagatatcgaagatggtggaggaaagtgcaaagcttgctagagagttctgtgatcggaaatggccggttttggcgtttattgactctcatcatccagatattccggagagaccttatcctcctcattgtattataggaactgaagaatcagaacttgttcctggtattggtgtagctctcttagtgtctttgtttgattctattactagagacagtgtcttgatttcttcttcttcttttgataataatgaatcagctctgaaatggcttgaaagtgaggattgtgccactcttagacgaaaggattgtattaatgggtttgtgggttcgatggagagtgatggttctaatgtttttgtggattgggttaaggaaaaacagatcaaagttgtaagtttttcttttgataaaatgctcagttttgatgttgaacaagtttactgcttttaaacaaatcttgaacatccctatgttttgggaatcttaagattgtcgttgtaggtatctgtacagacatatgtgtgtttgattttgtggctactgcactttctgcccgaaaccacggtgttctttctcctgtagaagatgtggtagtgtactcccgtggctgtgctacttttgaccttcctcttcatgttgcgaaagacatcaaaggcgctcaggctcatcctcaggtgaaaagtttgatgcttctgaaattagcatgtttagtttttgtcggtgtggtcaattaacacttgaaatcggttcatcttcttattcttctgttgtgtttctttgtatcaggagttgatgcaccatgtaggtctatatatggctaaaggaagaggagctcaggtagtctctaaaatttcttttgagacttgaaagactatatctcgtttataaacataacactcttgatatcaaatatttcagtaaattgttgagtttgcctctcttttctttcgtgtaaattgttcatgaagcttgttctctgaatttcaactcttgtgtaactgtttcagaatgacaaataatatgatgggtttctca

SEQ ID NO: 147297 - DNA, 793 bp, Arabidopsis thaliana landsberg
ctgaatgtgaagaactatacggacctggtacagagaaactagttgaaagacctctcatcgaaggatttgctgagaatggtgttaaagctaaagcccctgattcagagtgcgagagcaacacacagagagagttcatcgcttcaaactttgaaatcacttgcattcaagagaaaaaacttcccagaagcattcaaaagtgcaaaccaagcgaaaagccgtctaaagaggaaaaaggcaaagctgatggctttggtaactccatcaccaagaaggtactaaaaactgtaaaagtctctgtcatgtcaaaattctcattccctttgtcttcactcttcaatggttttattgtttttgtcaggtggaagcatacatcaaagaacatattagaccactgtgcaagagcggagtgataaacgtggaacaatacagatgggcagtgactaaaaccacagaaaaagtgatgaagtatcatagcaaagccaagagtgctaacttcttgatcaaagaaggagacaagatcaagaaacttgccgagcaatacgtcgaaaccgcttcctctggagctcaccacaaggataagtgcaagtgagaaaatcagatggcgtaaataagaagatgaagtaacaagtagttcagtacaaaaacgtaaatagattttaactagtatctctcttttgtcttctccacgggttttggaaactgagtcttcttctcttagggcgagagaaaaaattcttgtaaaccccgaaccagatagacctaaaatgtgtctgaaactgagattacttggtcg

SEQ ID NO: 147298 - DNA, 998 bp, Arabidopsis thaliana landsberg
gagctactatagatgttcaagccctggatgccccgtcaagaaacacgtagagaggtcatctcatgacacaaagttgcttataacaacttacgagggaaaacacgaccacgatatgcctacaggaagagttgttactcataataacatgctggactcggaagttgatgataaagaaggagatgccaacaagactccacagagctcaactcttcaatccattacaaaagaccagcatgtcgaagatcacttaagaaagaaaacgaagactaatggctttgagaaaagtcttgatcaaggtccagttttggatgagaagctgaaggaggaaataaaagagagatcagatgcaaacaaagatcacgcagccaatcacgccaagccggaagcaaagtcagatgataaaaccactgtttgtcaagagaaggcagtaggaaccctggagagcgaggaacaaaaacccaagacagagcctgcccaaagctaagcattcagtgttgtaccgagtggtaatttatatggctgttttaacatagattagtacaggcgatatggttatagactgtacagttgttgttcaggcgggaccagatttagattagtgtttaatggaatagtatgctttaatacctttatgtaaccacttccatttggttcaaataagagttacaggaagagaaggtaacacaacaagagcccttctttgttgatggagcctgtgtaatagttgtagcatgggatgtatatgatttgattcaaccttattaatggttatgagacaaaactatctattacttccagttctgtcttttgcattacattcttggagacgtttattctttcacttccatgcacaagatgagaccaagattcggtccatccaaccaaggtacagagcaccatctctttcttcaatcgcatacccgttgctgtaatctctcaagagggctctaatggtggctgaaatgattgagctcaaggggtatggctcaaaacccgcc

SEQ ID NO: 147299 - DNA, 221 bp, Arabidopsis thaliana landsberg
gaaaaagagagaaaatgggattccgtgggaagtacttcttcccaattctcatgactctatcgttatttctaataatcagatacaactacatagtctccgatgatcctcctctccggcaagaacttcccggtcggcgatcagcttcttccggagatgacatcacatataccggcaagactccgtcaaagaagacaaagagactgtttcacaccggggggaca

SEQ ID NO: 147300 - DNA, 1932 bp, Arabidopsis thaliana landsberg
atgagactccaacgacctaggaatcatcgaaatctcccacccatttccaccgccgacgaacctctaatccccaaacctagccgcgtctctaaatccgccatgtcttccttcttcctcttgccagaaaccactaagaagaaacccaacggaacgacgtcgtttcgtgggctaggctgcacaacctccgcatctcagcaagtttcggtcccggcggtgattcgctcctccgctgattgggacgcgagtaatttcaaaattaagaagtcgaagaagaagaacaagaacaagggtagtagtagctacaatggtggttcgattaagatcttgagcgaggctagtagtagtagtagtagcgtcgcttgcgctgcgattcctgatgtttggtgtggacctggagttgggttttcgacggatgctgtcgttggagcctccaataacaccgtcgagtcagatcctccgcgaaggaatattccggtgagacgcaaaatcgatggagataaaaccaatagtaacagtaataataatcagcgaggggtacatttacattttctgttttaatattccttatatgttaaagtttccatttttataattcgttgcgtgtgtatgtgttaatttgattttgagtatatctattgaaattagcttaaatatttaggggtttttaatatcttaagttagtttataatatctttagatatttgatttgcctctatctagtagttagcacacttagaaagcatcagtttttttttttcgttttgatttaggtttatcgtcttttcgtatctatagcaaaattaggctttgttctttgatctatatactctgcttaagtgatatcatatcaaaatcttttgtggagtaaagtaagtttttttcacactgtttgtaactgatgaagtttttgtagtagtttcagtatgaggtttggaattttgtgttcctaagttttcaacacagctgttacattgcagggttcttcttctcttcttcctagacgatctctcaatcaagagtctaatccttattttgattctgattcgagttttttgacatcgcgggctgaacagactgatagatatcatcgtcatctaagactgccttaccctgatggactcgctgaggtagagtgttgcttttgacttaagtttcatatggtgcttgtgccaatatgtatttttcttacatatgggtgtttcattgcagatgatgatgatgcagaatggttttgtgatgggaggagtattaagctcattcgatcaattccgtgacatgaggcttaatgtcgataacatgacatacgaggttggtagtgcctttctcacaaagtactagtaaaagaagctgatgatgatttcactaggttcttgagtgttgttgtgtttgttttgttgttaaaaaaacagcaacttttggagcttggtgaaagaattgggcatgtgaacactggacttaatgaaaaacagatcaaaagttgtcttcggaaagtcaaaccactccggcaagatacaccagttgctgatagaaagtgcatcatctgtcaagtaagtccagatttggcttcattgctcaagtaatcacaagtaaagaatacagagttgttcctagaatgttcatgttttggctattgacaggacgagtatgaggcgaaggacgaggtaggggagttacgatgtggacacaggttccatatcgactgtgtgaaacaatggctagtgaggaagaactcttgtccggtctgtaaaacgatggcgtacaataagtcttagttagatattatctcttcctgtgatgtgattcttgatttcgggattggaaccaaatcactattttatgttaagattcctttttggctttttattcatgattgctatttttctgaggaaaaactgttgagacctttgtattacctatggaaaagtctcggag

SEQ ID NO: 147301 - DNA, 1033 bp, Arabidopsis thaliana landsberg
tgtttgagacgccaggtggttttgccatcttcaaagtattaaacgaaggaaagctctctaatgttgaggttactaactaaatcattctcctttgttcatttatcttaactttgtctgtgttttttttttattctaagtatgtcaaatttgtgattgtaggatttgggtaatgagttctcgaccgcaaagttagcccgaaaggtgatttcttttgttctagacatagttcaaattttgtatctggctaataatatttgtttctcatagcaatttttggtgtgttgttacagatggtgaagctagtagcttttgacaagtttgacaacacagctgaagctcttgaagcagtggctaaattgcttgagggaactccaagcaagggtctacgcaagtttttgaaagctaactgtgttggtgaaacattagctgttgctgattctaagcttggaaatatcatcaaggagaaactggtgtgtattatgttccgatacgctcttttatttctgaagaagggttgtttcttacggatttgcttcactcttgtagaaaatagactgtgttcacaacaatgctgttatggagctgttaagaggtatcagaagccagcttactgaacttatatctggattgggtgatcaagatctaggtccaatgagcttggggttgtctcacagccttgccagatataaactaaagttcagctccgacaaggtagtcatttgatttgtattggtttctatttagttctctgaattatgattttgttgagttagccaacttttgataaattatggaactttttgtatcccttttttactcttccaacattaggtctgaatttgcaattgagtttgtctatatatcctgtgtttgtttgacgcttatgttacttcaccttgtacttgtattttaggtggataccatgataatccaagctattggtctgcttgatgatcttgacaaagagcttaacacttacgctatgagggttcgtgaatggtttggttggcattttcctgagcttgataagatc

SEQ ID NO: 147302 - DNA, 1249 bp, Arabidopsis thaliana landsberg
aggatcctaaagtactcgcagccttacaagagagcagaagacgacaagctccatatgcaggagctttccttgtgaaggatgacccatcagctgattcatcttcaagcactgacgcagaaaaaaacataaatgagctgaaagggaaagagttgcttaaccggcttcacgaagttggcacacttgctcaggtattgtgatgctgcatttgttcaaattaaaaagcatgactagcattacgatttccttattgattttccagatttcaagtatccaaggagaccaagttatccttgttggtcacaggcgacttcgcataaaagagatggtaagtcggtataacagcgttcgtactttgtagaattttcaaccatgaaagttccaaatcctcgaaagtacatcttcacatctgttctttggttgatcaagacacttttggtttaagggagaaatttttcctttatacaggtgagcgaagaaccacttaccgtcaaagtcgatcatcttaaggtacatttttctgcttttaggcttttcctcttataatatgagactactttgattttgctttttctatttgaaactctgaagtcaggaaccttttcttactctctgtgcaggataatccgtttgacatggacgatgatgtcgtcaaggcaacatcttttgaagttatttcaactcttagggatgtactgaagacaagttcactatggagagatcacgttcagacatatacccaggcatgttcttgtcataatttcacctgttctggtaaaaaggtctcagggtacaagtgtcttagtagatgtctttcaacttgtgtagcatataggtgatttcacttatccacgactagctgattttggagcggcgatatgtggcgcaaataggcatcaagctcaagaagttcttgaagaactggatgtaaggagcttcattattgttgtaattgtatgattcttggtcaatctctcatctctgtttttgttgacccaggttcacaaacgtctgcggttgacgctggaattgataaaaaaagaaatggaaattagcaagatacaggtacttcattcccttattcttgtgtctttcccactacggcactacttatccggtaactgtttgaatgggataaggttctaatcttttgagccttttatagcaagccatagcaaaagcaattgaagatcagattagcggtgagcaccgtcgttacttgctaaatgagcagctcgcggctatacagaag

SEQ ID NO: 147303 - DNA, 1527 bp, Arabidopsis thaliana landsberg
agtaagtcacttttcgaagcttcgacgttgcgtggttttgcaagctggtcaaattcttcaacccctggacgtggattctctggtaaaggtaagaacttggtttgtttccgtttcgtcagtttaaggttacttgccctaatttggtttgcttgatttgagaagatgccgcaaagcctagtggtcgattgttcgcaccttattctatcttcaaaggaagagctgctctctctgttgaacctgttcttcccagtttcaccgaaatcgatgtaagctcaaaatccatttctttttagttttgtgtgttctctttaaaagcttcttcttttagattctcattacttactgtgagtacacttgtttagtcgggaaatcttcggatagatcgtcgtggatccttaatgatgacttttatgcctgctattggtgagcgtaagtacgactgggaaaagaaacaggtattgatttttttcacactctctatcttcttcacttgtgtcttctttctcctctgataaatttggtttgtttgctacatttttgcagaaatttgctttgtcacctactgaagttggatctttgattagcatgggttccaaagacagctccgagtttttccatgacccttccatgaaatcaaggtttgtctttttttgcttcaatacattatatttttatcgcagcattttcatgttctgacatacacttgtctttgactcctcagtaatgctggtcaagtcaggaagtcactgtcagttaagccccacgcagatggtagcggctacttcatctcattgagtaaggcttctatcaaattaacatggatcatcagtactgaatagttagttatgggagctttctgtttagtaaatttagaagcttgcacttgtattagttttgtattatggcgataacagttttcgcacagaatagctgttttataacaataggaatgctgaattctgaatgctgtataaacacttaccttctgctgttttgttgcaggcgttaacaatagcatcctcaaaaccaatgactatttcgtggttcctgtcacaaaagctgaatttgcagtgatgaagacagcttttagtgtaagattagattttaattttgctttctctctattctattactataataacagttcaagaaccaaaagcattgctatttgctattctgtcagttttagcacatgaatctgaaacaagtatatatacttgaaggatgggctatttgtgattgtcttttaaccagattttgtattttgtgcagtttgcccttccacacatcatgggttggaatcggttaactggtcaagttaatactgaagctctgccgtcgaggaatgtttctcatctaaagactgaaccacagttagagctggagtgggataaatgaagtgatgagagtagtaggaacggagtaaattgaaaatgcatgtgttcttttttctggcatttggtgcacacgaaactcggcatgctctgtttttgaaactaatatgtcctctctaagacttctaaatca

SEQ ID NO: 147304 - DNA, 1002 bp, Arabidopsis thaliana landsberg
ataattctgtatcactgttttttagattggagaacgctgagcacagccttggaggtatgtaaatgatcatgatttataatctaggaccaaaacatttcttgtttattttcaatcgcttaagacttaatactgtgtttgccttttgataggttcttcctccgaacacagcaacctgacgagcttagacttgggcgtgtctcacagcgaccatgaaattctggcagaggtactaagatgtacttcgaagatcagtaaacagtggggtggtgctccttatgccatgtattatgaatcaattaccggaaggccaattatctcatcggatgaaatcgttcctcgcttagttaacatccttgagtcgggatattctacgaccataggtcaacgtacttggtcagatcttggtgctgatagagcatgggaaaaagagctagaagctcataaaaatcttagaacattctccattgacaggctgctgtctctatctgctttatgtcaaagggctggatcttgggaaaaagtctttactatcatggagcgctatttgcagtatttggtccctaaaaaatctatgcagaaaaatgatggtgaggcattatctgatatctgtagttctatcctcgtccaagccacttctcagtttgtaaaggtgatgtttgagtcggcatttgacatcttcctactcatcagctatctgcttaacatcgctgggcaggtcagttcccactgggtctcgtattattgtcaagatgtatcccccttatttggaatcagtgtagtttatattttgatactaatgtcaagatgtatcccccttctttggctttttctttccgcaggttaatatgtcacagcaagacatatgcaagctacggcttgagttgcttccaatgatccaagatattgtctcagagtggctcatcatccttttctttgttaccactccagctgagtcaacttctatggaagatttcagcttgaaactttcatctctacagattg

SEQ ID NO: 147305 - DNA, 2231 bp, Arabidopsis thaliana landsberg
gtatcccaaagatctctctttggtcgagtggttcataaccaaaatcaaaactgaagtgaatcataatggtcgtctggtcgccgaagaaaatgatcggcggtggtagggtttattgggggaagaagttagataaagagatggaagatgcggcggttgttgacggtggtggatctaacggtgttgttgtgatctttgtttggagctcgattaacgagaaccagcttatgaatttcgttgatctttattcttctcttggttggaattctcttgtttgccgcgctgattttctcaccgcgtaagttcgttctcttgttctctctatctctctgagtatattttccggcgaactagctaatttctgagaattttccgatgatcaatggttttgtgtagcttagtatttgtaaatgagcatttagcagaaaaaatcttttggttccttgtgattttttctgtaaatgtcgtttttgtaaatttttatcaatcaaaattgtaaagaatctaaaagattccgtttagatattctttgagaatctctaaaagtagttttgattatttgtctatttttttcaggttttatcctgaaatggctctttctttagcattccatcttctttctgagcttgttgaggtaaggtttgatggtcaggaatgtgatgagttctttttttagattggtacatgtttatgttaaatgattctctcttttttggttttggtgtgttacttaatgttgctattgttgttattgttcaggagttaaagagtagaccatgtcctgttatctttctagctttctctggtgctcctaaagcttgtatgtataaagttctacaggtaagcttaaaaggattcaacttccagctactttgtggtcattttgtgctgttttttatgtttctgtttcaatgggtatctaaaagtatgttaaacaatgcaggtgatcatggatgattgtgaagctcaaattcatccggtgagaattgtctcctatacagttttatttgaagtcatcaaatgctgcttttatgttgtttctctcttgatttagttttgactcattgattgttttctaattttgtgaaggatgatagccagttggttagaacctgtctttctggacatgtctatgactctggcccgttggattttacgagtgatttgaatgtgaaattcgcactacatcccaccatacgacgaatgtctggtccttctagactagtatcttgggtggctaaagggatttcttccgggcttgatggtttatatcttacaagatttgaatcccaacgtagtgagtactggcaggccctctactcatcggttgtaagtttccaacgagtttctatgccttctttgattttggattctcaaatttctagctaacagtagataaattttccaggaaattggggctccatatctcattttgtgctccgagaatgatgaacttgctcctctacaagtaatttcaagctttacccatcaattgcaggaactgggaggagaagttaaggttgtcaagtggaaaaattctcctcatgcaggttagtcaacatgctatggttgtgacaaatatttatgatatgcggtatatgctatcacgtggtctcttatggcctagccattctttgataatggttagtctatgtcctgaagatagctattggttttattgtcaatgctacaaaatctgaggttatggtcttttttgctcctctctgtcttcaggacactacgcacataaccctatacaataccgggctgttatctccaactttctggagaaagccatgtcagttcacttacataaaatccggcagctcggagaaagagctcacacgcatgatgaaatctctgagttaatatgcgaccttcagaaagttgctgtgaactctaaccaaagcctaagaagagtagccactgggccatgtgaccactttttcttacctagctcagcaccgtatcaaagcaacagcaacaacagcgatccatcatcttcacaagaagaacagagagaaagatcgtcctttcgcccactccaaccaacgagcataaacgctcacagcgtactcgggcaattcctattcgactcatgtgttccaaagaacatcgaaggatgggatatcagatttgcgggttgtctcaacggtcaaccatatgccacgtcctcctcccgtaagaactcaaatcttggttttaagaaacgctttttccgttcaagactatga

SEQ ID NO: 147306 - DNA, 2031 bp, Arabidopsis thaliana landsberg
atgactaaaaaggtttctttcaaacctatacgggtgactgactataagttggaaaacatgtaaggcttctcataaatagatttattcacttgttttgacgaccattggagatgcatcatctataagttgcttaatttattcattgaatgattaaatccattcagggatatttcgaagagcccctcatactggtctatggtttgcctttgcaatatagccaaattagcaaaggaaactaccactgttcgtcgggttttggaaccgcttctgactgcttttgacagtggagattactggtctcctcagaagggcgttgcctcttctgttttattgtttctgcagtctcgtctggaagaatcaggtcagatgatatatattatttgcgatctttcctgattttcagtatatttataacttgtctatgaggcaactgactaaagaagtatttaagcaggagaaaattgtcatgtgttggtatcttctttgatcaagcacttggatcataagaatgtaataaagcaacaaggtcttcaaattaacatggtcaatgtagccacatgccttgcactacatgcaaagcagcaggcttcaggcgcgatgactgctgtaatagctgacttgattaagcacttgcgaaaatgcctgcaaaatgcagctgaatcagatgtgtctgttgataaaacaaagcagaactcggacctccagcatgcattagaaaattgcatagcagagctctcaaataaggttagttggactggtttctgttctttagaggtttctgtggttttgatctgaccctcgccacaagtgttacttgtattgtcttgtgtcttatatgtcctaatacaccagatattattaatttttcaatggtcgaacatggcttcaagtttactcgttcttaaaattatgtagtttgcttgtatgaaaaaataagattgtaaaaggaaatacgctaggtaaacagcagtagcttgtatattaggaatcatttcccaagtccttatgaattctgttcttatctagttatggcgttagtagatagccagtggttatgagtcccatgttcagctttcagtatcaattaagtatcttagttagctggttcttgcagtatattgtcaaaatagaagttacggcgttattccatttgaaagttatggacatgttgttatagtgtcgaaacctatatgatctatagtgtgctaagactaattcaataccccatatatcacataacagtttcgaaatcaagcagcttcttcttatcttatgtaatatgttatttcttctttcagcatgtggttttgatctaccttcactcttgaaactccttggagttgccagtgaaatttgtgcatattgttgttttctctcctgtccgcgtgttcatacaaaacgccataatttgttcaatttttttgtttgcttttaaggttggggatgcagggcccattcttgatatgttcgcagtggttcttgagacaatttccactaatgtagtcctttctaggaccacagcatcagccattctccgagctgcacatatagtatcggtggtcccaaatgtttcttaccacaagaaagtaaatgaattcttttactgcaacttttgttttgtatttgactatggcagtagttattatgttctaactgagttactgtggtctgtcccaggtatttccggatgccttgtttcaccaactgctccttgcgatgtcccatgcagattgtacgactagagtcgaggcacacaatattttttccgtcgtgcttcttggaactcttcgtttgccttggtcagatcaacataaggaaacctcagaagctgtttctgggtcattgtcagttgatggaatttgtacagtaaggaaccaggaggaagagaaagaaaaagttgagaaatccttaaacagtgaactgtgtaaagatgtaaaccacatatctcgtccaagtgtatcacgacagaccagtcaacagcttagctgtcagtccttggatagcttaaaggatttagatgatggtataaag

SEQ ID NO: 147307 - DNA, 886 bp, Arabidopsis thaliana landsberg
acaccacaaataagaaactaacaaaaacctttttgtcttctacaaatcgtctccatacatacatatgacgataaaaagtctctcttttcttgcggctctatctctctttgctttgacacttccattagtaattgcttccgatccaagcccccttcaagacttttgtgttggtgtcaacacaccagcagatggcggtaagcacatgatcattttttaatttattaaatatatttgtatgttgatttatgcattactaatactctatttttatcaaaaccttgtctagtgtttgtgaatggaaagttttgcaaggatccaaggatagtttccgcggatgatttctttttctcgagcctcaacagacctggaaatacaaataacgcggttgggtccaacgtgacaaccgttaatgttaacaaccttggaggactaaacactcttggtatctcatttgttcgtatagactatgcacccaacggtcagaacccacctcacacccacccacgtgccaccgagatcttggttgttcaacaaggaactctacttgtagggtttatctcatcaaaccaagacggaaaccgtcttttcgccaaaacactcaacgtgggtgacgtatttgtgtttccagaaggactcatccatttccagttcaacctaggaggaactccagcagttgcaatcgctgctttgagcagcctaaacgcaggtgttatcacaattgctaacacaatatttgggtctaaaccagatgtagacccgaatgttcttgcaagagcattccaaatggatgttaatgcggccaggaattcacaagccaggttctgataatgtaataagaaatatagtctttggaagtactttattaatacaagcacggttcagccgt

SEQ ID NO: 147308 - DNA, 1066 bp, Arabidopsis thaliana landsberg
cggatgatgaatctggtgggatttacggattgggaagtgtgttgaaagagtatgaagattatagaagatctctctatggtgagatcactcataaggcgttgcttgttgatgctgttggtactctccttgttccagctcaacctactgctcaggtctctcaaatttctctgttactttgtgtgattcaacagttgaacaaatgcttcacatgtttcttgctctgtgattgaaattttttagaaagctatgagcattttgaggattcatgtttgattctgagtaaaaatttgatgcttattgttatgttaagaatgtcttaggctttttatgatctctgtttgttcttagaagagtagatagagatttttattgtgtagattctaagatgtgttatggattctgattttgtagatatataagaatattggagagaagtacggagtggagtactcggaggctgagatacttactagatacagaagagcttatcagaaaccatggggtggatctcatcttaggtatttagaatcatcttctttctctttttgtttcttctactccaagaaaatcaccactaggcaaaatgttcttttgtggctttctatttgtttgtatgacaacttttaatacttgatcatgattatgactctagtgatgcatctctgtacaaagatatctggtttaatactgactctttcgaatatacatttgctgtggaatctctgttggattcataaatgggtctgcttaagacatttacttctgtgctggtcttgatttttgattctttgtttgtagatatgtaaacgatgcaagacctttctggcagtatatagtgactgcatcaacaggctgctcggattcacagtactttgaagagctttacagctattttactacagaacaggtttgatctctactactacttctccatatgcttcagtaatagttttggttctttctcttgagatttctccatttgctttcccaggcgtggaagttatgtgatccagatgcagggaaagtgtttaaggctattaaagaagcgggtgtaaaagttgcaata

SEQ ID NO: 147309 - DNA, 184 bp, Arabidopsis thaliana landsberg
gagaaccccagaaaggtcttcttgcagcccatcctaaagccttcttttctcctgcttctacacttcccatttcttttttcttggtttctccgatttttctttttttgtttctttagttttgcagagaaaaacaatggtgagagattatgtctatggaaacatgactgtagaggcactctattga

SEQ ID NO: 147310 - DNA, 88 bp, Arabidopsis thaliana landsberg
gtttgtttgttagatgtgaaagtagagctcaaagacaagcttcatgttgttttgttcaatgaagaactaggaacaagagattctctgt

SEQ ID NO: 147311 - DNA, 1033 bp, Arabidopsis thaliana landsberg
aacccttcctaacaggcaacgggagggtccacacaaattcagttaagaagaacttatgaattattttcgtgccagctaattttaactatatgaatgtgggtaactcatataggcaaaatcaggtggaagtaaataccagtccacatatgaaggctatggttccccagtaagcggatattattttgtgtgtttgtcgtgtaaaatgggctggttctctgttttcatggccatctcttattcttctttctcctctctctttcagattagagaagagcctcctccgccttattcgtattctgagccacaaagtcgtgaatcgtttgagaaccctgtagcagggtctggttctcgaagttatgaatcagatgatgaagaacctaggaaatctactggtacaagatttggaacagcgctctatgacttcactgcaggaggagatgatgaggtaagcttgcttttgtcttttattcatttagttttgtatacggttgaaaaaaatgatatatgcaaacgttaaaacacgtatgggtatgttgcagctaaacttgacggcagaagaggaattggagatagagtatgaagttgatggctggttttacgtaagtagtaattggttactaaaatcttgtgaggagtagagctttttaaaaccgtaaactaaccgggatcaacttataaactacgacaggtaaagaagaagcggcctggaagagatgggaagatggcgggacttgttcctgttctatacgtcaatcaatcttgaatttttggggaacggctttagacgtagaagccaacacactatggatatgttaagtggacttgcttagatgccgatagacattatgatccatgatttccttgaagaggtagtgtaaaatcagtgtacatgaaggaatgtatttgttggggtttgatgtgtatgtgtatctcttttgacacttattgctcacatgctattgatgattgatcaacttgagttttaactattgtttcactgaattcataatatatattacatctacttgtgttt

SEQ ID NO: 147312 - DNA, 1085 bp, Arabidopsis thaliana landsberg
ccacgatttcgtcaatcagatcaaaacttctccaactctttcaatatctatctacgtgcatccacctctctcttcttcttcttgtgaccactcttcctgtctgttcactggttaggagatctctatccctctctctctgatcctttttgtttctttctgatttattgtatcgctctctttgaaaaaccttaagagttgtctgattttggcgatttctgatttgttgttgttgttgtttgatcggatctcggcattttctaggaggtgaattttgatttttttggccgatcggatttgagtttttgaatctctgattgctgagaaaatgccggcgttttacggaggaaagcttacgaccttcgaggacgatgagaaggagagcgagtatggttacgttcgtaaggtattatcctgtttcgttcgatctggtttcaatttgtttttttttctgttttgcgatgttagtttttggtgatggatagatgaaatagttgatctgcttaccaggtaagattggtgggatagctagatttgatctgatagttatcagtgattgaatcggttgattccgcgttggttcagtaacctcgtctttgaatttctgatctgatctgatagttctcagtgatttgacattttcttttatgggatgcaggtttcaggtcctgttgttgttgccgatggtatggccggtgctgctatgtatgagttagtgcgtgttggtcatgataatttgattggtgaaatcatccgtcttgaaggagattctgccaccatccaaggtttgtttcttctattgtgcttcctagtgtaatttactttacggcatcttatgtgacctctgtcgaagtaagatatcttaactgatatttggcaacttccttttgatcagtttacgaagaaacagctggattgacagttaatgatcccgttcttcgaacacacaaggttcgcgagttatttatcttggttttttcgagtgttgttcatctgcagctaacatataatttgtcctggatttactacagccactttctgtggagctcgggccaggaatattgggaaatatctttgatggaattcag

SEQ ID NO: 147313 - DNA, 715 bp, Arabidopsis thaliana landsberg
ctcagcttcggtatatcaaggaagccgaagaacttaggctcaagatgcaacctttagagctcatcagaagagtaagcacattatgctttttgtagcattagatatttacaagtatctatgctttcgagagagtgatttggccttatgttcttgaaatgaatgataggtccgagaaatcgaacaagaggcatctgcgggacaagaaaccgagcagcagaaagatgtgaagcagactacagccgttgatctctctaaacgactgaaggattttcgtgcgctaaacgatgcatcgagcttgaaaggtacacataatagcgaaatcgtcttgtttatgctatggaattcagatcagaaacaaaactatacatgatggtttaggtatgtaacaaatgtttttgttatccgctcagcattggaagaatggcgaaagcggaaaatggaacgagcaagacaacgggatcttgagaaaaccggaggagtttcttcgtccaccaaaacatcatcataaacgtcactaattctctaaatatcataaaattattgaacattataagtctcatagaaaaaattatacttactagtgtaaagacagacagagatgctggaaacctgtcaaaacacaggaaaagaaaagaaaggatatgtatgttactcagtaagatttttaaacacacttgtgttttggtcaattcatcaaatataccttaatcatata

SEQ ID NO: 147314 - DNA, 1124 bp, Arabidopsis thaliana landsberg
atgaggaagttcggtctcggcgctgacaatgtcctcgacgccagaatcgtcgacgccaacggccaaatcctcgatcgcgcggcaatgggagaagacgtcttctgggcgattcgcggcggcggcggtggtagcttcggcgtgatattggcctggaagattaagctcgtccccgttccggcgaccgttacggtattcacagtcacgaagacgcttgagcaagacggaactaaagttttatacaaatgggaacaaatcgctgataagcttgacgatgatctcttcattcgcgtcattatttcaccggccagtaaaaccaccaaaccgggaaatcgaaccatctcgatgtcgtaccaagctcagtttctcggagactccaatcggctcttgcaggtatgatagtgttcaaatccaaacttaagggtctaaatttgaactcttttatcttttcggttttaacaattcaagcaataaacttttaaatttgtaaatttcaaccacaacaggtgatgcagaagagtttccctgagttaggactgacgaagaaggactgcacagaaatgagctggatcaaatcagtgatgtacattgcaggttttccaaacagtgcagcaccggaagctttactagccggaaaatcattgttcaagaatcacttcaaagccaagtcagactttgtgaaagagccaattccagtagaaggtttagaaggattatgggaaaggtttctagaagaagattcaccgttaacgatatggaacccttacggaggaatgatgtcgaggatctccgagtcagagatacctttccctcataggaacgggacattgttcaagattcagtggctaagcacgtggcaagatgggaaagtgagcgaggaaaggcatatgaagtggattagggagatgtatagttacatggagcagtatgtgtcgaagaacccgagacaggcgtatgtgaattacagggatcttgatttggggactaatgaaggagagactgatgctagagagtggggtgctaagtattacaaagggaatttcgagaggttggtgaagattaagggtgagtttgatcctgataatttcttcaggcatgaacagagtgttccgacaaagattggttga

SEQ ID NO: 147315 - DNA, 2143 bp, Arabidopsis thaliana landsberg
gtctttggaccacttgtctcggagaaattgaagttcacagctgaagaaattgagatgggtcttatcgagtccaacactacaaatgctcagcttcacattgcacttttgaaggtttttgatttttgttctgttattgaccttgcagctgttaatggtatctaacaagctcaagtttatgtgtttgttgccttataagaaaccttctggatgtgaatttttcaacaggggataccaccggtgaataaaacgcttgacgatgcaaatgcatggatcacggtgttgtgtaagaaactagctccatggtggccatgggtaaggccacactgaactcttttgttagcttatatcttctctgtggttttctttattgactcctgtaatgtcattgttgcagattgctaagggtgaaattcatattactgttaacaaagggtaagtggtgaaataatgtgaatttattcaggttgagttggtattgataacaactttcttctcttctgatgtatgaatagggaggaaatatctgaataccaaggacttgactctattaaccgcctgaagattttgaaggcactttgtgagcttcgagttcaagtaattttcttctcttcatttaagttgttgaagtgtatttttaatgcatgcctctttggttacacatatggaaagaaaaaactatatcattactagttgcatttgttactcatcgtcttgtttccattggtggatggtgtagcaagatgatgcacgttcgtatattcaagaaaataccaaggaaggagactgggattctagtttacgcaagaggaagctaggaggagatggaaagaagacttcttattggtagttacacttacttgtcctatcacttctttctatgttactacatctggtgtgaatgtgatcaacttttatctttttttttttaatttcgttctaggtttgatggtaatgatatccaaggttacagattatatagggaagtcaatggaatctcaaagaagaatgctggctcagatttatcttgtttgagctgggaaactgaagcaaccaatctagatgaatttcagagtgtcgctgtaagattttgattgttgtttatgcttctcctctttaagatgtgtggaactatttttcattcattaagtatgtcctgtaatggcagagagagttatcatcaagcaaagcttcttctttggctgcaactgggcagatgattgagacagaagctatacccgttgttgagaaatatcataaagtatctctcaaattccttctttatgtttatgcacatatctgctatatcatgttttttatggtgtttcaatttttattgcaataacagaagagagaaagggccataaaaaagaaaatgaaggaagagatggtcgttaatgtcaatttctcgcgtcctctccgaactactcgttcttgtcgtaaccacatgcctgctacttacacctttggtatagtcatattttcttgcgtttcttccgcttgtttgatatattatttacctgttggcgtggcttattagtttgcatatcttattatccagacgagtatgacaagatgatcagtgatgccgtggaagaaacagagtaagaacttgacttctttcttaatccaagtcatctatccaccaatatttagcacatatgagatagtatttcatttgggtaaatcaactctcaaataatctgatgaactataatggaaccactgttgatcccttttcaatggcggatatgtgtagactcgttttttaatgtgtaccattggtttgagattaaacatgctaatgctatagctcattcttttctgtctattcatagtaagagatgtaaattgatttactgacagctttgtgtcggtttgatgagaaagctttagcatgagaaaaccccatcattcacttctcttcttgatcagggacaccgatggagatgaggtagaaggaagggatcaacaaagtgcctcattggactcaaacgataagtcaacagaggttgaagcagctgaaatccacaatgacgatgataaagagaatgagataagcaaggaggacgcagagccaaaggaagagtttggtgccaaaaacaggttgagacaaagagttaccaggaactcagccatctgttaa

SEQ ID NO: 147316 - DNA, 186 bp, Arabidopsis thaliana landsberg
gagcccgaatctaccaagttcttacaagcattgtccgatattgcttatggagcagatgtgaattctctgataggacaggttgaggagctctcagatgtttgtcgacgtaaccgtactgttcaagagcttgttcaggcagctttgaagcctcttgagttgaatctggttactgctcctgtatcataa

SEQ ID NO: 147317 - DNA, 804 bp, Arabidopsis thaliana landsberg; identical to SEQ ID NO: 58307

SEQ ID NO: 147318 - DNA, 1086 bp, Arabidopsis thaliana landsberg
ctagctggtaccaatcttaaacccctctccgattttgatttctgcttgaaattgttttccccgagatctcaatttcgataatcggaaaacgaaaaagatggtttggtttcaatgcgaagactgtggagagagtctgaagaagccaaaggtcccgtctcacttcaagatgtgcagagccaacaaggtctcactttcaaattttctctatggtaaaaatcgaaactttatgatgattgttgtgttaagtctctctttcgtgtgttgtattgtatcaatagttatcgtgcatcgattgtggagaaatgtttgggagagatactgtgcaaggacataaccaatgcattactgaagctgtaagtaaatggtttatgcattgtattgaacaaattgggttaagttctagatttttggctatgtcttggacttaagagattgaggaattgttgtgtattgaatgtttttaggagaagtatggtccaaaagggcagtcaaagtcagctaatggaacacctgcaaagccaaaggacatctctaagcaagagcctgactttgatattaatgtcggcttatcaaaccgatatccatggttttgcaggtatttacatctttcaaactttccttccgttttccgctttagatacgaatgcataatgtattgaggttgttaggagaataagtttttgtgtggatttataacgctaatgtagacttttgttttagaatgtattgttgttttgtgtgtttgtcttgtgacgagatttttgtggacatggttttgagtattttgtctatttggttgcagtttatgtaacacaaaggctactagccagcagactttgcttgcccatgcggatgggaagaagcaccgaggaaaagctaaagccttccatgctaggcaacaacaagaacaatccacgactttggataacaaggatggaagtgaaaatgcgtctaatgttgattcagaacagaagaaagtagatttacctgcctcctcaggtgttgcgaatggagaatcgcatcctgagaaaaagagaaagctagagactttggatgaaacgagtgaaggcgaagaagcaaaaggaa

SEQ ID NO: 147319 - DNA, 741 bp, Arabidopsis thaliana landsberg
atgagtttaacaaagaaagcaagtgaaccaaagctaagtggtactagtatcaagccaacaactttaaaccctcatgctgctgagtttgttccgtttactctacgttctccttcatctggaggtacaagtactttggatacaagacttttagcttcttctagttctgttgggaaagcggttttggacaggacagaatcatctgcgtcacatcattcagatgaagaagcacgtcagttctggagtcatcaacttcctgatgatataactccagattttgggttgatgactcaagatgacaattcttatggatctggtagtttgtcactagctaacttgtcgttgtttgacggtaatgaagctgagaagtttccttctgctagtggaggatatggcttttcagatcaaactggattagcttcacataatgctaatggtaatagcttggctgataagagtagatatcccatttcttcatttggggaagatcctcagcgacagagtttcatgcaactgagtccaaagccttgggataagcaaatcatgaatgctgagcagcttcttgggaatgacagggaaagaaacccttttagtgggaaatctcgacatggctttgttaacgacatgattactgagagtccaggggatatggaggtgaaccctgtggattttctcgcttctcagttccccggattcgccgctgagagtctagcagaagtgtattttgctaatgggtgtgatttg

SEQ ID NO: 147320 - DNA, 1408 bp, Arabidopsis thaliana landsberg
tgatgatttaatggagcagatacattctttggtacatcgacatccagataagctctcggttagtgccattttagtttcgtttttaggttcttgtatttctagctcagactgagtgaatatttgtttcacagattgagttgattaaatcgggaaacaaaggctacaatgcagaggtcaatgtggtaacttattgtcgcggtggtaaagagagtgatgacagatcaaactttaggattcttcttgtaagttcccttcatagctctgtctaagctattcactggaatatcaaataaattgacaaatcctgtcttctggttgaacttgtaatacttttttataggtgaagtttcttcatagttttggtaatacctgtttttttgacagatgattccttttcttccagacttttggtcagcatgggagagagcttatcacctctgaacttgcttttcggattttgtcgattttgagcgaagaacagttcttaccaaataaaaacggaggaatcctgaacaacacactagacaaactagtcataaaagtaagtgagtctgatccctgcagtcttattttcatctttgtggtgtttgataaattcacttactcataaaatactgctattatttgtcagatggttcctatagaaaacccgaatggtcgcaaacgtgttgaatctggtgatctttgtgaacgaagaaatggtaaccatatttgtttctccattacatgattatgactgtgtttttgttttgtattttatcttttaacatatctgtaaatcacaggaagaggagttgacctgaaccgaaattggggtgttgactggggcaagaaagaaaaggtacttcttaacttcactgcactttcctttcccttcaatatcccttgttaatgtgtcacgaaccttggtccttgtttttttctcggcatttccaggattatgatccatctgaagagaatccaggaactgctccgtttagtgagcccgaaactcaaataatgcggaagctagccatatcatttgatcctcacatatggataaatgtgcattctggaatggaggtaatgtttctcttctgctttagtattatcatgtatacatacaatgttgggaatacagctttaaacttctgttggagtatgagtaaacatgtgaatagtggatttacggatgtttacattttgtaaattgtgtaacaaacttatcttgatcttggctttgttatgtatttgttcagaagcttgattctcatttcttatgttttcaggctttatttatgccgtatgaccacaaaaacataaccccagagggattaccttcacagaaaatgaggaccttacttgaaaaacttaacaaatttcattgtcacgaccactgcatgattggatctggcggcggctctgttgg

SEQ ID NO: 147321 - DNA, 943 bp, Arabidopsis thaliana landsberg
catagctctttgggcaacgcaatttgcaaacacgtcagactcagagcttttccaatcagcgagactctctgcatcttctttaaggtattacggactggggctagaaaatggaggctatagtgtaacggttcagtttgctgagatacaaatacaaggttctaatacctggaaaagtcttggaaggcgaattttcgacatatatgtccaggtctctactattcttaccaatattaacttcgtcttctctgtgaattagttattttggttttgtgaactaggtccgtactctgtagtaactattttgaactagagagagaagatccttgataagctttggcatacaagagatcctttttctattagagtatctggtacaaggttgtagcacatatttcgttcaagtgggggtgaaaattagatgcatcgttttaaggctcaactcttcatgaacgatattctctactctcaaaaatggtttctgacctctgagttccttttgtttctcagggaaaacttgttgagaaggattttgacatgcaaaaagctgctaacggttctagtatccgagttattcaaagagtctataaagcaaatgtatcagaaaattaccttgaagttcatcttttctgggctggaaaagggacctgctgtattcctgctcaaggcacttatgggccattagtctcagctatcagtgcaactccaggtatacatacagcagaaactttcatgatcttcgtagagtccaatgtatcttctaactagcggcttttattctctgcagatttcatacctactgtaaaaaataagttgccctcgaaatccaagaaaaacattgttatcattgtaggggctattgtaggagcagggatgttatgtatattggtgattgctatcctcttattcatccgtaggaaaagaaaaagggcggctgatgaagaag

SEQ ID NO: 147322 - DNA, 387 bp, Arabidopsis thaliana landsberg
atgaggagccaatttcatggttgggtttggggagcttccactatagaagctcagcgagggacccatacaaggagtgaagaaagagccgtacgcgtagtagtgtatacaggttcgtattggtgtgttgcacttttggtcctaaactcaactaataatacctcttttctttttcttttttcttttccaatctcttttctttctttaggatctctttagtcttatctatcaaaataccacttcgtatttggggtattcctatcaataaccaaccatacaaagcatcaatgcatcattctcatattcatatatcatacttgataaagaaagttccatattcactgactgtccagatatttattatttgaaaagaaaaaaattgttcaacca

SEQ ID NO: 147323 - DNA, 1083 bp, Arabidopsis thaliana landsberg
atgtaccggagattcggcggcgacgaaaccgtcctcattgcgccgccgcaactacccgacaaacaactagctttcgtattacttccttgtatctgatttgataatggcgaaaactaaacaacagaaatctaagcctaagaaacaaccgcatcaggttttcttcatgattctcaacttcaatatatgatttttgtattcccaaatcagtctgattcgattagtattggcctgttttgctctgtggaaaatattgtaatttgtttgtgtggttgatttgaaaaagaagcaaggaaaggattgtgatctctctcaatttcgtgctcagcttgacgctttagggcttaagattatccaagtgactgctgacggtaattgtttcttcaggtatgtcttttgctttgatcatcgaattcgatttgttttttgaagaacaaagcaatcgtgttagattgaatagtgattctctttcacagagcaattgctgatcaattagaaggcaatgaggatgaacacaacaagtaccgtaacatgattgtactttatatagtggtaagtggcagccattacttagtgatatttggaaactgtctctctatatgtatatacaatacttgatggcttttgacagaaaaatcgtgaaatgttcgagccttttatcgaagatgatgttccttttgaggattactgtaaaaccatggacgatgatggaacttgggctgggaatatggaattacaagcagcttctcttgtcactcgcagtaatatatgtattcacagggtaataataacaatgcctcttctcatcatctgcttcgtttttatcgatacgtttgtttgagcagtggtatctttatgttgcagaacatgtcaccgcgttggtatatacgcaactttgaagatacgcgaacccgcatgatccatctgtaagtatacttggttctgttaatgattcttttatcggtttgaatttgcttttactttaatagtttctctttcaggtcttaccatgatggggaacactacaacagtgtgcgttccaaggaagatgcttgtggaggaccagccaggcctgttgtaatagag

SEQ ID NO: 147324 - DNA, 1058 bp, Arabidopsis thaliana landsberg
gccatggatgttgacggagaaggtgatcgtggtcaaaaccctagaattatggagagggactcagattctatcaaagatccgatctcagagccttcatggtttacccccaaaaagtaatttctcttgtttctccattgtatacgtttctctcaggtcaaaattaccgtaacttttggcaaaattgggcggaatgtcgaagcttttagttcacagtgtgaatgaagtggaaaaaatttctttgttcgcttgaaatctgctaattggttctatttatggaagttttatacatttttgttgaatcgaagttgtttacatttgatttgatgatcttattcttgtggttatttttttggctatctctacaggcttctctttgtgttttgtgttgtcaacttaatcaattatatagatcgaggagctatagcaagtaatggtatcaatgggagtcgtggttcttgcacttcgagtggtacatgttcatctggcagcggaatacagtaagtttccatttgttttccctctatccattaaagaactaggtattgaaattctccattcgaggtatagtgtgtgacgtctattatattatgtgaaaacatgagaatctgttttaacttacacaggggagatttcaacttgagcaattttgaagatggagttctgtcatctgctttcatggttgggcttcttgttgcctctcctatatttgcttccctagctaagaggtgtggactggattctccaaaattctgagtacaaagcatcaattttattgaatatgaatctatatttcattatcgttaaggttatttatctcacttactgttctgtgatgcagagttaatccgtttagacttatcggagttgggttgccaatctggactctcgctgtgattggctgcggcctttcgtttgatttttggtccatcacaatctgtcgcatgtaagtgtttagatcttccattatttcttttcatattttattttcaaaatctatacatcttcgctttacatttctcaccttattcaggtttgttggtgttggtgaggcatcattt

SEQ ID NO: 147325 - DNA, 1124 bp, Arabidopsis thaliana landsberg
atggagattgatggtagaaggctctcccttggaccttctaatattattctaagagggtgtgagcttaagaacactgcttgggctttaggggttgttgtgtatgctggtggtgagacgaaagctatgctcaacaactctggagcaccatcaaagaggagtaggctagagactcgaatgaatttggagatcattctactctctttgtttctgatcgtcttgtgtacaatcgcagccgcgaccgctgctgtgtggttgagaacgcacagggatgacttggacactattctcttttatagaagaaaggactactctgagaggccaggagggaagaactataaatactatggttgggggtgggagatattcttcaccttctttatggcagtcattgtgtaccagatcatgatacccatttctctctacatatcgatggagctcgtccgtattggtcaagcatacttcatgaccaatgatgatcagatgtatgacgagtcttcagattcaagttttcaatgcagggctttaaatataaatgaagatttagggcagattaagtatttattctctgataagacgggtacactcacggacaacaagatggagtttcaatgtgcctgcatcgaaggcgtagattactctgacagggaacctgctgatagcgagcatcctggatactccattgaaggtaaagaaaactagtttcttaataatgtttctgttgttaagagtagtatgtttttctgtttactgatttttgatgatgcctaaaaattttcatgatacagttgatggaattattttgaagccaaagatgagggtgagagttgatcctgtgcttcttcagttaacgaaaactggcaaggcaacagaagaagcaaaacgtgcaaatgagtttttcctctcactggcagcttgcaatacaattgtgccaattgttagcaatacatctgatcccaatgtgaaactggtagattatcaaggggagtcccctgatgaacaagcattggtctatgcagcagctgcatatggtttcttgctcatagagagaacctctggtcatatagttattaatgtgcgaggagaaacgccaaggtgatttagacatgtgatggctactttttggc

SEQ ID NO: 147326 - DNA, 1041 bp, Arabidopsis thaliana landsberg
tctccaaacaatggcgttcactcatcacctctcttcctccttctccttctccatcatcaccaccatggctcttcctcttcggtatccacaacacttcctctttccacaaccaatccttcgctttcgatcctctctccaacacctggctccgtctccctccttcctcctcttcctccgatcatctcgtcggatctaatcgcttcctcttcaccaccgctcctcgcttctccttctcaccaatccttaaacctaattggcgattcacttcccctgttcgatttcctcgaatcaatcctctcttaaccgttttcacaactctatctaactcatccaaactaatcctcgtcggtggatcttcgcgtatcggcggattagtcgatatcgaagaacgattagctgttcaaatctacgatcctgttctcgattcatgggagctttgttcaccactccctgctgatttcagatctggtcaggatcatcaaactttgacctcagctttgtttaagagaagattctatgttttcgataactattcgtgttttatctcgtcgttttgcttggattcatatacatggagtgatgttcaaactcttaaaccaccaggactctcgtttgcttacttgaattcttgtaatggtatgcttgttcttggtggaatgtgtgggttctcgtttaatctttggagtattgaagaaggctcgatggaatttagcgaaatcgcggttatgcctgaggatttgttgtttggattagttgatagtgatgatgaggatgacaagtttaggagtttgaaatgtgctggctctgggaatcttgtttatgtgtttaatgatgattgtcataagaaatttccagcttgtgtttgtgagattggtggtggtgagaatgggatatgtagttggagaagagttccttgtttgccttctccggttaataagtttcacaaagttgttagtttctgctcaacggtgtctattaccgatgttttccaccccgaggaagctcggattggcggttcgatccgtggttgagtttgcttag

SEQ ID NO: 147327 - DNA, 357 bp, Arabidopsis thaliana landsberg
gtcgtcgtcgattcaaaatccgccgctgcgcttcaacgttcgccggcaatctaaacattttccgggatggaggaagagatgacgaaccgtcgagtatcgaatcggactcgtaaggtcgctacgaagatggcggcggctcttacaagcaatgacaatcgaactcaggtgaaattgctgatttcggattcacttttttgatttcggaaaaaaattgaatcgtctttcaaaaatggttgattctaggctgctatagctaggctagaggctttagagaacgataatggtgctattgaagtgatagatttgaacgatgatgaagaagcttctcttgatgaagatgatgatctcggtgaataa

SEQ ID NO: 147328 - DNA, 560 bp, Arabidopsis thaliana landsberg
ctttacctgcttgattatctgaagtgaagcatcagtgagttgaaactatttggaagctgtctagccttggaaacaagcttttgtgatgtcactctttgctctaaatagatatttcttgtgatgctcatatcttgatctaataatattagatttttgtcttacgttcagcatccaaggtggatccattgcatcctgacttcttcgagttcacgggtcgtgtgattgccttagctttgatgcacaaagttcaagtgggtgtgctgttcgatcgtgttttcttcttacaattggccggactgaaaatatctttggaagatattaaggacaccgatcgaattatgtacaatagctgcaaacagattctggaaatggatccagagtttttcgattcaaacgcaggccttggtctaacattcgtgttggaaaccgaggagctgggaaagagggatacgatagagctatgtccagacgggaaactcaaggctgttaacagcaagaacaggaaacaatacgtcgatctcctcatcgaacgccgatttgccacaccaatcttggagcaa

SEQ ID NO: 147329 - DNA, 920 bp, Arabidopsis thaliana landsberg
tatgctgcgtgtattcaacgataccgctcgttatgttgaccaaggaggaggcaagagaaagggtacgtatcagctctttgtactattagcataatcatctgtccagtatatggtctcaagtgtatctgatttataatttgtaattggtgaaggagcctttgctgtttacctggagccatggcatgctgatgtctttgagtttctggagctgcgaaagaaccatgggaaggtatagtcatacctagataattcaccatatatactccctaaatgtaatttccatttgacgctgatacaacctcttaatacactttgtcgcattgcaggaagaacacagggctagagacttgttttatgctctctgggttccagatcttttcatggagagggtccagaataatggacagtggtcactgttttgtcctaacgaagctccaggtttggcagattgctggggagctgaatttgagacactgtacactaagtatgaaagagaggtgagtccctatttcatccatgtatatgctgcttctttagtaactcaaattcctgttatctcaataccagttatgtttgttcatatcttcagggaaaggccaaaaaggttgttcaggcgcagcagctttggtatgaaatattgacatcccaggtagaaacaggaacaccatacatgcttttcaaggtaagtaacagtcatcattttgtagctacacgttatggcgttataatcactggttcttactccaactttgaatactcttacactataggattcatgcaaccgaaaaagtaatcagcaaaatctgggtaccattaagtcgtccaacttatgcactgaaatcattgagtacactagtccaacagaaactgctgtgtgcaatcttgcatctattgctttacccagatttgtaagggaaaaa

SEQ ID NO: 147330 - DNA, 668 bp, Arabidopsis thaliana landsberg
gcggagatggagaaggttataagagtggtggtgataaaggagataaaaggagctcagtacggagtgcagctagagaatacggtgagagatcgattggctgaggaggataagtacgaggaagaagaagaaactgagctcgagaaggtcgttggctttttccagtctaagtacttcaaagctaattccattatcacttaccatttctcagccaaagatggcatttgcgaggtaaaaatctatcaaaatttcatatatttttagaaataaagtacgttaagtcatccataaacataagcatcaaattcttgtggaacagaggaactctgttttttgcgttatacagtataacttatactaatgagaatttgtttgaaagagtatatgttttagtttcttattgctagcgtacaaaacaatcaatgtcctaaaataattctttattgattggtggaagatcggatttgagacggaaggtaaagatgaggagaaactgaaggtggagaatgcgaatgtggtgggaatgatgcatagatggtatttgtccggaagtcatggagtcttaccgtctactattgtctccatcgctgattcaatctccgcagttttaacctaagaaccatggccccatacataaaaatttgaatgtgtgtgtgttttatgtagcattt

SEQ ID NO: 147331 - DNA, 403 bp, Arabidopsis thaliana landsberg
ctcgatgctaagaaaaaaaaacatcatcttctgagattttaaccttttaatactcgaaatagccaagaagaagaagagaaaaagatgtattgtcttcaagttgcagcatatcacttgttcttcaacgcatctcggatatgttatcttcttgctctgattatttttgtctttctcagattcttcgctattttccagaatatctcactagataatcgagtcggggagccaagaacggcatcgtttatgaggtttagtgatacacaacaagctcagggagattttaatctaactttctctggtgttttcttagaatctgtaatcaaagatgtcgctgaaattgttttttagttttattttgtagtattgtttaattatgtacttatcgttatattaattaccatgt

SEQ ID NO: 147332 - DNA, 3626 bp, Arabidopsis thaliana landsberg
  unsure (1)..(3626): unsure at all n locations
gtctgggggagaatttggactgttcttgccgaacatttcgtatctgctggtagccatcatgatgaaaagattgcaatgtatgccatagattctctgagacagctcgggatgaagtatttagaacgtgctgagctcaccaatttcactttccaaaatgatattctcaaaccgttcgttattatcatgcggaatactcaaagtcagaccataaggagcctaattgttgactgcatcgttcaggttgcttgcttgatctattctatattctaaaattaatatgtttccttggtttttgttactcggtagtatgcagccattatttcagcagctaatcaatctttttattttagatgataaaatctaaagttggaagtatcaaatcgggatggaggagtgtttttatgatatttacagcagctgcagatgacgaagttgaatcgatagttgaaaaatcatttgagaatgttgagcaaggtgacaaacagtccatcaaactattgcacttgtatccctgttttactcaattttctcactctttcgttttgataaatgtttgtgtaaccactcgtttgtttgcagttattctggaacactttgaccaggtgataggagactgcttcatggattgtgtcaattgtctaatcaggtttgccaataacaaagcttcagaccggataagcctgaaagctattgcccttctcagaatatgtgaggatcggcttgcagaggtttgtttttatagctaaatttagcttcaaaattcagcgttttactcttctattataacttcaatcctatgctctcccgttcgtatctacttttaggcctgtctttgaacttcctcactttcttttgattcttccctctgtaactacatgtgctcatttgcctgggatatgatgattctcagggacttatacccggtggtgttcttaagcccgttgatggcaatgaggatgaaacttttgatgtgacagagcattactggtttccgatgcttgccggtctgtctgatctcacatctgattataggcccgaagttagaaactgtgctctggaggtgttgtttgatttgctaaatgaaaggggaaacaagttctccacacctttctgggagagtatcttccatcgcatcttgtttccaatttttgatcatgtgagtcatgctggaaaggaaagcttaatatcttccggggatgtaaaatttcgtgaaacaagcattcattcccttcagctcctctgcaatctcttcaatacgttctacaaggtactgatgaagcttctacatttgctccctctgtgctcatcttgtccgttattactcaattaaatttcagggttgttgcagtacttgtcatgtttactgcatgaaattatacagaattttttttcttaacatgcaactttggacatattaatattattgcgtgctgcaaatttgaccaacgaatttttcacctttggagcaggaagtatgttttatgctgcctccacttttaagtttgctcctagactgtgcgaagaaatcagatcagacagttgtttcaatttcattaggagcattggttcacctcatcgaggttggaggccaccaatttagtgagggagactgggatatgctcttgaaaagcataaggtgaccatctttcataaaaaaaaattgtcttcaaatgttgctatctaaccttttctttctgttgccagagatgcatcatacacaactcaaccgctggagctgttgaatgctttgagttttgacaatccgaaaaagaacctagttttgacaggagacatagaggccgatgcctctgattctccacgagttgatcgtaatccggacgatattaaagataatgggaaagtgtccgcccaggcatctccaaggattggtactcatggtgcttccctagaatctgggataccgcctaaggctgatggttcggaaggttgactctaaactttttgtagaattttggatttatgcataaacaattttcaatattcacttatggtgttggaaaataattgttataataggacatattggggnnnnnnnnnnnnnnnnnnnnnnnnnnatttgcacaacgccatgttttgttaacatttatctttctcattaaaggtcgtccatcgtcatctggaagggctcaaaaggatgtggatgatgtgaatctgcagcggagtcagacttttggccaaagattcatggacaatctcttcctccggaatctcacatctcaaccaaaaagctctgttgcagaagtgactgtaccctcctctccatataaggtattttgcacttgcacaacttttcttccatttgatgtaccttactaatttacactcgtcacaggtcattccttttttcatagttctcttgtttttccgagtaatatgatacatttacgaattattttcttctgtagcatgaagatcctacagagcctgacagcagagaagaagagagtccagcattgggagctattagaggaaaatgcatcacacaattactactacttggtgctatcaacagcatccaggtatttagatgtcttctctgctttgctatgttgtatggtgttgcaaacactctcattccttagcacctggtccccagtaagctttaggggaaatgtgcgtggtgttgtgaactgacagttgcagctttcttgtttgatgttaattctgcagcaaaaatactggagtaatttgaaaaccccacagaagattgcgattatggacatcttattctctttcatagaatttgcttcttcctacaattcatattctaaccttagaacacgtatgaatcacattcccacagagaggttagtgaataagactttggactgagttataaatagatatttttatcgtccttatacatttttttctttaataggccacctctaaaccttctccggcaagagctggaaggaaccaccatatatttggacgtcttgcaaaagacaacttctgggcttgcggatgatgcatctaactcggaagatagactagaaggtgcagcagaagaaaaattggtatcgttctgtgaacaggttctgaaagaaacatctgatctccagtccactttgggggagactactaacatggatgttcatcgggtactggagctacgttctcccgtgattgtgaaggtaatacatcttaattgcttatgcatttgtcgctgagaatataaaatctatgatagagaggataattttcttatgtcattgtcgttccaggttttggaaggcatgtgcttcatgaacaacacaatattcaggaagcacatgagagagttctaccctctgctcacgaggctcgtttgctgtgaacaggcaagttattgaatttgtttctgttctagatatttctcacacaactgaactttgttttggagttagtttcgtactttcgagccacccattatgtaatcggtagagagctaactccacgagtgtttctgtctccagatggagataagaggtgcactagccaaccttttcaaagcacaattgaagccacttttgcaacagtaaatgatctatacgctatgatattgtggcaaagcaaaacactctcaatgtcatttacttccaacagtttgggtattttttttt

SEQ ID NO: 147333 - DNA, 1223 bp, Arabidopsis thaliana landsberg
aaatcgaagaagctacttcaaatggtgcggagtctcaaaaggtaggagaaggaggctatggtcctgtctttagaggctttcttgatcacacaagtgttgctgttaaagttctacgcccagacgcagctcaagggagatcacagtttcagaaagaggtaaaaaaaaaatctttcttcgtttctgattttatacaagaaagttttcatctttgagtaacatatgtttatgttttctcaggttgaagtgttaagctgcataaggcatccaaacatggtgcttcttcttggagcttgtccagaatttgggattcttgtttatgaatacatggccaaaggaagtttagaagaccggcttttcatgcgaggaaacacaccgccgattacctggcagctacgtttcagaatcgctgctgagatcgccacgggactcctcttcctccaccagaccaaacctgaaccaattgtccacagagaccttaaaccaggaaatgttctgctcgattacaactatgtgagcaagatcagtgatgtcgggctagcgagattagtccctgcagtagcggaaaacgttacacagtacagagtcacttcagctgcaggaactttctgttacattgatcctgagtaccaacaaacaggaatgttgggtgtgaagtcagatgtttattctcttggaatcatgcttttgcagatcttaaccgcaaaacagccaatgggtttggcttattacgttgaacaagcgatcgaagaagggactcttaaggatatgcttgatccagcagtaccggactggcctatagaagaagctctatctttagcaaagctttcgcttcaatgcgcggaactaagaagaaaagatagacctgacctcgggaaagagatattgcctgagctcaatcggttaagagagataggtgaagagagtttagagagtgtgttttatgcaggaaatcaaggaaagtctccaaacactagccaagtctcgattccggaatctccagctgcagaatctcaatcctagttttgatatgagggaagcaaatgtgctctaacactcaatttgcaggagttataaacaaaagcagagcaagtttctttgctgattagtgtatagcattagaggaatttggtattctgttaaataatcagttatgtaaccgcctttttgttaggcccataacggttttgaacaatcaatactgtatttattaaagaatcgataat

SEQ ID NO: 147334 - DNA, 243 bp, Arabidopsis thaliana landsberg
ctcggatctctctctaatcgccgatcggaatccgccatgggagtaccggcgttctacagatggctcgctgaccgatacccgaagtcaattagtgacgtcgttgaagaagaacctaccgatggaggtcgtggtgaccttattcctgttgatatcaccagacctaaccctaacggcttcgaatttgataatttgtatctcgatatgaatggtatcattcatccttgtttccatcctgaaggaaag

SEQ ID NO: 147335 - DNA, 2130 bp, Arabidopsis thaliana landsberg
atggtgttaaggtaactgattccaatggacctgaagggtcgaaaggagctgcaaagattgcctctaagcattctctgccgttgaatgatcatgcatctttcataaaaagaaatccctctgtcagcgcagtaaatgttgtagagaagaagcagatcaatacacaaaaacttgtgacgtctgataagtcgcaacccaagcttgaactgcagattgtggagccgactactgagatgaaaagagtgattgataagatagtagacttcattcaaaagaacgggaaagaactagaggctactcttgttgcacaggatgtgaaatacgggatgtttccattcttacgtccatctagcttataccatgcatattatcggaaggttctccaagaagccgaagaggtaattctgtttcaagttcttaaaatgttcctgctacaaatttggtgtgttttcacgtgctttttaaaccttgtgactgtaactttcactaaaatgtaaaacgttggttgatttcatatgcagttaaaatcaggtgacaaaggcgttattatcagaaaagaagacgtgaagcaagagaagatgggcaatgctgtaaaagatagcaaacacgggttgggagtgttttaccagatgattctgccaagaaagagaaactaaaaatggttagtgacaaaccaaaggtcgagttgcacaatgaaccattcaagcctgtccaaccgcagatgagggtcaatgtggatgcgaatactgctgctgctattcttcaagcggctagaagaggcataaggaatccccagttggggattctaacaggcaaacccatggatgagacttctcagacccttggaaatgatgtgagttacccttcatctaagtcccctgatttggccaaatctacaggtcaatcactctctggctcgactgctgctagtgaagctgattcttctgaagcaggcttgtctaaagagcagaagttgaaggcagaaagattgaaacgtgcaaaaatgtttgtggccaagttaaaacctgatgcgcagccagttcaacaagctgaaccgtcgcgaagcatatcagtcgaaccgttggactatgggatttctggattaggtgctaaggctgccaaagaaagagacagtagctcgattccatatgtagctgagtcaaaactagcggatgatggtaacagtgaaagacgatcaaagaggaattaccgttcgagatcacagagagatgaagatggtaagatggaacaaggagaagaggaagagagcagcatggacgaagttacagaagaaaccaagactgataagaagcattcatgtagtagaaaacggcataaacataagacacgatactcttccaaggacagacattctcgggacaagcacaagcatgagagctcctcagatgatgagtatcacagtcgttcgcgtcatagacacagacacagcaaatcttcagataggcatgagctttatgattcttctgataatgagggtgagcaccgacacagatccagtaagcatagcaaagacgttgattattctaaggacaagcgtagccatcatcacagatccaggaagcatgaaaagcaccgtgattcatctgatgatgaacatcatcaccaccgacacagatccagtagacacaagcacgaggactcttcagacgttgagcatggtcatcgtcacaagtctagtaaacgtataaagaaagatgagaaaacagtggacgaggagactgtttcaaagtcagatcagtctgatcttaaagcatctcctggagataacatcccgtatctgcaaaatgaaccatctcaagtttcggatgagctaagagccaaaatccgtgccatgttagctgataccttgtacgtttcttctaactgaacgactcttgaagactttctagttctatttaggtgtctactagtattaagttgacaatgtcaatgattgggtctgatcgattagcgggtttgttcggttttcaggggagatggtcggtgagcatctgaagcataaaggtcaccgatgttgcctacgagaagaagagttgtaatattaaattttaatgtattttgcaaactatttacgaaattactctgaaaaagaccttttaaagaaaccttttt

SEQ ID NO: 147336 - DNA, 1058 bp, Arabidopsis thaliana landsberg
ctcgtaccctgaactgatctcctagcttcctcctgtggcttagctgttctgaacccaaagcttacgattgtgagaaaggtaaaaaaactttaaatcatttgcaagtcatttttgtaatttagccaccaaggacatgttagaaggcatctatgtgtgggcaagggcttttgctctttttttctaagagcagacacgtattgtggtgtttgtttgcattggcaagagttattcagatgaattatgtcttactgtcgtgaagttgttaattattggttttgcatgggattctaaaattgcatgtgtctttggctggtgcagcactcatcgacctcaagtgcagcagccaacggagcaggggcttcggagacagcagatgatgatttgcccagtgtcatgacttgcgcaaactaccttaaactccctccttattctacaaaggtgagtcatgtcttctattcttcttgagtccatgttagtgtggttgttggtgagcctgaggagttgtatgttattgaaacaggaaatcatgtacaagaaactgctctacgccatcaacgaagggcaaggatcgttcgacctctcataagcaacatatggctgtgtttcttcctcccctctcttgtacattacatcggaagactggttttgatttctctgcttttttgggtttttatgatctgacaaagccgaagataccccaaaatccaggtgactactgttgttctcccggagactttgtaatggaggggatatagggttgtgtcttgtgatgtaaattttgtctttgcaggctctgcagaaggcgccgccattattgtgtagataaagaaagatgataggcttatcttttccttccttttttttttttttcttcttcttcttcgtttcttagattccctctatgtaaaagatcgatcatttcatttggtcggtcaaaactatggaaactcaagttcgatccgtctcagaaaactagaatatggacggcactttgaatatgtttaacaatgagttacatatatagtttagcttcattatataagctctcttattacatc

SEQ ID NO: 147337 - DNA, 560 bp, Arabidopsis thaliana landsberg
atatgggtttatggagacagcttcaaatctatgcttgtcgcggtggttgttcccaacccagaaaccgtcaacaggtgggctaaagatctcggttttactaaaccattcgtagaactctgttctttcccggagcttaaagaacacatcatttcagaactgaagtccacggcagaaaagaacaaggtttgtttgactttgtctgaatcaaaattcttcaattttattctaaaataaatactaaaagaaatattcatggatgtgagaaatatagctaagaaagtttgagtacatcaaagcggtggcagtggagacaaaacctttcgacgtagagagagacttagtgactgcgacgctcaagaatcggaggaacaatcttctcaaatattatcaggtttaattttatagattagtgtttttattatttcctttatagatagtaaatgttgaatttagatatttgcagccattctatccgctaacgttccattatacaggtgcaaatcgacgaaatgtaccgcaaattggcctcaaagaaaatctgaaagtattgcgatgatgtg

SEQ ID NO: 147338 - DNA, 1412 bp, Arabidopsis thaliana landsberg
gattatgctcagctggcgaaagatgctgtgccgtttcttccttttcatacagttccaaaggaaagttcccgttctgcacattttcctggtttcacaaaggttaagaatgtttacatcacaggacacagtgacggaaccattagtgtatgggacatgacctgttcttttcccattcttgtcttgtttctgaaagaacaggtaagagttctcggactcttttgtgttttccgcaaaggcagatcttatgaaaagttgcatttgttgtgtgtgttcttagcagatagatcaagatgtatcttcacgcggaaatgcggcattgacagctttacattatgacagcaactcaagacttcttgtttctggtgatcataacggaatggtaaaaaagcatcttacccaaaatactctatggaatgtgactaacatatatacaggcttatatatgatcgattctaaacttgtgcaggttcgcctttataggttcaaacctgagccatacctaacagaaaacagttttatccctttccaaggtatgttagaacatgtagaagttgggtttactatccttcagacagtatgtgttttcaatgagttgatattctttgtttttcaggaagcttaaagaaaggaaataaccatattgttcaaagtgttaagtacatcaagcttactggttccataacctgtattcagaagagccaaaactcgaaacatctcgctattggatcagatcaaggacatgtaagcttgtacttcttccacttccttgtaggattctttagttgaggtgattgatgcgttaacaccggtttacttacaggtttctctggttgacattgaggaagcaaatgtgttatacacaaaacacattgcaagtgatatatgtccagggatcatctccttgcaattcgagagttgcattgtgcaaggcttcgagaagaacgtgttagtggttgctatgagagactcgtcggtttttgctctggacagcgacacgggaaatatgattggaaccaacatgattaagcctaaaaagccattcaaggttctgtatatgcagatcctaggtaggttcaactctcctttttataagtttaaatcaacaatcaaaatctcaacgattttttctcatactttttatttgcagatggaaagcaagatacttcaggaaatggatttgatacgagcagagagagcacagttgaggagatctcgataaggcagccttcggttttggtttgttcggagaaagctatatatatctactccttggctcacgttgtccagggagtgaagaaggtcctccacaagaaaaagttcagttcttcacccatttgctcagcttccacattctatggaacctctggtgttggtcttacacttgttttcacagatggaactgttgagataag

SEQ ID NO: 147339 - DNA, 944 bp, Arabidopsis thaliana landsberg
atgcctaatccgccgttttgggtctccgattctccctattggcatccagtaagttcccacatttatgaaacctttactttagctctttatcatatttgttttcatcatagtatttaacattatgaaagctgaatgacaccgagtatttttatcatatgcttgtctttctaaccagcatttttgcatgtagatgcataacgggacgactccgtatttaccgaccgtagctacggtaatgaaccaacatttataagattgtttccgtatgtatacccctttttgtttctatatatatgttttaaatcgtatttttgattggtaattgtatagagatttagagcaccgccagttgccggaatcccgcatgctctgccgccgcatcacacgatgtacaaaccaaatcttggatttggtggtgctcgtcctccggtagacttacatccggtaagaatctaatataatgaattgattgttgtcgagttttgacttttcgcatttgattatgtaattatgtatttttgactttttgtgtatatatattataaatggaacagtcaaaagagagcgtggatgcagccataggagatgtattgacgaggccatggctgccacttccgttgggattaaatccgccggctgttgacggtgttatgacagagcttcaccgtcacggtgtctctgaggttcctccgaccgcgtcttgtgcctgaaacgcacaagatccgtaggcaagcgagaaccaaacaaaaattcgacgacatgtctttcaattattgtacctttatttttccaagggttgtttttgttttgacccttgttgtgttaagagttactctttacttaatcgtcccatgtgactaataaggagacccttttcatatgtatctagggtgctaagtacactctagctctattaacgcaaataaattacctatattttctct

SEQ ID NO: 147340 - DNA, 619 bp, Arabidopsis thaliana landsberg; identical to SEQ ID NO: 66635

SEQ ID NO: 147341 - DNA, 2078 bp, Arabidopsis thaliana landsberg
cttttttgaacatgagtttttgattaaacttaactatatggaaagtcttgtggagcagttgaaatccatcaagaaggataagttttcttgtaatgataagtggttaacccttaagcttcaaatcaacaaaaactttgaggtaacgcttgttgattacgagatcctgaacaagatattttgggatatataattgtgagcgattgatcgatagtaagatttcggacatatattgggactttatctgaaaacactaaacaataagtcgtaaattgggagtacgtaaaaacattaagggtctaaatgaaataaaacctataatataactaggtttagtgacgtggcatgcacacgtagattaagcaatgccttggcaacacgtatgcaaaaacccatatgtgtgcacctgtgaagtgttccaataacaattcaaaagctccctgagcaagtgagaagagaccacactgagaagaaaaatccttcaggttatcgaaaattcccggattttactctttgggcggtggccgatttcttacgcgctctttttgtggcgactgttgtatacgcgcgagccttcatggacacgaaggcggttggagtttctaaggatacggcggcgtcgatggaagcgtcgacggtgtttcctgggtttaaattctcgccgacggatgtggagttgatttcgtattacctgaagcggaagatggatggcttggagaggtccgttgaggttataccggaccttgagatttacaatttcgagccttgggatttacccggtttgtcttcgaattcgaaccaattgattcttttgtgtctttcttctacttggaatttgattttgttgttcttcaggcttcaggagagatctctattttgggtgcctaagatataaagtttctattttttggctcttggattggaattgacaattttttttgtgtgtttgttctttgcagataagtcgattgtgaaatctgatagcgagtggttcttcttctgtgcgcgtgggaaaaagtatccacatggttcacagaacaggagagcaacgaagatgggatactggaaagcaactgggaaagagcgtgatgtgaagtctggttctgaggtcattggaacaaagaggacgcttgtcttccatattggtcgtgcaccaaaaggcgaaagaactgactggattatgcacgagtactgcgtgaaaggagtatctctggtaaaactgttctcgagagtttgttttttcttatagattaattgttaaccattacataagaggtggtgactttggctactttttgagtctctaagaggaatacagtaaaattttaggagtttgtctttggcttgagttgattgattatgtttatgtaaattctaggatgatgctatggttgtttgccgggttaggaggaacaaagaatacaatagtggtacaagtcagaaggcaccaaagccaaattcatcagccgagaagcatgcgaaagtccaaaatggcgctacgagttcagggagcccgtctgattgggacaacttggttgatttttacctagcaggtgaatcaggggagaaactactcgctgagatggcagagtcatcagaaaatctacaggttttgtcacctggcttctaattgttgtatgatggttcttgattgttgtcgttcttcttaatgaatgttatgtgtgtgtggtttaggtggataatgacgaggatttctttgcggatatcctaagagacgaaatcatcaatctcgatgaagcggtgatgacagggaacacaccaaacgaagtgccaacactagaatcagcatcaatggagataagggtacttcctttaccaaacatgatagacaaacaaatgtcatcactgttagaggaaagaccatcacagaagaagaaaggaaaagacgccacggaatcattgtcgagctgcttcgtgggtttatactcgatcaaatcagtcaacaaggcacgatgggatgttattataggtgtagtggctctgatagcaatgttgttttataaagaataagaggcttatggaagtagcgaaacacagtgtcctagctatgtttgtatcat

SEQ ID NO: 147342 - DNA, 320 bp, Arabidopsis thaliana landsberg
gctctagttcttggatgctttaaacctctctctctctctctctcaattatttttttttctatttcaaaaacaaaaaaaatgaatatctctcaaaaccctagccctaattttacgtacttctccgatgaaaactttattaatccgtttatggataacaacgatttctcaaatttgatgttctttgacatagatgaaggaggtaccaatggattaatcgaggaagagatctcatctccgacaagcatcgtttcgtcggagacatttaccggggaaagcggcggatccggcagcgcaacaacgttgagtaaaaaggaatcaac

SEQ ID NO: 147343 - DNA, 780 bp, Arabidopsis thaliana landsberg
atgccttgtttcacagtggaagacaacaccgagagggtcgtgagaaatttaatggcactcgagcaatgtcattaccctcgaactacttttgtttgtgactacatctccttcttggatttcctcatcaataccgatcaagacgttgacttgctcgccaagaaaggtaccaagttggatattcatattataagttaccgacgtttttttttcttcttctctcaattctaagatttgtaacaaattttacgttgaaaggaattgtaaagaactggttaggacatcaagaatcagtgacagaaatggtaaacaagctatgtttagggctcgtggatttcggatctcactatagcgatgtagtcgaaaacctcaacaaacactacgacaatcgtctcaacagatctgtcggcactcttcggcgagtttatttcaaagatctttggaccggtactgccaccgttgccgcagttgttctcctcgtgttgactttgattcagactgtggcttccattctccaagtgatgatgcagaacgacaataagtctccgccgcctccggctccgtcccggggactatagattgtttcttgttatacacgaaaccaaactatatttgtcttttttttcccacacaaaattatgtttaactgtttttctctttcaatcgactttgtaaataatgcttctttttcacgttgtttagttatcccaccatagctacatcatccatcattttcgttatgtatcttcaagttaatcataaagtattgtttgcgttcaaaaa

SEQ ID NO: 147344 - DNA, 635 bp, Arabidopsis thaliana landsberg
ggcagcgtttgcgagcttaaagcagggtaatagtgctattaaggccattcaaagcgaattggaccttgatgatgttcaaaaactaatggatgatactgctgatgctaaagcttatcaagatgtgagtcaaaatactttcgggtttcgtatcatttgtttatgattcattattacgttatccgctttgtcagaatgtaaatatcttcttatttgatcactgcttttgtgtggcacattttgttctgagctcgtctagtgtgaaaacctctataatcttttttgtcgagcttttgtgtttgatgactctatttacatttccgaatgtcaggagctgaacgctatattgggagagaaactatcagcagaggatgaggaagatatattagcagaatttgacaacctagaaagtcaggtatgggtttacaaaataaatttgtgtattattatctttactagataaagagactaatgttgatgtgtgttttgcttaaagcttattgttgatgagatgcctgaagtgcctacaaaggagtctgaagaatctgagaagctggatgttctggacgcgccaacccaaactcctgtcgcttccaatgcgaaaatcacaacagctgagtccgccacaaaaacaaaag

SEQ ID NO: 147345 - DNA, 1366 bp, Arabidopsis thaliana landsberg
gcatatattgaagcggctgaggatatgcttgaagatgatgttgtttcaaacaaagctataggaaactttggtttaagcttgttgaggcaacaagccaagaatcctgataagctttctgttttgacccattgcaacactggcaggtattgatttagctagattttctgaattgcatagataccgtctgcataagttactcaacttgagtaatagcatgttaccacatatgtgtatgcagcttcaaccaatagagttgtgtaatggtttttggtgttatgtttatgtggtagattcctagtaaggcattaactaagagttctatttgtctctgtagccttgctaccgccggatatggtactgcccttggtgtcatccgtgcactccatactcaaggaatcttagaaagagcatactgcacagaaactcgtccatttaatcaagtaaaactcctaaattaatacttttgctttctcaatatcgtaagaagaagaatccgtagaataccttaagctgttagggacgataattacctgtataattgacatatgtgttcatcaaaacggtggtaaaagcttccaaacaatgaaggaaattaggacagatacttcttgtggctgttgctttatagagtttccatatctctgttgaactgttgttgaaagtcttttgaatttacgacaaaatgataattgacagggatcgaggcttacagcgtttgagttggtgcatgagaaaatccctgcaactctcattgcagactcagctgcagctgcactgatgaaagatggtcgtgtagatggtgtcatcgttggagctgatcgcgtggcttcaaatggtacactcaaacaccttagataatccgttttctctccacaaatctgattccttatgagtgaatcacttcttaaccaattcattgacatactccaggcgatactgctaacaagattgggacttacagtctcgccttgtgcgcaaaacatcacgggatcccattttatgttgctgcacctcttacctcagttgatctgtcactttcatccgggaaagaaatcgtgatagaggaaagatctccaaaggagttgctgcacacacacggaggacttggtgaacgcattgcagcaccagggatctcagtttggaacccagcttttgatatgactccagcagagctgattgcaggaatcataaccgagaaagttcgttttaccagccttgcttgttctggaagatatttatgctcattttatctgaatctctcaacgtgtttgtatatgcagggggtcataacaaagaatggcaatgatacatttgacaaaagcagctttgccaagaagataacaggaaactcatctggtttaagtgt

SEQ ID NO: 147346 - DNA, 1137 bp, Arabidopsis thaliana landsberg
aattttctgaagtgaatgcaaagatgatgatggaagagaaacttgtgatcaacgaattggaactagggaaagagcttgctaaccgattgatgaacaatctcaaacacacttcttctgtcgattccaacaaaaccttgatctctgatatcctccgtatttaccagaatgccattttcatgttgagcttcaaccaagacaagaacatccttaagcgaagccttgagatcgatggaaaagattctaaaaacgtcttcaaaaagaggtaaattgagctaaaagattggttctttttctctctttcagttccaaactgtgctcatgtgtctgattcctctgttttttttttggtgattttcaggaaagtatcggagaagaacacagagaaagttaaggtttttgttgcaacagaacaagaaaatggctctattgatgatggtcactgctggagaaaatatgggcaaaaagagattcatggatccaaaaatcctaggtgattatcattcattcatcatctgggaatttcaaagttttaatttttcttttgctatatttgctaaatcctatgtctctgtttttggttacagagcatattacagatgcacgcatcgattcacacaagactgtttagcagtgaagcaagttcagaaatcagacacagatccttcccttttcgaagtgaagtatctcggaaaccacacttgtaacaacatcacatccccgaagacgacgacgaacttctctgtttcattgacgaacacgaacatctttgaaggaaacagagtacatgttacagagcaatcggaagacatgaaaccgaccaagtccgaagaagtgatgataagcctttgagatctggagaacaagaagaacattttcagaacgttttctttctctaaccatgagattgagaacggtgtgtgggaaagtaaccttttcttgggaaatttcgtggaagatctttctcctgcaacatcagggcctgcaattaccagcgaggttttatctgcacctgctgctgttgagaattccgaaactgcagattcgtatttctcgtctttggacaatattatcgatttcggacaggattggttgggcgtcgtagctttgaataattgatttggtgaatgtaatgtctct

SEQ ID NO: 147347 - DNA, 247 bp, Arabidopsis thaliana landsberg
atgacggagagggacatagtcacacaaaacatgatcgatgaagaagaaggtaccccaagaataggaccctatggagcttgaacaagatgagagaaaacagaaccaccggtgcctcccgatgtcggagatgcataaagagagctcaggttgtccgaatctgagccggaattgagatgacggagcagagcaccgatcctgcgatcggaagaagaagaggaagagaaatgagtagttttcatttttgttt

SEQ ID NO: 147348 - DNA, 2486 bp, Arabidopsis thaliana landsberg
aaagtaccgtgactacagagaatgctggaacttcagatgtaagtcaattccatcctaataatgaaatcattattttgccctgggttatctatcttttctacttacttaactgatttttaagagtacatgcaacttgacttttagtattctgacatatttttcacctgttggaatgaagatctccataactccaaggactttatcttgcacatctagttatgaaagaggtggtagcaataggcatcgagaagaacataggcgtgacagaagtgaaactccgcggtcaagacagagaaacacttatgatgagatggatcactaccgacggagggaatcttatcgccaatctgaccgagactatcacggagaaaagcgtaggagatacaatagcgattggaggactccaggtatgctaaagattgttgaagctcataaagctatcaatttatgagcttattgacataaatgtcactacatttatctctatacaattttgtctattttcaattttttgttcccataagtgtgatgagagttgcaaacacaacacttatttggcctttttgatggagtgtaggtaggtcagactgggatgatggacaggacgaatgggaacgtagtcctcacggagacagaggctctagttacagcaggcgacctcaaccttctccatcacccatgttagctgcagcttcacctgatgctcgtttagcctccccgtggctggatacaccacgttcaactagtatgttgtgttttaattttaatatttgtaatttggttctattaattgcaacctcgggaaaagattaacaacgggatttatcaccatacccttcttcacatgcagtgtcttctgcttctccatgggatatgggtgcaccttctcctattccaattcgggcttctggatcatctatcagatcctcaagctctaggtatggtggaagatccaatcagcttgcatattctagggaaggtgatctgacaaatgaggtatgcacccatgatcatgccacttcttattagacagaactgaatttccaatttgtttcccatgttttaagaatccatgtcgagcttgcttgataaatgtttatgcggattatagctctcttgcattaggattttttttgtttgttttaatacctatgccacatgttgttatgtcttatataggggcattcagatgaggatagatcgcaaggagctgaagaatttaaacatgagatcacagaaacaatgcgtgtggaaatggaatatcagtcagatcgtgcatggtaagtattactttcctttagaggcaggaaaagattggtgaatcaataatgttttatgaactgagagcatagtctcactcttcacgttcattgttgaaccatttatagattttataaagcctgtatgaatagttgttgttgcaatttcccaggtatgatacagacgaagggaactcactgtttgatgcggacagtgcatccttttttcttggagatgatgcttctctacagaagaaggaaactgaactggcaaagagactggtatttatctataccaataacgcactctttctttacaagtttttatatggcactgcttatatctgatctattatctatggctaggcttttccgctttgcataaatcatctaatttgatttgattctgactgaagcatcaatcgcttatctctttttactactcttgattaagtatacttagctaaattatgttgttttgatatgtaagttcagattattataagtgtaggttagaagagacatttgtaagttcaaattatgttctcgattgaatgctttgtaatatttgtaatgcaggttagaagagacggtagcaaaatgtcactcgctcagagtaaaaaatattctcagctcaatgcggataatgctcaatgggaagaccgccagcttctcagatctggagctgttagaggcacagaagtgcagactgagtttgatagcgaagaagaacggaaagcaattcttcttgtacatggtatatagactactagaatagctcaaagttaaccaataaatgtcaaggttaaatgagtagtatttgtaacatgccaggtaatattctattttttgggtaattgcagatacgaagcctcctttccttgatggaagagtcgtttacacaaagcaagcagagccagtaatgcctgtaaaggatcccacatcagacatggctataatttcacgaaaaggctcaggtcttgtcaaagaaattcgggagaaacaaagtgcgaataagtcacgacagcgattctgggagcttgcaggttctaatcttggtaatatccttggtattgaaaaatcagccgagcaggtaactacctaattggttgttggttctctatcgatattgtggttgttggacatagtgtgacttggtaatgatcatcttgcagattgatgccgatactgctgtagttggtgacgacggtgaagtagaatttaaag

SEQ ID NO: 147349 - DNA, 1130 bp, Arabidopsis thaliana landsberg
atgagcactcccatggagattgccgagcaaaaacctatggtggaggacccgattcctcttccaaacgcttccatggaggtctcttacaaaaaccccattgaagcagcgactattccagtgcaaatagccgtcgctgagccagtcgctacacccaatcctcctccttgcctccacgagaacaaattcctcgtatctggtacttcaattctccttcctttcgattctggatttcaattatagagcttctctttatgatttccattttctgtggtttctagtggaggtctgcttaaagccttcaagcacggctcgtctagaggatgtccagagagctgtagaacggtttgtatcacattttctcatctattatagtggagctctgcttaaattaactctgtgtttgttttctttttgataatgggatagttttgtattttgctctaggatgctggaaaatagaagcatgagctatgcagatggactggttttgattcctgcagacgacttgttcctagttgataatgtgcaaagaatatgcatttgtgatacaggtattataatattaaaccttatcaatttcaccaaacttttccttttgtaatcagtgtttaggtttcatgctagcatacttgtgggtttgatgttactgatatcttctttgcttctgtatatagaggaatgggtgaaaaataatgatgttctcttgttctggcaagtgaagccagttgtgcacacctttcaggtaaatgcaaatcttattaagttaaaatagccagtcagccttgttttctctaggtgtacgtgacttgtttgtaatttacatccagctcattgacgaaggaccatgtgaggacttgtgtgcagatggacaacctgctagctttaacgaatggattctacccgcaaaggagtttgatggcttatgggaaaggtctgtctggaattactatcttgacgtggttataaagcagtaatgactcttgacacaatttgttctgtggtctggatctttttgtttgtgtagcctaatatatgaatctggacttaagcaaaggttactacgttatgctgcgagtgcattgctgttcacccagaagggtgttaacccaaatctcgtttcatggaacagg

SEQ ID NO: 147350 - DNA, 858 bp, Arabidopsis thaliana landsberg
tttttctctctctcctccctacttcttcattaaatcttgtggttctctttattgttttgaaactgtgctctgctcggagagtgtagaaaagacaaagctaaagtctctgtgtttcttctcagcaggactaaaaggaaaaaagggtaagagcttggagacaatttttcttccttcataagattctctctttttaaaccataaaaaatcaaaagattgtaacttttcaattatttgtttgctttatataataatctttgtgtaccgtccagaaatcgattgctaatgtcgggtgagaaacaagcggaggagtcaatagtagtctccggggaggatgaggtggccggtagaaaagtggaagattcagcggcggaggaggatattgacggcaacgggggcaatggatttagtatgaagagcttcctctggcatggcgggtccgcttgggacgcctggtttagctgtgcatcaaatcaagtaagtacaatttcgataatgaataattcatctagtagtaatatttactataagaaaacaaatgtttctttattataataagaccaaattactcttttttcgtttgtcctaaagtttttttttaatattctttcataaaacattcttgaaataaataacaacttaagttataaaaacaaaaatatatggttgcaggtggcacaagtgctgttgacgctgccgtattcgttctcgcagttgggaatgttatcaggaatattgcttcaaatattctatgggttaatgggatcttggactgcttatctcatcagtgttctttacgtcgagtatcgtgcccgtatggagaaacaagaagccaaatccttcaaaaaccacgttattcaa

SEQ ID NO: 147351 - DNA, 491 bp, Arabidopsis thaliana landsberg
cttcttcttcttctagttgctgcgaaactctgaaaaagatgcaggtatgttctcgatccgaaaccctagcttttgttggtaaattggaagaagaaataacctaattagcttcttctacctttgattctctgtctgtttaatttatctatgtcgaagagaattggcttagacgaaattaggtcgatttgtttcttataaagcatatatagatgaaatcgggaacaatttgctttaaatttaacatcttttggtttgggtttttttcttttgcaggcaagtgataggtttaacatcaattctcagcttgagcatcttcaagctaaatatgttggaaccggtcatgctgatttgagtagattgtgagtttcttttgattttagtgttcaaatttttatatgcattgtttttattggctactaatttgtggaattggtttaaatggtacagtgagtgggctgtgaacattcagcgtgatagttatgcttcataca

SEQ ID NO: 147352 - DNA, 694 bp, Arabidopsis thaliana landsberg; identical to SEQ ID NO: 11065

SEQ ID NO: 147353 - DNA, 1191 bp, Arabidopsis thaliana landsberg
tcaattagaattcagctgataccatgtgttaagcagtcctgatgcattggtggtatctatttccagtgaagggtgtttggacagagacaaagatgacaagggcgacgtaaaatccctttctacacctcgtgaaagcagcgttaacaattatgcgatagattgccttgaatctctcaaattcacatacaaggtgtagagaaaaacatttagtcttacacccagttgcagcgtagtgacatattacagtgctaacatctatctgtaaaagatcttaactattttccttttaaggtgccgtggccgcttgagcttattgcgaacagcgaggccattaagaagtataaccaggtaaccctttctcatccagctatttttttggggaaacagtgtgatgttctatgtgttaattgtttaaatgaaaacaggtgatgggatttttgttgaaggtcaagcgagcaaaatatgtgcttgataaggcacgaaggttgatgtggaaggtctttgatatctctcaaaccatttctttccatttagactgcttcatttgacatccgaatccaatctcagatagcctgagtagtcttttgatatacgtaatgtactgaggagtcataatgatgtggtttagtttgataaacttaatgactttggtgtttatgtattatagggtaaaggctctgcaacaaaaatccgcaagcaccactgtttactggaacaaaagctcctcaattttgtggatgcttttcatcaatacgtaatggatagggtaatgtctaatactggataattggttctaattaccgacaaccgtattagtttccgtagttataagtatgtgcaagtgttgttgcaaaattggaagttgatgttatggcttcactgggttttacaaacaggtatatcacactgcttggcgtgagctgtgcgaagctatggtaaaagcagggtctctagatgaggtcatagatgtacacgagacgtacttgttatcgattcagaggcaatgttttgtggttcaagaaaagctggtaattgaccatttgtatatgcataataagtattcggatttgtagctataaaaccaagtatctggtgggttctgtacacagtgggcaatcatcgcaagtcggatcaacatgattctcggtttagctctagaattctactcaatacaacagacgctgagcagcg

SEQ ID NO: 147354 - DNA, 683 bp, Arabidopsis thaliana landsberg
cttgaacctgtgatcattgagttagaacgacaaagagctcctgtcgtcgtgatatctcaccaggttatactccaaacgatcttgtgcataatgtctaaaaccttaagttctggagggatcaaactatggaagcttagctgtgtaaaacttatgaaaaaaacacaacttgccactaagttctaatttttcctctaactgttggtgtttacgcaggctgttctgagagccttgtatgcatattttgcggatcgtcccctcaaagaaataccccaaatcgaggtaaaatctgaattagaaaatacgagactatcttagaacgattgagctataagctttcagagagtcttggctgcaagccacacacataataacatattttggatgtttcaacagatgccacttcacactataatagagatacagatgggagtttctggtgtgcaagagaaacgctacaaactcatggactgaattcaaacaactattaccacaaattctcaacaaactctcgtcctaaaggtttttatattttacgtatactctgcaaatcagattgcagatatcactgggttgcattttggtaaaccagtttttcctttctccaccaaatctttttccttactctgagatgtcctgttatataaaaatgttacttattcttgatagaaattgacttttatact

SEQ ID NO: 147355 - DNA, 2590 bp, Arabidopsis thaliana landsberg
atggggaagaagaaaggaaacaaagcagcagcttcaacagatgattttttacaaaccctcgaagatttcaccagcaaagagaattgggacaaattcttcactctcagaggcaacgacgactctttcgagtggtatgctgagtggcctcagctccatgactcgcttttacctctcctccaagattcttcatcttcttcttctgattcgcttcagattctggttcctggatgtggaaactcccgccttactgagcatttgtactatgctggattccgtgacatcactaatgttgacttctccaaagttgttatctccgatatgcttcgtcggaacattcggactcggcctgaactgcgttggcgagttatggatataacaaagatgcaggttttggttccttttgtgctctgtttttttttggtttctagctgatccttgttctgtctctcattcactaaatatttttactttttctattacgcagttggctgatgagtcttttgatacggttctagataaaggtgctcttgatgctttgatggagccagaagttggtaccaagctgggaaatcaatacttatcagaggtcttagtgaacttcttttgtttaagggattgcataaattggatgagtgttggatcaaacaatgaaagttatgtgctttaaatgcttgagcttgattcagtttgatcattagtaactcttttctcaggccaagcgggttttgaaacctggggggaagtttatttgtctaacgttggcggagtctcatgtcttaggtacacctccaacacctttgcttctgttattattattatgtgaagctatttcatagttattgttatcttcattctattgtctgttttagtgacattcttagtgtttttgcgcagcattgcttttttcaagatttcgttttggttggaagatgaatgttcattcaattgctcaaaaacgctcgaagcttaagacatatatggtggtggctgaaaaggaaaattccgttttgttgcatgagataacctctgctttcgaacttgtatctcttggccgcaatgatagtcaggtaattatttcctgtttagtttgactttaacacaattgtaaattcaaccacctttcccttcatatatcgattttttctagctctttaaacacttgtgtaattctccagtgtaatatatgattctgacttacaatgtagggttctggcatgcgtgaagccgtcgagagcgagaacaaaatacgtagagactgcaataatggctcagacttattgtactcgcatgaagatttgaaacttggtattaaaggagatttggcagagcttactgaaggtcgccgtataaaatttactttgggtggccaaggaagcaatttcagttatagggccgtgcttcttgatgctcagaaacaaactgagccatttgtatatcattgtggtgtttttcttgtccccaaggtaagctttgtcaacatcataaatccttaatatttaagttctggaaattgctgtgaatatattgtttaattttgtttgatctattaaaaggagtgttaaatttcagactcgtgctcatgagtggctgttctgttcagaagaaggacagtggcaggttgtcgagagttctcaggccgctcgtctcataatggtaagctttttatggtaaaacctctttatatacaccatgttaccgtgatctattttcggcatgagattctaaacacatcttaatttcttgatgaaggtttttctcgacagtagccatagtggagccaccatggaggatatccaggtaggtactatctacattttgagttgtctgatgcattatgttgtttacttattgatcgattttatctggtaacttattcatctcagaatgatttatctccaatggtgacacaactagctcccagaaatgatgatgaagctcgcattccgtatgtttatcggattttttttttactatattctccatgatttttggtgcaacagtaatcctaactcattttgtttccgccattatcgcttgttaattagtagttgaattgaattggtgctgtaggtatatgatggcaagtgatgggataaaaaagcgtgatactgtccacgaggtattattactagatatacccaattaatcacttaataaaactgttatttgttgtctcttctatttctcgcctttcacagatatgatcatcgtttcctttattgatctccgtgattagacttttatccaccactattttagcaaattttaatactactgattggttagaatacgtagttatggggatcttttttgtttcttactattcatttcgatttgtaggttacatctcctatgactgggaaagtggttgttgaagatgtggtttatgaaagcgctcctagtaatttagaagacttatctacttctagtgatttggcatttcgacgacttgtattcaaaaggactgagggtttgatacagactgaagctctgcttgtagaggatggtgagattcttgaacagtctcagaaagaaaaaactaaaaatgtttcccaatcgaaagcgaagggaaataaaaagcaaaaccaag

SEQ ID NO: 147356 - DNA, 2399 bp, Arabidopsis thaliana landsberg
atgtcatgagttctgcctccttacagcagcaatcaaatgccttgagtcaacaattgggtcagcaaccttctgttgcaggtacattcactgtttaggtttagctctgtggtttatgatatgattgttgatagacactatttctgggtttagcaactaacatctttggcaaaatattatccaagttttatataattgattaaagtaaactttgttaaggggtttaacatcttggcaattacttaaatactagatttgttggagcctcagtttttggattcgagtatagaaagtacagataaaaatatcagcaaaataaagggctttgtctttgatgtttgtgctgatgtagaccatgtcagaaatgatgatcaatcccagcaaaacttacctgatgattcagcttccatagcagcttcaaaagctattcaaagtgaggatgactctaaagttctatttgatactccggtaagcaggaatagttctgtgctctcatttattacttgttggtaactttttgatatacgctttccaccagatagattttaaagcggataaaaaacttctgtctttgttagtgttggtgagtgttgtgatttgtcattccttcgcttaaaattctcatatgcaattcaatagtgaatgtggtttatggatacacataatgacagctgtattctattaaaccaagcaactaactaagggtggcctctgatccttcatgtgttttctgttttatcttcagtcgggaatgcccagctacatgttggatccagtacaagtatctagcggtcctgatttctctcctggacaacctatacaaccgggtcaatcttcaagtagcctcggggtcattggacggagaagtaactctgagttaggagccattggtgacccttcagctgtagggccaatgcatgatcaaatgcacaatctccagatgcttgaagctgctttttacaaacgtcctcaaccctcagattcagaacgtcctagaccctattctccggtacatcattcttctgaattctacttaaataatatccgcttaaatctcatattgcctatgattttgaacagaggaacccagcaatcacacctcaaacatttccccaaacacaagcaccaatcataaacaaccctttgctctgggaacggttaggcagcgatgcttatggaaccgatactttgttctttgcgttctactatcagcaggtaccaaaatctcaatgctctgttccatcttttatttatcttcttttccccggttcacgtcaaccttatcgactttttttccctgtgtttgtgtagaactcataccagcaatatctagctgcaaaagagctgaagaaacagtcatggagataccacaggaagttcaacacttggtttcagagacataaagagccaaagattgcaaccgatgaatatgaacaaggagcctacgtttacttcgatttccaaaccccgaaagacgagaatcaagaaggaggatggtatgatttcattcatgttttccgattacacattgttcttcttctttggagatggtaatcgtaatgttttttcttaaatgtctgtgtaggtgccaaaggatcaaaaacgagttcacatttgaatacagttatcttgaagatgaactcgtcgtatagaatagagagagatgcatgtttgtatatactctcgagcaagtgtgttattatttcctgcgactatttgtactcttcttttcaataaactaattacttttagtttcaacaagttgaaattcttcgttaacgactcttaaagacaataaaagccagagtatcatcatgaaatctttaatgcttagattgttccaaaagccgatttttttaacaaacggaaaaaaaaaaaaaacaaacggggctgttcatcagagatctagaagcttttgtttataattttttttttaacatttccaagttataaaattcctttttttggtacaccattttgtacgaatttctaaaaaatcccaagtcatcattctctaatggttgagaaaacaccaatgactttggaagattattccaagaatgaagaattgcattaatatcatgtcctgccacccaaatactaaaggaggcttgttgaacatgtaatgttgaactattcccaatatatttattgaaatatagtccaattattttttcttaaatgtctagaacagaaatgtgcatgtaccgaagattaagcagtgtcggttaaataaaactgaaaaaagaaggaaaaaaaagaagaagaaagagttatgacttgtaacaatgtgactatgagtatggggcttgtttagcggatcggtgaaatttggttattacaagcacgtggagagtgtagttttccggatccgacgtgaagaacggcatcgtttaaagtag

SEQ ID NO: 147357 - DNA, 925 bp, Arabidopsis thaliana landsberg
aagagcaagaactccttcacgggtcacggcatgggagatcgtcctaaaacaccgcgaaaagtaacatttacactctttaattcttctctctttcacattacctgaagaggtttgactcatctttttttctttgtattgatgctataggcatcacagaacagctatgccccacccccacttcttaaccaagaaaaaggtcgcattgcttacccgatggacccagtaaagaaaaagtctggagctttaaatcgggatgaaacagagaaggcgaaagcgaggacaaaagaaaatggtacaagtatgaatgacttagcaaacggtcaagatcatattaccaatggagaatgtgagtcatgttcgttggatgctgaagggaatgaaagaagcaacggtgttggttctgtgatcagaagggatcaatataacctccctagctttcagaccaaatacgaggaagcaatcttttttgtgataaaatcgtatagcgaagacgacatacacaagagcatcaagtacaatgtctggtctagtactctcaatgggaacaagaagttagacagtgcatatcaagaatctcagaagaaggctgcagacaaaagtggaaagtgcccggttttcctgttcttctcggtatgctaataggatttttcgctatatacgtattcagttttgcgacgtcttcatggtctctgatcgattttattggattcaggtgaatgcaagtggccaattctgcggtgtagctgagatgattggacgagttgattatgagaaaagcatggagttctggcaacaagataagtggactggctattttccggtgaagtggcacatcatcaaagatgttccaaatccgcaactacgacatatcatactagagaacaatgagaacaagcctgtaaccaatagcaaaaacacacaagag

SEQ ID NO: 147358 - DNA, 289 bp, Arabidopsis thaliana landsberg
agcaaagcgtttctatcatttccttaatattgaaatggtgacagacttcaaatccctactaccagttatcggtacgtaagaaaccgtatattcattattttcagcaaaaatcttcactaactaaactagttaatgtgataatgttgttgcagacatcagtcctttactggccaaatgtgatgatttcgacatggctgaggatgcgggggttgtgaaagtagtcggaaaactggacagggcatgtcgggacgtcggattcttctacgtggtaacaaattttcgaaattag

SEQ ID NO: 147359 - DNA, 3086 bp, Arabidopsis thaliana landsberg
atgggaagcgccgatctagtcgatgatcggacctttaacggtgatttcagtgtggaaggagttgctaagttgaaagagatggtcaaggataaactcaaggagtatatgggcgattacacggatgacattcttgtggtacgattttatcgattctccatctttttcagaaaattggaatatccgcttttggggtttattattcgtgttccttgtagctagaattgctgagttttggaattgaactttagttgttcttattgtggtgctaagaagtctctttagaattcaaatgacaacaaagtcttttgcttgcaggaatatgtgatcgtcttgcttagaaatgggagaagaaaagaggaagcaaataatgaattgaagatatttcttggagatgatagcgactcttttgtggcctggtatttatatatttcttatctttgtgtaacaaagtttattgcttttttagaaattcatattcactaggaggatatatgcaggttgtgggatcatctggctgaaagtgtagatgagtactttagttctaatgtggagggaactaccataaaaagctcattgataagcagtcatgaggataaagcacttgttcctctggattctgaatatgataagggacgtctgataaatcaaatggtgcacgtcgtggtagacaatggagaagccagccgactaatgtctctgagatccctcctcttctgagctctgaggttcacaaaattcataactacgagaagaaagatcataaacaccgacataataaaaggtctccatctccgcaggctcaatctcagaggaaaaggtctagaactgacgactcacggaatgaacaggtctgttattttgttaatttctgttgaatagcaatcaccacgtaatacttggattggaaaattgaaaaaaatgctaaaatagtttattggatgggatattgtgaagacattctcagtgtaaagttttggtcagagggcatctttgcgttctgctttgtatgagactaacatgtcagacgtccgtattactcttatctttgtgttataaggttgccttgttccagtatttgtcctgctgtaaagccaatgtatggatactggttatggttctctgattttgttttctttgacttgtttgatagagggaagctaaacctgatgtctctcgccggctgcttcagtttgctgtgcgagatgctctagctatatcaaggccggcaaatagttcgactgaatcctcattaaaacgtcttcgttcagtggtgtccacatctactcaaaactcatctgaccctgatccagctcggaaaattcgatctgttgctagggttgtgaatcccatggctactgttatgaaagctgtcatcgaagcagccgaagatgccaagaaaccaaaatctgggagaagtgtctttgacagaattagtcattctactggatcagagaccctggaccagaatatggtacttggtgaagtttcccccaaggatgaagaatctaggaattttagccaaggtcaggaagcggtacagcttcaatacacacagagtcttgccaataatggagtgtattttgagaacatgacaactaatgacactggcttgaatccagatttttcgtctgatcgaggcagactcggttcaagtgttaatgtgtctcacccaagtacttatcttgggaacagaattaacaatccaaatagtctgcagcatcgtttagtcgatgactccaaacgagttaaagggacaaattatcaaaatcgccttcctgaagttgcaaccaagcataagactgcaagtttctcaggcaatatagatacagggaaaacagtaaagttagaggagcagaggaaaataccagatgtgggtctgcaaagatatatggacgaaggcagattagtttctagtgaagctaccactcaattatctacgcagaaaatcttgggtgatacaatagggaatggaaatgtaagttccatgttttagatgcatgctcttactagctatttcaatgatagtcatcttccacaatatgttggccatgaaatataaaacatctcgaaagtttcttgttaatatttacccctcatgtctatgtcctgatgacttatttcgttcttactagtgatatcaactagactcctaatacaagctgccttgttgttctttgataggtaaaacctgctgccagtgtgaaagaagaatcaacgaccaataaatctgttcctggtgagttgttaaatatatcagtcttaagctatttgaagattcatgctattggaatttctattttttttttccttgacaacctcacttctttggtccctgttgttgtagttcctatgttaaagttgatctaagatgatatactggcctttgcagggacattatccactacccgccctttggaagatgctagttctcgaacaatctttgtcgccaatgtaataattgttaatgtttttatactcgtgaacttgaattgagcaaaaacttgtcaattggtgtattaatttgaatgtgattggtcgtaaaacaggttcattttggtgccaccaaggacagcctttcaaggcattttaacaagtttggtgaagtgcttaaagctttcatagttactgatccagcaacaggacaaccaagtgggtaagttgtctgaattcatgaccccaattaatgtcttgatatgtcacagttcagttatcgaggatacgttagtgacccaagttgatcgccttttgcagatcagcgtacattgagttcacacgcaaagaagctgcagagaatgcattgtctctggatggtacctctttcatgtctcggattctcaaggtaaatattgaagcccgtgttcaactgtttaccatagccaacttattgtgatctttaggattggttagcatcttagttggataaggaatgagtttgtgtatattttgatggatacagattgtgaaaggaagcaatggacaaaatcaagaggctgcatcgagcatgtcatggtctcgaggtggaaggttcacaagagccccatcatactttagaggtggtgcagttagggggtcgtctgttgtagagg

SEQ ID NO: 147360 - DNA, 1160 bp, Arabidopsis thaliana landsberg; identical to SEQ ID NO: 50225

SEQ ID NO: 147361 - DNA, 640 bp, Arabidopsis thaliana landsberg
tcatgcaggtgacttcaagcagtgaatctttgtcaagacaccttttgcgatatagggatatgaacaatcttgtatgtctacggctaaataacttatcactatctcggatagcctctgttgagaagttgctgtttgtccaaatgttagaccttagtcacaatgagcttcattccactgaaggtaagtttctcgatttcagatgttgcatctgtgtggtaaatgtgactaaatggtgtatgttggtcttgcaggattggaggcaatgcaacttctctcttgtctaaatctgagtcacaacagaatccggagtttttcagcgctggactctctaagacatgtgaagcagctgaaagtgttggatgtttcacataaccacattggcaagcactcagtggacacaactagatacctttgttcttcaccgctctctaattcagagttgggtcaggatgatttaggatttcagaatcctggattggttacgaaggactgggatgcgtattgcgtgttaagagatttgaatctgaaacagttagatatagcaggaaatgaaattgcaggggaggaattcagctcttttgtcctccaggttgtcccaaagcttgtatggctcgatggccagaagaaacttgggaattag

SEQ ID NO: 147362 - DNA, 929 bp, Arabidopsis thaliana landsberg
cctgttggggaagaccaggcggcatgaacaacacaccgttcctgtacattcgagcagaatccaacagtgattttgttgagatcgccgcgcaaaacggcaccgttccaaacagacgagccgtcccagactgtgacctgaccagccagcacaacgttgggtgccacgtaagcatcaacggctaccttcggaagccactgtcccaaaggaatgatctgtcgttggcctctgtagtcccatttcacacgatccgtcgacggcgacaccgtgaattgcggtttaggtaactctgtcttcctcgccaacgccgcttccgcagcgaagcaacgacggatcaggttagaagtgactcctctccgagacaatcgagctatcgaagtcgccattgctatggattttggatttcttcaaggatttgcaaagaggaaaagagagagagtggtcgtcgaaagattcacctgaaattaaacgagatacagcatattgggctttttaacggaccacaggcccaataatagtaaaacgtcgtcgtttcacttattaggtggatgtacattaggtgtcaagtagcatttgaaaaccaaattaaaccagatcccaaacaaactctacagattgataccagattcaaaaacaaaactggatgttgtatcatttggtgaaattttgattatattcacaaatccgaaaatgttacaaacaaaacaaatccagcccttacaatcaaattgaaataaaaccaagcagcaccggtttgtctggctaaacagttaaccggaatagatgtggacgtttatggcgatggtaaagatagtgatgagaccaaagaaaatgatggcgtgaacgagaatcgaagcgccactcgtctgcatattaccgaattcgacaactcgacctcccgccggaatctggaaaagaagccccggcgatag

SEQ ID NO: 147363 - DNA, 543 bp, Arabidopsis thaliana landsberg
gctgagtcatgtttaaaaagagacgtgcacaggcaaagaagcagtcttgagtcaatgttctgttatgataaaccaataccagaggaaataatcgaggagccagttggattatccatgtcagagagagagattggtgataatcagcgttgcacttgttgtgaagctaaaggtgcattgctttgttccacttgttctggaactggtctatatgtagattccattatggagagtcaaggcatcattgttaaagtccgttgcttaggtaagcctctcttatcctacatgctctacttgttctatgcaaattaccttcatcttaaccatttgttgctaatgttttaggttgtggtggaagtggtaatattatgtgcaaactttgtggtgggcgtggtcacgtaggacactgatgactccgtgtttcacttgtttccactcatggttctgttttacctattcgccacttttcttgctaagatcttaatgtaaaatcctactctttgagttccatacatagatttgtgttcttgtactgaagtaatctct

SEQ ID NO: 147364 - DNA, 972 bp, Arabidopsis thaliana landsberg
gctgacaaaatgataaaggaggaggggaagtttctgtgtgtgtcaatgggacatgagatcatggcacttgatgatttgtagaagctcgcgacacacgcgtgaatgatctcatgtatttccccgctaaaagcgcttacgagctctcaagtgttgctgggaacgcggacaaagttgcagcttttcaggaggagatggaatatgtgagaaaaaagatggaggaggatgagaagaaggcagaacacatgaaggccaagtacaaaacttatacaaagggtcatgaggtaacatatagtccacattgccttaaatgttaattctgaaactatattttgtttggtgtcaatgtttaacggatttgtacatttgacagaggagggcagagaccgtgtggacccaaatagaggcgacattgaagcaggctgagattggtggaacagaagtagagtgctttaaagcattgaagaggcaagaagagatggctgcatcttttaggaaaaagaatttgcaagaggaagtgataaagcaaaaggaaacagagagtaaactgcagactcgctatgggaatatgttggcaatggttgaaaaagcagaggagataatggtcggtttccgagcacaggcattgaagaaacaagaggatgttgaagattctcacaaactgaaagaagctaagctagccactggagaggaagaggacgtagccatagccatggaagcttctgcataaaaacttgagttttgtattgcttacaagttttaaggagacgtagcttgactttgtattggtaagtttttttaatatgagtcatgactttgtataaaggttatgagatattctctgtttgtatgctttgcaagagtcaagaaatttgaatgcttcaggatctatttggttccaaatgtaagtacaatctgaagatgtttaatcctcctctctttcaatgcaaattttatccttggctagaagagatc

SEQ ID NO: 147365 - DNA, 554 bp, Arabidopsis thaliana landsberg; identical to SEQ ID NO: 73127

SEQ ID NO: 147366 - DNA, 1270 bp, Arabidopsis thaliana landsberg
aaaagcgtcactaggaagctgcgactatttgactgactctgatttcacgcaactccttgtgagattctccgattgcttcgcctgagtttctgggttaactctccacgccgtcactttgatctttgcttttccggtggggtttcttcatccacttgttgatttccgaattcacacattttccgaatccacttggggccaaagaattgcaaaccctaattttgaatcatcaactctattctgaaccaatttgatttccgttttttgcagatctttagggtttttgtttagggatttatcgaagactctgctctatcatggtaaagtttaacctaaattgaagtagcaaagtatcatttttatatgagcgagtgtttgattgtctctgtttgtttttcacagtctggaagaaaagaaacggttttagatttggccaagtttgtagataagggtgtgcaagttaagctcactggtggtagacaaggtaagccaagtttttctgattgtgctccaaagatgatgattctttttactgtttctctgagatttgtttgatagttgctatgtatttttgcttgcagtgactggaactcttaaaggctatgaccaattgcttaatcttgttcttgatgaagcagtcgagtttgttcgaggtatctcttatcttacctatatctactacattgatcttgttaggctacaattctctagtggaatctctgtattgctatgaagtttattagtctggttcatacaaatgtctccatgatgctattggaagatatatagaaattttgattacaagagactgtttgatgcttgatcatgttatgtttgtgatatgaatgagataatatcattctcttagctatattttgaaactagaaatgggatcatatttccatagatctaactcagttttatgacccttgtgttatgttttgatcagatcatgatgatcctttgaagactacggatcagacaagacgccttggtttgattgtatgactcattcaccatccttttcattactataaatgtagtgcaaataagatcattgtttcttctagcatcttgttatttgtaatggagttccatagtttagatgctaaatcatgatggtttgtcttgtttttaggtttgccgtggaacagcggtgatgcttgtctcaccaaccgatggcaccgaagaaatcgctaacccgttcgttacagcagaggctgtctaaaagactttcttctcaaacaatatgtctctctattagtttaacttg

SEQ ID NO: 147367 - DNA, 3259 bp, Arabidopsis thaliana landsberg
caaaatttgaagaagaagaaaaacctctgagcttccaatttcatggcgcttcttcagagagcttcttatctgcgtctctattatttacggctcatgggttctcgacctcgtctcttctctagctctctctctcctgctcttcaccgtcacagctcgacgctctcctcgcctccattttcctctccaagtcccaggttctcgcttccgctccttctcctttttcgttttcctttctgggttcctggatattcggcgaaatataagaaagtagcttcgtattcttggttcagtactttggcttgagttattgaaattgccaagctctctaatttcgtgttaagtttccgataaaatggcctagaaattggaaatttatacttggagtctcttgattctagccttttcataaagtatctgtgtttggagacttatgggtttaggttattttagagaaattgctgtgaaattttgcgttttgagtgttatcttaatcagtggttttcatgcggttctgaattcttttggtttaaagtgaatattctgtttgcattcctcaattggttgtttaattgagttatctttcagtttcaggttaaagtttcagttaaccagtgttttgagtcaaagactgatacaacgaaatgctatttcatcgaggttcttgtctactgaggcttcccaagagactaccacatctaagggttacagttctgaacagattcaagtaatcttttttattatcctcttttctactatatattgtgtgaagtcatgattttaatttcaatctttatatgttcttatgatccattaggtgctggaaggcttagaccctgtaagaaaacgtccaggaatgtatatcggaagcactggatctcgtggtttgcatcatttggtaaatgctttatccgttgaaacccctcgtttgaactggctcttgacatctttttatgtttttctaatgtaatctcttttcttaggtttatgagatacttgacaacgcaattgatgaggctcaagctggttatgcctcaaaggttgatgtcgtcctacatgcagatggctcagttagtgttgtggacaatgggcgtggggtatgtgatatgtcccatcttctctttaatcatgcagattttgtgctagttttggtatcgctagcttttcgtttcttacatctacccacatatggagagcaaacacatatgttaaccataatctattctagtttttccagtgtcgttgatatataaatctttctttcagatacccacggatttgcatcctgcgacaaaaaagtcttccctggagactgtgcttacggtattgctacaaacttttatattttttcacaatagtaatatggagattctgcagtttatttgtcgaggttctgcagtttatgttggagcttcatgaccatactattattattatgcgatttacctgccatcttttttaattctgcaggttttacatgcgggtggcaagtttggtggcacgagtagtggctacagtgtgtctggtggattacatggtgtcggtttatcagtagtaaatgctttgtctgaggtgtgtcctaatctttactcacattgattcttcttttatcattttctctatatctccttcagtgatttgtgaaaccctaggctactatgggatttttacgagtaaaaagctggaatgtttccttattgaattctagggcatgttgttgtcaaatactcttccttcacaagaactgcaggacatttgtttggaatgacttgaagtttaacctagctgatgactataattatcagtatagctaacttagaagattctttgatctattggtttacaggctctggaggtctcggtttggagagatgggatggagcataagcaaaattattctcgtggaaagcccataactacacttacatgtcgcgtcctccccctagagtcaaaggggactaaagggacaagcatcaggttttggcctgacaaagaaggttttgcctgttttccactcttgactaccttgcctaagccaaaacttgatttaatgattaattttcctctatggaatgaactattttcagttttcacaactgcaatcgagttcgaccataacaccattgctggacgaattagggagcttgcatttttgaatccaaaggtgaaattactttacttaaagcatggtaaaccatgacaatttttcatcaagacatgagaattcattgtagtttacttcataaagcatcttcacttttggcagaggctgctgttgaatgattcttttgtcataaaatattactctatttttatgtttgcaggttaccatctctttaaaaaaggaggatgatgatcctgaaaagacccaatatagtgaatactcttttgctggaggattaactgaatatgttagttggctaaatactgataaggtgagaatctacacattggcacttttggtgtatatgaggcctatcatattctttatgtaagtaggctaagatgattagaattttgaaaaggttctgtgaaacgatatgcaaggcagtggtatcaatgaatgtctttttctactaactgaagtgagcaagatatgttgagcactacttttgataagttgatggctatcaatggatctactctactccagcatatctatggactattatgactcaatttatacagaagtgaactcttagcattattatcttcattatcataaattattttactactttcttattcctacgttaaaagttaactgacaattcttttctgtagaatccaattcatgacgtgctgggtttcaggagagagataaatggtgccaccgtggacgttgcccttcaatggtatgttattctacataattacattgtccaactagtattctgttacgaggtaatatgcctaggtttaccagacccacacaattgaacagttcggctgcatgattttgtggttttactcttacctgtaaattgtgtcaataaaagtggtaaacctttgttcatgttattctcgacatgctgtcgtttgttttacacacaaatacacataatataggactattctaaatggatctgatgttattggctttgcacatttttgtaccaggtgctcagatgcatattcagacacaatgctgggatatgccaatagcattcgcactattgatggtggaacacacatcgaaggtgtgaaagcttcattaacaaggactcttaatacccttgcaaaaaagtcaaagactgttaag

SEQ ID NO: 147368 - DNA, 1585 bp, Arabidopsis thaliana landsberg
ggggagaatagttcgctgaacgagcgatgctctacgttggttaaaaccgtggaatctaaaaaagaagaaatcaaagaatggattagaaattatgaccagattgttttgaagcagaaagctgttcaagaacagcttagttctgaaatggaagtccttaggacaagaagtactacttctgaagctagggttgctgcagctagagaacaagccaaatctgctgcagaagagaccaaggaatggaaaaggaagtatgattatgctgtgggagaggctagatctgctcttcaaaaggctgcttcagtgcaagaacgttctggcaaggaaacacagttgagggaagatgctcttagggaggaatttagtatcactttagctaataaggtatcattctttgtcccatttttttaagggatgaatttgagcttgtaatcatcagtatatattatcaatagttaatcaattgcaggatgaagaaattacggagaaggctacaaaacttgagaaggcagagcaatctctaacggttctaagatcagatttgaaggtgagcgttatcaaaatgatagtatatttatgttagcctcgtctatcttcctatgttgtaaacgtttgtgcgaagtagattacttgttactcctagcattctgttaaatatgctgaaacagttgaacctttgtggaatgtggatcttagcttgtgttgtgtcttttgcaggtggctgagtcaaaacttgaaagctttgaggtagagttagcatcactaagattaacattaagtgaaatgactgataagttggacagtgccaacaaaaaggctctagcatatgaaaaggaggctaataagttggagcaagagaaaatccgtatggaacaaaagtatcgatctgagtttcaacgcttcgatgaagtcaaagagagatgtaaggcagctgaaatagaagctaaacgcgctactgaactggcagacaaagctcgaactgatgctgtcacgtcgcaaaaggagaaaagtgagagtcagaggttggcgatggaaagacttgctcagatcgaacgagctgagaggcaagtcgaaaacttagagagacagaagactgacttggaggatgaactggacagacttcgtgtgtctgagatggaggctgtctccaaagttacaatcttagaagcaagagttgaagaacgagagaaagaaatcgggtcattgataaaggaaaccaacgcacagagggctcataacgtgaagtcacttgaaaagctgttggatgaagagcgtaaggctcatatagctgcaaatcgaagagccgaagctctttctcttgagctgcaagctgcacaggcacacgttgataatcgtcagcaagaattagctcaagcaaggttaaaagaaaccgcacttgacaacaaaatcagagctgcgagttcctcacatgggaagcggagtagatttgaagatgttgttgatatggacattggagaaggaagtgatagaatcttgaggactaataaacgagctcgaagcacgagaggagatgatcacggtcctactgatgaaggcgacgaggactttcaaagtcatcaagacatgg

SEQ ID NO: 147369 - DNA, 836 bp, Arabidopsis thaliana landsberg
catcgttatgtggaagttgaagataggaaagggaaatggagaagatccgcatttattcagcagcaataacttcgtcggacgtcaaacatggaagtttgatcacaaagccggctcaccggaggaacgagctgccgtcgaagaagctcgccggggtttcttggataaccgttttcgtgttaaaggttgcagtgatctattgtggcgaatgcaagtgagttctttttttcctcatgaaatatcttatactaatcttcgccttttttgttgttacaactaccaatgtttattttatttggtttgattgtatgtacagtttttaagagagaagaaattcgaacaaggcataccacaactaattgctattaacatagaagaaataacgtatgaaacaacgacaaatgcattacgaagaggcgttcgttacttcacggctttgcaagcctctgacggccattggccgggagaaatcaccggtccgcttttcttccttcctcctctcgtaagtttcttcatctctctctctatacctttttgacgatactctatcttatatttctacgagagagataattaatcttcttaggatcaaaggtaaggttttggcgctttctttattacttgcatggaaatatcaaatatggaataaagaagagaaagacttactatgtttacgaggagattatggacaccaagaactttttggtttggttatccaaaacaaagaatttgtttcgcaaaaatcaaaagactaaaacgagagctagggtggaatttgaacgacttttttttatttttataaatagatattttgtttgtacattaccggacatctggag

SEQ ID NO: 147370 - DNA, 2926 bp, Arabidopsis thaliana landsberg
attgtttgtgtaggttgatcatcatgagcctgagaatctatctctgctgagattcaattcgttgtgggaacacgcttatcgccatgactctcttcttgtgttttctacgggaagatcaccgacattgtataaagaactgagaaaggagaaacctttgttgacccctgatattaccattatgtctgtaggaactgagattacttatggtaactctatggttcctgatcatggttgggttgaggctctgaacaataaatgggatttgggtattgtcaaacaagaagctagcaacttccctgagttaaagcttcaggtactctttggctcgaaacatagtgtttttgtctcacaatcttgcaatggttcaatgacatgagtttgattgctgcttgtaggcagaaactgagcagaggccacacaaggttagcttttatgttgaaaagagtaaggctcaggaagttactaaggagctatcacagaggttcctgaaacgtggggtgagtttgctttgataatgttattgtaggaactgtgatttaccttgagataccgtgactttattgaaatggtttatgctggttgtatcagctggatgtcaaaataatttacagtggaggtatggatttggatattttaccacaaggtgccggaaagggacaagcgcttgcatatctgctgaagaaactgaagactgaggggaaactccctgtcaatactcttgcttgtggcgactctgggaatgatgctgagctgtttagtattcccgatgtttatggtgttatggttggttgctcttcaatcatggttcaccatgtctctgaaatattatattttcatcgcaatgttgaaatctgttagttcgttcccaggtaagcaatgctcaagaagagctgttgaagtggcatgctgaaaatgcaaaagacaaccctaaggtaatccatgcaaaggagaggtgtgcaggtgggattatacaagccattggtcacttcaagcttggtccaaacctttctccaagagatgtctctgacttcttagagatcaaggcagagaatgtgaaccctggtcacgaggttgtgaagttttttttgttctacgagagatggagacgtggcgaggttgagaactctgaggcatacacagcaagcctcaaagcttcagttgtgagtatataaccgaatttagataatgtattgcagttggattaaatacctgactcttgttgtgtcaacctctttcagcaccccggtggtgtgtttgtccatccatctggtactgaaaaatctctgagagataccatcgatgagctgcgcaagtaccatggagacaaacaagggaagaagtttcgcgtttgggcagatcaagtcctggcaacagacactactcctgggacatggatagtaaagcttgataaatgggagcaagatggtaagctaaaccttattgcctaaaccggcatcatctataactcaaatcccatcagaatataacaatactttctcttgcaggggacgaacgaagatgctgcacaacaactgtcaaattcacctcaaaggtatgagattgtgttataagagtagctcttagagttttgttgatgatcgatatcgcggaatgtgcaggaaggggaaggattggtgtgggaacatgtacaacaaacctggtcgaaagaaacaatggtgaaggatgatagcagctggatcatctgagtaacatcatctctctacagattaagacttcttcttctctttctcgtcttatgatctctgccttaaatcattggaacttcggtataaaaacacatgagatccaataaaacattgtcttcataaaacttggatctcaaaactcattctacaatccatattatctataactccaagttaacacagttttctttgtatacccctttatagtatatgatattatccatttggcatttttttgaattgattaagtcaattcattagtattagtttacatataaaatcacatatttaaaggtctaaagtctattataatcaattctctcaaatattactactccacttggacttcggaaaagcttattcctaattggattacgaattagtgtaatccccttataaaagaatttattcaccttatagaaagacatagcaaaaaaaaaaaaaaaaaaaaatcaccttgagagatttgaaattggacgaacaaaaatcacaagccctaagctcaagtggatacatgacaaaaattcagtaattatagaagaaacaagactcgtgcaacatatcttaagtaagtactcctagtagacaacctcaaatcgttttagttcgttgctatgttacgaagccattaatattgttttagttttcatattcacattagtccaaatagtcaaagttcgtaatttgatattttaaaattgttactaaaaacgtcgacagaagattacaaattcctacaaaaaaaaaaagtccaccaaccattaatttcaaaaccttccacttccaatccattatttattttcttttgttctttttcaagtttcaactctcctctataactgtttcataagttggaaaagaagagagttattaatttcatcacaatgcttcccttcctcgaaacttcgatcatgtcacaatatcttctaatctctttcttctctcatctaaattaacagcaacaaaatctcaagaagatggagagctcaattgggttcatgacagtcttcgccgtctctggaagcgtggtgcttcttgcagctcagcttcacaagcgtctcctctctggttacatggacaagctcgaacctcctactaacgaaagaaagaaaaagaaaaagaaagtgagctttgcagaagatatggtggagccgtcagggaacaacgaagagtatcgccggagttttcgcaaatcatcaaagttggaggatgaaagatga

SEQ ID NO: 147371 - DNA, 262 bp, Arabidopsis thaliana landsberg
cagcatggaactcagaacccgaagaggatcaagtgtggaccagaaggagggaataagacactgcttggtgagcctaagccaccacaattccgtgatcttgatgcatgctaaagctaagttctgtttgccgcagttttatgtggttcaataacgcaaaggctatagcgatgtatgtttgacgcctgtaccgcatcaaattgagtttgcatactctttgtagtcttcttggttttggaattagacccattttaaacaaattgcc

SEQ ID NO: 147372 - DNA, 407 bp, Arabidopsis thaliana landsberg
taaagcaagcaagaaaatatgcatctgattaatgcggtggcggcggcgaggattttatccggaatcggacaatctaacggtaataacggaggagaagcgattccgtttggatcgtttgagtggatcacttacgccggaatatcttgtttcctcgtactcttcgccgggattatgtctggtcttactttgggacttatgtctcttggtcttgtcgagcttgagattcttcaacgtagtggtactcctaatgagaagaaacaagccggtgatgatttttgattccttctttctcaatcaaattctttatcattgaatttgatttctgattgttttgaatgatgttgtttcagctgcgatttttccggttgttcagaaacagcatcagcttttagtgacactgcttctgt

SEQ ID NO: 147373 - DNA, 320 bp, Arabidopsis thaliana landsberg
atgggccagttcgatagagccgttgaggatacatcagcggcactagccgtccgtcctggctacaccaaggctcgactcagaagagccgattgtaacgctaaggtaatttaattgtggcaaaatcgtaaatatagtataaactgggggttgtaaatataatatgtttttgtgtgtgtatggttggttgcagcttgggaattgggaatcggcggttggagattacgagatattgagaaaagagacaccggaagatgaggaagtgataaaaggattgtcggaggcacagaagcagctcgtgaaacgccgtggccatgactctt

SEQ ID NO: 147374 - DNA, 676 bp, Arabidopsis thaliana landsberg
gtatttggcggttcttaaggttaagaggcatgtgacgttgcgaattgatcatagcttgatggagaaatcaatgagcaattccatgatgtatgaatgtcaattagtttctgcaactcaacagagaaaatattcacatacacttagcaatttgtatacttttgtgttctccttataaggttagctatatactattgtcaagaaacatatatgtgaaatttccaccaccaaaaaaaaaaagatttaaaagtgcatcaacatacacataagcacatgttttatatgaacacatggataccaaatggattcatcacatggataggaaaaaacaatcttctagacaatcaggacggcaccatactggttttgtgaataacgaaagagagactatgtgacattattggtcaccgagacgacgagaagaaagcaagggctttgggagatgaagttctgcagttgctgcaccatggcttgtggctgatgaacggtgaagcctgcaacggaatgagccttcatgctttgtaggagcacagatacagaccgtcttccccaaccggttgctctggctgagcagaccaagggagtccgtggaccacgacttcctcatcgacaatcccgtcttgtttctgttctcaccttcgtccttcacacggctaaacggattcttggttttgagtga

SEQ ID NO: 147375 - DNA, 756 bp, Arabidopsis thaliana landsberg
ataaaggacaggcagaagaaaaagacgaaacgtatcagaatagatgctgaaggagatgcaactttggaagagttagaagatgttgaccgacaggataacggacaggaacctttggaagaaccggaaaagccaaaatccagtaataaaaaggtatattatgctacaaactcactcttttcttttacctttctcattaccaaaagtctgtatcaatattcgttcggttcatgatctatgcactatacaaggcctagctagctgcaaataaaacttgagttggtctacttatggagcttgtcttggtgctaaattgataacttctggcttgagtatatatactaaaagcatatggttatgtatggtgatttgcaccccagagccccttcaaatccgaaagctagagctcctcagaaagcaaaggaagaagcaaatggtgaagatactcctcagaggacaaaaagggtaaagattcgaacaaagagcataaacgaaactcttgaacctgtattctctgcctctgtaacagaatcaaataaaggattcgatccaagtagctccgctaactaatccgaagatgattagagcttcaatagatattttaacttcttcaggcaggttttagacaattggttcctagtttttgagccaagtgtacagatttgactcagttttctttaacgtacatcggtcctgagtagaacttaattggtacatatatgtataaatattattagtgtcgatttaacgatatcaatc

SEQ ID NO: 147376 - DNA, 2067 bp, Arabidopsis thaliana landsberg
gctagagccacacatgaaatgtataatatttgtcaatcggattgtgactgcaagaacattgtcatgcatactaaataacttggaactgctacggtcttggaagtctgatttccttgttggacttagttctggactgaagagcatgtcaagaaggagtatggaaacaatacttaaacggttccaatctaaagaggtgataatttagccatctttattcctatagttagtattcggagatatctgcacttaatattcctacacccatgatatttaaacacccatttcgataaacatgtattgtctaggatcaatagtcaagccacttccatttaacttctagaggttccttttactgttccagctcaatttactggttgccactaaagttggtgaagaaggccttgatattcagacatgctgtcttgtgatccgttatgatttaccagagactgttaccagcttcatacagtccagaggtcgtgctcgaatgcctcagtctgaatatgcgtttctagtggacaggtttgcacgaatgagaaaatgataagcccataagtatgagtccttacgcgattaacaatgttttcttttatgattcagcggaaacgagaaagagatggatcttattgaaaattttaaagtaaatgaagatcgaatgaatctagaaattacttacagaagctcagaggaaacttgtcctagacttgatgaggagttatacaaagttcatgagacaggagcttgtatcagtggtggaagcagcatctcccttctctataaatattgttctaggcttccacatgatgagtaaggctttaaattttctgttgtgttctttttaaaaagagtcaccttccatagtaaatgggagcttgttcgtgtcataactgaatctccctttgccacattttgattccctcagattttttcagcccaagccagagtttcaattcaagcctgttgacgaatttggtggaactatctgtcgcataactttacctgctaatgctcctataagtgaaatcgaaagttcactactaccttcgacagaagctgctaaaaaggatgcttgtctaaaggctgtgcatgagttgcacaacttgggtgtacttaacgattttctgttgccagattccaaggatgaaattgaggacgaattgtcagatgatgaatttgattttgataacatcaaaggtgcatgcgtggttcagttataaaatctaagcttttttatgctattcgtttgttgtataacgccatctattttacttccttctaggtgaaggctgttcacgaggtgacctgtatgagatgcgtgtaccagtcttgtttaaacaaaagtgggatccatctacaagttgtgtcaatcttcattcttactatataatgtttgtgcctcatcccgctgataggatctacaaaaagtttggtttcttcatgaagtcacctcttcccgttgaggctgagactatggatatcgatcttcaccttgctcatcaaagatctgtaagtgtaaagatttttccatcaggggtcacagaattcgacaacgatgaggtactgagattttaattagataaataataaactagaatgaactcctcttatttgataatgtttatgcagataagactagctgagcttttccaggagattgccctgaaggttctttttgaacggggggagctgatcccggactttgttcccttggaactgcaagactcttctagaacaagcaaatccaccttctaccttcttcttccactctgtctgcatgatggagaaagtgttatatctgtagattgggtgactatcagaaactgcttgtcatcaccaatctttaagactccatctgttttagtggaagatatatttcctccttcgggctctcatttaaagctagcaaatggctgctggaatattgatgatgtgaagaacagcttggtttttacaacctacagtaaacaattttactttgttgctgatatctgccatggaagaaatggtttcagtcctgttaaggaatctagcaccaaaagccatgtggagagcatatataagttgtaa

SEQ ID NO: 147377 - DNA, 1504 bp, Arabidopsis thaliana landsberg
atggaagctctcttcacttcaacacacacacccaatttacagactaagcctctcctcaaatctccgctgcccacttcatcccagtcttcgtgttggttttgtaattcgctacccaaaacgcaattcccgaagctgagactcagtaatggatcaagtcacgggcttcgtatacaagctctcttacgtaacgagacgccaagtgaaggtgaagataataatgggtttggtttttttcctggggatatcttctctttatcacaggtactttttctcttgtcttgtgatgaataaattcaactaaagattataacttttgttttgggtatgcaaaaattcagcaaaagattacaattttggacacaaaactttggttttgatgcagagtttgtgtagaatcgaatcttagattagcggaaagatgataccacgtaatggtttgctttgacatagagattaatagcttgtaatgttgtgtgaaggaaaagctcgggagtaatagcaatggtgaaacttctcatagtgtaatcgatgtggaggcatctcttgcacatcctcagggtggtggaggaaatcgagctgggctttttagaactccaatatctggtggtgttcaaaatgctacatcagctcatgctttacctcggcctgctttagctgtacggaacttgttggaacaggtaaaagggtttgtcctttagatggtttgtattcttcctttttacttcaatgagaaaagattatttaagttctttatctgtcttgtcttgttgtgtttttatgattcaaggctaggtttgctcatctgtgcacagtgatgtccaaaatgcaccaccgcagggaagggtacccatttggctcattggtagattttgcacctgatcggatggggcgtaagtcactgagtctatctttctttgttgactgctcctagttctacagtgtcttcttttgttgcacgctcaattttttctcagagtatgagtttaattatttgccagtcgacaattggttcttagtcataactcctctaactgtaaaaacttaacttgatttgatttttgtgggaacgaatagtaggaagtgaagtcaaagcggttttttccctcttttccttaaatttcattagaggtgtacatgtaggagtgtttttgtgtctgtgtattgaaggcaataccaaattataatggtacaattaatgttttgagtctactggttgagatataatagatgctcatttcttgaattgcttctactttttcttatcagatccaatatttttgttttcaccgctggccatccacacacgaaatctcttgaatgaacctagatgcagccttgttgttcaggtaacattggctattgtgtttaaattatacgagcaaaaggtttaccctttatgttatgtaaccgttgatttggctggcagatacccggatggagtggcttatcgaatgcaagagtgacattatttggtgatgtgtacccattgtcagaggatgaacag

SEQ ID NO: 147378 - DNA, 929 bp, Arabidopsis thaliana landsberg; identical to SEQ ID NO: 34485

SEQ ID NO: 147379 - DNA, 2148 bp, Arabidopsis thaliana landsberg
agcggatgatccacgaaaattacgtcctggtgagattgatccgaacccagaagcaaagcctgctcgtcctgatccggtagacatggacgaagatgagaaagaaatgctttctgaagcaagagctagattggctaacactaggggaaagaaggctaaaagaaaagctagagaaaaacaacttgaggaagctagaaggcttgcttctctgcaaaaaagaagagaactaaaagcagctgggattgatggaaggcataggaaaagaaagagaaagggaatcgactataatgcagaaattccttttgaaaagagggcacctgccggattttatgatactgcagatgaagatcgtcctgctgatcaagtaaaatttccaactaccattgaagaacttgaaggaaaaagaagagctgatgtagaagcacatttacgcaaacaagatgttgcaaggaataaaattgctcagagacaggatgctccagcagctatattgcaagcaaacaagctgaatgatccggaagttgttaggaagaggtcaaagctgatgttaccaccaccgcagatttcagaccacgagctagaagaaattgctaagatgggctacgccagtgaccttcttgccgagaatgaggagctaacagaaggcagtgctgctactcgtgcacttttggcaaattactcacaaacaccaaggcaaggaatgacacccatgaggacacctcaaagaacccctgctggtaaaggtgatgctattatgatggaagcagaaaacctggccaggttaagagactctcagacacctttgctaggaggagaaaatcctgagatgcacctttctgacttcactggggtcactccgagaaacaaacagattcaatgcgcctaatccaatgctgaccccttcaatgactcctggtggtgctggtcttactccaaggaattggcttgacgccatcaagggatgggtcttctttttctatgacacccaaagggcctcccttcagggatgaacttcacattaacgaagacatggacatgcacgaaagtgcaaaacttgagaggcagagacgagaggaagctagaagaagtttacgctctggtttgactgggcttcctcagccaaagaacgagtaccaaatagttgcacaacctcctccagaggaaagtgaagagccagaagagaaaattgaggaagacatgtcagacaggatagcgagggaaaaggctgaggaagaggcaagacaacaggcattgcttaagaagagatccaaggtcttgcagagagatcttccaagacccccagctgcttcattggccgtaattaggaactcgttgctttcagctgatggagacaaaagttctgttgttcctcctactccgattgaggttgcagataaaatggtaagagaggagcttctacagttgctggagcatgataatgcaaagtatccacttgatgacaaagctgagaagaagaatggagccaagaaccgctccaaccgttctgcttctcaagttcttgcaattgcagaactggctggggagaagctccaagaggtatgtggaagaagaatgtcatttgcctgtctttttcaaacacattgtttattttatgcgttatttattgtttagtatacatgatgattcaggacatgagtgttggaacgtcgtggaacatcttgagaccagaaactgtcgaatcactgttttacctctggcggttaactggaaacaagacatatcaagagtggggatggaatatatttgaagcatttgagaagaactcgcgcatagagtctggatatgttggtttgaaggatgtaagttttccgtaggcgcttaattagatcctgcattgttaaaaccttggtgaattgaattatatcattccaccatctatattagtaattgagtgtaactgatggtagattcttatttctttcaatcatttccaggttaatacaggcgttaaggacaacaagatgcaaagtttcttccttgcagagacactcaagtatctctatctactcttctcgccgacaacagtcattcctttagacgagtggggtattcaacaccgaagctcatccacttaagattaaagtctcgaaacgatcaaggtaaatctcaaacaatccaccaaagtactgc

SEQ ID NO: 147380 - DNA, 5475 bp, Arabidopsis thaliana landsberg
gagacagagaggtagagagagtaacgatggctgctgtagaagaagtagacgatgttggaagaacaatagaggaagagactgtgtttgaaaaaagagaaagaggagaggaagctgaaacattgactccatgggagcaacactccagcatcataagcatccctcgattcgactacaaagctccctcttctctgcttcatcattctcattccggattcctcgtcacctgcaacatcagtatgatcttctttacaatactcttttgtatcatcctttttagtttctatgtgttaatttcgttttgcgacatgaccttcaatttctcgaattcctttattgtctccgagtttatgacttgtggaatctgtgtattggactaaacgagagtcgaattgagggattgaagttaaactatttctgattttcacttgttatcagaaagggagaaaagtgctactaaagaggtcatgtccatccttggaaaggtatcgtcacaattctccatcattagtgaggcaaaagtttggatttttgttccttcatttagaagataactcagagtgattgataaccaattgtggtagagaaacactatatttgaaacgaaagtgattataagtgcagtggtgggggttctctaatgttcagcttgtctcacggaaatcaaacttttgatttgttcagtatattgggtccatgcatgaggagaaacctgaagttctaaactctactgcatccaaaaaacaaaaagtttgtgcacaagagacagaggaaggcggagagaagactgtacctcttgagaatgatgccttgcaggaaacaggtaactttcatttgcggatttgagcatattcaaattcttgtttttttttggcttatggtcttgtctttcttttctctttctgtgccttgtttaggtgaaaatccaaatgttgaggatcttaaattagcaaatgaagaacacaattctctcatgtcattggttaagctaacaaagagtggcttgcttctctttactttccctgttgaaaactctcccaatacaacgaatatcgtatcacgagtcttccagtctatggaatctggagctttgaaggcaccaatgtaagtctatctggtgtaatgctagttagtgaacctttggtcaattgattaatcagaattttatcgccacttgccttagaattcaactctaccttgaaataagcatgcttatagagttctgatttagtctcgaataatttttcaagtcttataatcccaaagagtggtatctgttacatatcagacctatttcattctttttggaccatgtagttatttatccactctgctaggaacttttggtcattatcttctcagattcccttgatgtaagcatgtctttgtgtcgaaacaagtaacttatgattcattgatgcagctggtgccatcggatattcccagttcaagctacttgtggtttgacagagaaagaacttcgggaaacagtatcaaagcttgttcagcggtttgtcaatgataaagacaatacactatcaaaacctgtgaaggtaagaaagagtttccgttgtataggagtatatgttatgaatattgttagattcatggcaatggttaataaccacataccaccatatagtttgcagctgggtatcaacgtagaggtgcggaggagacgaaaggaaagattcggaaagacgcttcagatgttctagttcaatgtccgttgctggaccgcattaaatgctttgaaactgtggcagctggagtgaaagacattgtaccagattcagttgtggatctcaaatctccagaggtagtgtgtatagatagaaaataattctatcttcgttgcatcatcccgtttataaagtctgaaagattggagtaaaaatgtgcagttatgtgttctggtggaactgttaccgctctctagaatatcaagtggctcctttgtagctgctgtttcagtgcttccacatagactcgttagcacaaagccgaaactctgcatcaagcctctagtccctgaatccaaacacaaaaagggaccaaactgacaggtgcaaaggctgatcgctgcattcgattttcgagagccaaagatatcaatagaagttgtaatctctctgtttttgtttagatatgtcttttgctttcagtatctctaatggagtaaacaacaatgtctgacctatgttattcaagagaacaaagataaacccatctccaccgctttttccctatgttcacaatgttacagtttgtaaggctaagctatggcaacttggaaatcaatcggttcaattcggtttttaaattaaaccaatcgatttataaacaaatgtcggtttaagcaaggttcggtttggtccacctctggtacgtggttttccaaatcgcgctctgaaacagtgttggcttcctggttccatcttcgcgacgccaagagcctgagattatcccagtggaaagaagagaaaccctaatgggaacgagctcgtgtggcgatcacgagaagcagagaattgaagatgaagagcaatacggtgtgttgctgtactacaagtacacctctgttcctgatctagatgagctcgtttccttctatgaatctagctgcaactcattaggtctactcggccgagtcaggctctcccctaaaggcgtcaatgttactgtatgcttctaatctccttttctacatatccaatgttttatacttgatttgaccattttctgagttctctgtttcgtctgtggttcgcgtctgattgagtattaaagccatgaatcgaaaattctaaccctttatgtggtgagagaactgaaaagaaaaacttaacccttttgaactgtgttctgttggttgtttgattgaggattaaagttctccatgtatagttacgacttacgagtgtaatccatcttaaccattaaagaagtagacaccaaaagtttgaagcttttgctagagttctgtttatacggttgggataatagaaaactttgcttattggttaggttggtgggaaattaactgcattggaggaacatattgccgctgcaaagtcgaattgtttgtttgaagggactgacttcaagcttgcatcttgccatcatcccttgaatgacaaagttgctgaggaatgtgggtttacatcactctccatccgagttgttgaggttattgtcttatctttcttaccaaacatagttaatgttatgttaagttcttatctgtggaacacgtaagattcatttgcggggatgataaaaatattcatgttatgatctccttgctcatctgactgaatgttttctactaatttataaaattcatgcctattctttccatagtctccataactgatgaccttgatgttgtatgtgctgattaaatcttaaattttacaagattaacgatgacttggtgtcaagttaagctttttgtcttctccggacttcaaatgttttctctttctgtacttagttccattttttgcatgtgatggatgaattttttgtcattgtgtcgaggttcttagactatgactttacttcctcagcattttgatagatatgtggcattgtgttgtgatttgcaggagttagtgacctttagtccttgccctccccttaaacccccagaaatttcaaatgctgggaagcatctctctgctgcagagtttcattcggtcctgcagagtgccagtaagtttcttatttgttttattacttactgctatattgcgtttcttagctgattacgtttccttgcaactctgctgaacatctggatggagatgggaagtctgagaataaggaacttgttttgcttgacgcgaggaacctgtacgagacacggattggaaaattcgaatcagaaaatgtggagacccttgatcctgaaatcaggcaatatagcgatttgccaacctggattgatcagaatgccgagaaaatgaagggcaaaaacgtgctcatgtatgaataatagttttgtgacatacggagatttcttgttcagtttactttctacatcactgaagtctcatctgttggcgaatcaggtactgcactggtggaatcagatgtgaaatggcatctgcatatatcagatctaaaggtgctggatttgagaatacttttcaggtgagatcctggatcgcaaatggatttgatacaggtcactgaacttggctgactccatctgttatttgtttcttgcagctctatggtggcatacagagataccttgaacaatttcccagtggtgggttcttcaaagggaagaactttgtgtttgatcaccggtatatatctagcatctttctattctaatctacgaggaaaacaatttttataggtccaggtaacatttattttgatgtcggatttaaaggatctcagttgggagctcaaaagaggatataataggcagctgccttctctgcaacaatacctttgacgactattctccacgttgccgttgcagattatgccggatgcttgttttagtctgcaatcattgtcgggtaatgcacccagaccacttttgttgatcaactccataaggattgtgtatcttggacttatgatgtgctattgcaggttaaaggagatatatatatatgtgagctgtgtcgtaaacacggaaaaggggaagtccctttgagtcttgatcccttaaaccaaccttctgaaagcaatggtaaggtctgtttgttcatttttggatcaaatgtttaaaacatcagaggatttttcaaaattctctagtcccttttcccctgaaaactttgtcaattcacttctatggtcaggtgacaatacaagacggaagctgaggatcttgtgcttgcatggatttaggcagaacgcgtctagctttaaagggaggaccggatcactagcaaagaaactgaagaatattgccgagcttgtgttcatcgatgcaccacacgaattacagttcatctaccaaactgctacccctccatccggagcatgcaataagaagtttgcgtggttggtgtcatcagattttgataaaccgagtgaaacaggctggacagtggcccaatgccagttcgatccattgcagtatcagactcaaactgaagggtttgataaatcgttgacatacttgaagacggcatttgaagagaaagggccttttgatggcattctcggattctctcaaggtgcagcaatggctgcggctgtatgtgggaaacaggagcagctcgtaggtgaaatagacttcagattctgcgtgttgtgctcgggtttcacaccgtggccattgttggagatgaaggagaaacgatcgattaaatgcccttcacttcacatattcggaagtcagcctggaaaagccagacccattgtgactcaagccagctcagaccaggcgaagttgtttgaagatggttgtgccaccattgttgagcacgatttggccacaaattc

SEQ ID NO: 147381 - DNA, 3082 bp, Arabidopsis thaliana landsberg
  unsure (1)..(3082): unsure at all n locations
atgttcgccagatccatagttttgttccgaacactactagttaagagaaggaatacgcgaacacgactaacctttttgatagatggatcgagccactcgtaccagcgagctttacactgtttagcagacttacgaacgagaagagacgagatccgagcccattggttcttaccatacttcatcacggcggctttgagaatctcatcttcggtgttcttccaaacacctcccttaatcataatcctcatcttcgctcaactgtttttgatccaaacgcactccaattcaaggtctctgaagctaatgctcgtggaaatcggcaagaacgaagaacacaaggaagcgagagagagagtaaccctagattagggttggaaccaacgaagaagaaaagattcaatcgttcactagtccttttctttttatttgttttttctttttaatttccaaaatcataaatatcgggatatagtttgggcctaaccgattggcccacttaaatgggccgttaatttaagtgaaaaattaatggcaaaggtccttttgctgcgtttttatggtatctttagccactcgttgttgtctctttcctctgaatgctaagcagcgagagctcgacgaagcagtaaaaccctagtagaataatggtgaagctcacggctgatttgatctggaaaagtcctcacttcttcaatgctatcaaggagcgagaattggatctacgaggtacacttcttctctttcccattacattttctagggttttgtaaccctaaacgcacctgctctggttaatcgttcgtttttctgggtgaatttgttgcaggtaacaagattcctgtaatcgaaaacttgggtgctactgaggtatttcttttttctatcgattttcgtttcctctttgtctgttagctgaagaatttgttgatgcggttgtattgtatgttcttaagtctgcctgttgggtttcggcattcaagtattttgaaaatcattgacagaaacattgctgaagtagctattgctcctttgtcttagttagtatctgttttctagctctttaggagtatatgtggcttcgtgtaaaagtacctttttcttactgtggattctttacttttgagagccagtcttctctaagaaaggcctcccataaattttgtgtttggcttaggtagattatttgcaggtttgaggttctctaattaacttgtcttggtttgcttacaggaccaattcgataccattgatctgtctgataacgagatagttaagctagaaaacttcccatacctcaaccgtttaggaactttactcatcaataacaatcgtatcacccggataaatcctaaccttggaggtaacatctatctgtgtgttgtaagaaatgtcaattcaaacacattgtttgctttgttggttaactgtgttgtatttatcgtatggttgtacatctgcagaattcctaccgaagcttcactctttggttcttacaaataacaggcttgtgaatttggttgagattgatcccctttcctccattcccaagctgcagtaccttagtttgttggataataatatcaccaaaaagccaaattatcgcctttatgtgattcacaagctaaaatcacttcgagtactggatttcgttaaaatcaaagccaaggtaaggaccttatcatatgctttatcaactgttcatttttgcttaccctagacgccaacttaatgttattttatatgctacaagtcaccgggagctaaccttaatatcatctgaaaattagaatatctgagagcaagaaattggtctgccttttgtcttacgttgtttaagattcttgtgcacagttatatctgtatgctgaaataagaaatttcactaatattaacaacatttagctaaaagggtttgcttaaagtatatatagtttgggtcttgatgacttggttgcctgattatcttaaagttttttgtattagggcataaatataaaccggacttgatgtagggtgtggtggttttatttaatttcctcgtgttataaccttgtagccttggatctgataatagtttggctttatcctttagcccactgttgtatatctaaattttacaatggtgatagcaagaccttttacctgacaatattggttcctaacaggagagagctgaagctgcatctttgttttcatccaaagaagcagaagaggaagttaaaaaggtttctcgggaggaggttaaaaaagtgtcagaaactgcagaaaatccagagactccgaaagtggtggcgccaacagcggagcaaatattagctatcaaggtgcgaaactggaaattatataggaccaaacatattcactgttttgttgtctttataataagtaggtcaacgctgtgtggttgatagtaatttctgtatttcatttccatgttgttccaggctgcaattatcaattctcagacgatagaagaaattgctagactcgaacaggtcccttgctttttcttttgaatatcaaatttgtgcctgatgatgttgcttttgattgattttgacagtcttctttttgtttttggcttgtggttatataggctttgaagtttggacaggttcctgctggcctgataattcctgatccggccacaaatgactctgctcccatggaggtatttgcttatcttttaattttgctccttgttcaagaaatcttagtagctaaaattcattgttnnnnnnnnnnnnnnnnnnnnnnnnncagtgtgactgacaaatttcttgcatattgtctttacaggaatagaatgtgtgactgttgcccctccaatcgttgtagctactgctcgagaatgctcacagcaattgttttctctggcaatcctgtacggtttctgtcacttccttggaactcatgcgcaacagttggaacctgtaaactatttactgctcgaggcatctgtttttgaacccttaaaaagaatggcaaagaggattgtagtctttttaagtctctgcattggcttagagagcgagggtgcacagtatttgcttacgctcttttcgcattagaatttcttgtt

SEQ ID NO: 147382 - DNA, 365 bp, Arabidopsis thaliana landsberg
tatcttgtacagagagatttatctttgtgtgtggcattcaaatgacgatgggtggtactgaaaagaatgtagagaataaacaatatcgtttgcctcgagaagtcaaggaagctttacaagcaatagcatcagagtgggaagatgtgattgattcaaaggctctgcaagttattcctttaaaaggtgcaatgacaaatgaggtgtttcagatcaaatggccaactagggaaaaaggtccttctcgtaaggttttggttaggatttatggtgaaggtgttgagattttctttgatcgtgaggatgagatcaggacatttgagttcatgtcgaagcatggtcatggacctttgttgttaggtcggttt

SEQ ID NO: 147383 - DNA, 2400 bp, Arabidopsis thaliana landsberg
agaagaagaagatgagatcgttaagacattcgagtttctgaaaagatgactgtaagtcagatcaaatttccaattgctcatggatctgttatgactttctctaatcgtgctcattattccggttgagaacgggaatggagcgaagaatgatgaggctgaatcccaaagaacattgtaaaatctctcttttagtgttcttgaatctcggaaaataattaggtttaggttttcatatttttagttgattttggtaggtacccatatgttactggaacttcaattgttgcaatcaagtacaaagatggggtctttgatggcttctgatatgggaggtatgtctcagctcctagtttcagctctttatttggttaagtatttgtattggtttaatgtatgcacaaatttttgcaatgtatgtttagatttacatctgttataagcttgattgcttgaatcgtttgttttgcctctcttggtgtttgtttggttaaatctgtttctttttctctgtgagagatcatcacaagtcagtgaatagatcatgtgtttcacatatgctcgtttcatgcgtatgaatccttcaaatttcatttctctagtgtcttttctgctacatttttaagtatggtttgattcttttggtcaaatttgatttttgcatctttatagacgattcagtgaattagggtcaaacactattttgcagaacaggttttgttatgtctattagctgcttgattgataataatatgtattttggcctaaacatatagacaagcaattgctttttgttttttatgagattagtttcacatcccccttgcatttgttttcttagctacgttatctttccaacatagaatgttacagttctttggttgttcctgtttcgtctctttaatattgttagatttagggtaaactaagaattgaggcttcttttatgaatgatccagagaataatgttgaaaagtcttgactgtttctagatctttttgcttttgtttcggttccctgtgtgccatccattgttaattaggtcaagagatgacaactgagaattaacgttacaaccatcaaccagtacttagctatgttcattgaaatagtttgatttctcatatcttaacaccaactcacaataagtaagagctgtcatttgtttgtacggttaataattttgatggtatatctatgtagcttggattattcttttatgttctaatggtgtgatcctggtttcctgggacttatgcaccagggaaattacgatattgtgccatcaactcactttcaaatttttgcatgcaggttcatatggatcaaccttaagatacaagaacatcgagagagtgaaggctattggtaagcattctcttcttggtgccagcggagaaatcagcgactttcaggagattctccgttatcttgatgagctcacgtaagaatccgtttggttcaatttttttatattttaatctttccttgtcaattatcaagcctcacaagcccttggttttacacagcctgaatgataacatgtgggatgatggtaactctttgggaccaaaagagattcacaactatctgacccgtgtgatgtacaaccgtcgcaacaagtttaaccctctgtggaacactctcgtccttggaggcgtcaaaaatgggaaaagttaccttggaatggtacgtctcagtctttcaagtcacatatataaaattttcttatgaatgtaactattgatttggatccatttgcttctctctaggtgtcaatgattggtgttagttttgaggacgatcatgttgccactggatttggaaaccaccttgctaggccaattcttcgtgatgagtggcatgcagacctgagttttgaagatggtgtcaagctacttgagaaatgtatgcgtgtgcttctttaccgtgacagatctgctattaacaagcttcaggtttgtctctaataacaagttttgtttaccgttatctcatctcgtataatctttgtttagtttggtagaagttcttcataaggattgtaataacagaaaatatgaaaactgtgcagatagcgaagatcacggaagagggcgtgacggtctcacagccatactcattgaagacatactgggaattctcgtcattccacaacccaactgctggtgctgcaggctcctggtaagaagccaagcaaccacatcggctggcgatcttttaaggaagcttttattttattttatgtgatgttgttaaacactttgtactgtagttgttttactattaaacttggtggtttctttctgacagtccagagtttagatcaatgaggatttataaaaagttctggatatctttgggtagtaatccatacctttgttcattgttgatcgttctcca

SEQ ID NO: 147384 - DNA, 583 bp, Arabidopsis thaliana landsberg
atcactacaagcctactccactttacgtcatggacgaaatcgacgctgctctcggtaactcttccatccccttcatattgtcaattttcatctcccaaagcttttgatctctgactcttttttactccagacttcaaaaacgtatcaatcgttggacattacgtgaaagaccggactaaagatgctcagttcattatcatcaggtcagttcaatcttctagtttaaccagttcttgattcttgaggcctaattaataatatatatgaataatgtggtgacatggtgtgcagtttgaggaacaacatgtttgagctagcagatagattggtgggaatctacaaaacagataactgtacgaagagcattacgatcaatcctggaagttttgcagtttgtcagaaaactcctgcttagtctaccaaatggcatctctacattaaccacttattattgtgttgtatttgtaattctgtaactttgggttttgctttttttatgctgggattaacactaactatgcatagagaatgaatctactttttcttttgtaagtattggttatgctagtctactttttgacta

SEQ ID NO: 147385 - DNA, 2824 bp, Arabidopsis thaliana landsberg
caatttctgagatcccaagaacaactggaggacaggtagattcaatattctttatcatttcaggtttttacttattcttttagttgaaaatgacttgctttaatttccattaatgattgatataacttacatagttcaataagaatacttgttaacatagtggaatctcgtctctatactttgattatttttcccatggaagcatgtgtatattgtttcaaagaaagcatgtgtctattgtattaccgtggcacgtgcatcaccctttcttaaaatttctgtgaaagtttttcttacttgatatgtcttcctgggaatcttttatggatttaaagctctatgttttgattttaacttcccattgtaattgtttccaggtttattgttattaccctttctcagctctttcagaccccccaaagttatacaacgatcttagatggaatatcacgaggccccaaggttttgaggctgtcatgcgagtcagatgcagtcaggtagtgttttgtggcagagagctctgtccaagtcaaatttcagcttgaggttatttgataaataccacttttgtcgattattgtagggtattcaagtgcaaaaatactcaggggttttctgtaagcgcattccaactgacatcaatctacctgcggtgggtgcattttacttaaaatttacgattaattgtctctgatgcgttgcatgtatgtgtttattgtgtcaataccaaaaatggatatttctcgtttttggtttcggggctacattatgttcatgttgctttgttacctaaaacgtataatattagtcaagagggaaacacatgtttttgctgcaagtttaccttggagaagcactttggtataaatttacttcttttttgacgagccttgagtgccatgtagattgactgtgacaaagctataatggtgacattaaagcatgatgacaaactacaagatggagctgaatgtggttttcaggtatactttgtactcatgtcaattggccattcgaaatagttttggcaagaccctactttgctgaaatgttggtacactgtctcattttataaaatgtttacgtttgttttatgatttttctttggttttcagtgtccccttctgtataccaccatatctggagaaagaagaattagggttcttaacttatcaatcccttgtacaaacatgctcagtaacttgttccgctcagctgacctagattccccaattggcttgtatgctgaaacaaggtaggtttctttatttagtctctgattctactgctagccatgtaatgatattagcgcaaaaaaccattcagtgtaatatataatgtatacttatgatatttttcttatgtagcggctaatgagatcccttcgaaggcacttccgttggtaaaggagcaagcaactaatgattgcatcaccatactacattcctatcgtaaattctgcgctacagttacatcaactggacaacttattctacctgaagcactcaagcttttgccattatatactctcggtatttccttgtcccttttaatccatttaaaacaagaattttacaccacttttaggttggttttctccttgtgtgcaaggcactttctatgccttgtcttgaatcaaaagctagctaattcttgccttggatttttttgggatattaatatacaataaaaaagatgtgtgtttgcattaaaagcgtttaggtactgctgtgctccttttctactaatttttgagacgttgttacatgcttgatactggtcaatggtcatatgcgagagcaagtgagacattatttttcattaagatgtatttgtttttttcacatttcattaagatgtaatttaatcctttgttccttgatttacggctactattgttgttttgtccatttttcattgcaacttgtgatctcattatttttgcttttcagccttaaccaaaggtgtggggttacgaatggacgggagaattgatgaccgatcattttggataaaccatgtgtcttcattgtccactcctttggctattccgctagtttatccaaggatgattgccgttcatgaccttgatgcaaacgtatggagctaaacttttagctcaggcattgttattacttaatttactatttctcaaaagttgtgatgattgttctttaatctatcaggataatgaagaaaacgtggttccttgttcaatcccattacaaagtgaacaccttagcgatgagggagtctattttcttgagaacggtgaagatggtttgatatatattggagaatcagtaaattcagatatcctacagaagctctttaatgttcgctcggctgctgaacttccaagtcaggtaaactgatcatcatcttagcacatggtatataaattctgtaggatctgtctgttacctgattggttgaccaagccaatgatgcttagcttacattatgtaagaaacacttttatatgtgatatttgatattgccgagttttgcctaaacttgcccgcccataccggcttccaactaaaaccatacgggattaagtggaacggaattgacctctccgattcaaatcggaccatagttcctgacctaacagatcatgaattacttgctcattccatgttacacgctcgaaaatgattgtttctacatatttacttaagttagtgaaacctgcttaaaatgatactctttgtgttttacttccttcacagtatgtgctgcaaaagtatgataatcagctatcaaagaagttcaatgacgtggtgaatgaaataaggaggcaaagaagttcttacctacg

SEQ ID NO: 147386 - DNA, 1016 bp, Arabidopsis thaliana landsberg
cagctttcaacatccctctcaacaagataagtccagtgcagagactgattctattgaagaaagaaaaggtcttcaagagttttacgaggagatgccaataagtaaacgtgttgccgatgataactcagtcagtgtcactgcaaggaaatgccctgaaacatctaagaacattgtatcaattgaaaccgatttaccgggtgacgttactgtccactggggagtttgcaaaaacggcactaagaaatgggaaattccatctgaaccttaccctgaagagacatctttgtttaagaacaaggcattacgcactcgtttacaggtacatgtagaagtaggcaagagtcacatgttcagatttgaaaatttggcaagaatcacttgtgttgtgtctctgtaattttagtctgtgagattcaaaatcagtttttggttagcacctggcgtattcgcaattgtccaagcaatttgtaggttgtgcaggcctggtttttaattaagcattagaatggttagcaacccaatgcattcggttcttctgttttttgcgcaccctgatagacatttccttcatacttttaccacatgatgccgtcactatgtctttgctgctgcttccatatatcttttgggcacctagagatcattttcatgttggcacctaaatattttgtctagcttacctattagaatattttctgtgtctatcagtgacattacctaagtgtttatgcatatgaacattctgcagcgaaaagacgatggaaatggatcgtttggattattctctctggatggaaagcttgaagggttatgctttgttcttaagttaaatgaaaatacttggctaaattataggggggaagacttctatgtccctttccttacttcaagtagctcgcccgttgaaactgaagctgcccaagtgagtaaacccaaacgaaaaacagataaagaagtgtctgctagtggatttactaaagaaatcatcacggagataaagaacttggcaattgaca

SEQ ID NO: 147387 - DNA, 3534 bp, Arabidopsis thaliana landsberg
taccagatcctccttcttcaccggaaaactttcttccgacggcgattacggcttacgcttcaataacagatccggtggctgttgataaccccgacgttcctagctaccagccgtacgttcacgcacgatgcgatccttcagctctcgtgccgcttcagatgctcggaattgagatgaatatagattgttggctcgacacggcgtttgtcaccgtcaccggacggtggagagttcactgtgttaggcctagcaaacgctttgactgctgtgtcggtgttcctatgggtgagaaggtaatttcattacaacaaaacgacaaaaaaccttctttttccatcttttctctatctttccattaatagcattgtttcagatattgttttgggaaataattggaagacattgtgtaacagggctcatttctaggtgctgagattgatgttttgaacaatgagaaatcttaccagaccaaactagttacagaggatgaaacatctgactttgataacgttcataaagacaaagattcacgtttctttaagtctcatatctatactttcaagatcccacatgtttgttctttgtctcactttttatagttagttttctttggattttgttatgaataaatgctaaaatgttgttcataattacaggttgctggaggatcaatcttttcggttaatgtgacttggtctcagaaattgatttacaaagacggcaagtttcatctcaatgtgccttttagattcccttcttatgtgaatcctataggcaaggaaattattaaacgagaaaagattgtgttaaacatgaattcttgtgttagtggcggcgaaatagcttctagttatacaagccatccattaaaggtatgatttgtgttcacagtttttttttttctttttcaaactgttagtctgttactatggattatgtaatgtgtgaaattcattctcagattattcaccgtgtagcgggtgaattaagttgtgagtatgaagctgaagtaccatcttggtcaagggttgattttggtgtttcattcaatgtgagggtttttgattatcttaagcatttttgtattcttcttcttgattcttagattgagctttgtttgcctttttacaggtttcctctggtgatctgtgtggtaatgtattggttaagtctccatctccatgggattcagatgacagaggaatattctgtttgtaccttttccctggaaccaccaagcatacgaaggtttgtttgcactacaactactatgaatcttctgcttaactgtgacatgatcaatgcaatgttgttattttgtctacagcttttcaaacgaagagttgtgtttgtgattgacataagtgcaagcatgaaatggaagccgctcgaggatgtgaagaaagctttgttagagtgtttggctaaactacaagctgaagatgttttcaacataatcgctttcaatgacgaaattctagaattctcaacttcaatggagtttgcaacagatgaaactatatccgctgtgactgaatggcttgatagtaatttaattgcaaatggtggaacaaacatgttacttcccctcaaacaggtacgttgtctagaatctcttatctttctggagacattagtctctgagactcttctctatgtgtggtttaggcaatgaaactacttgaaggaagcaatattggagttcctcttgtataccttgtcactgatggatctgttgaaaacgagagagagatatgtcatgctatgaaagaatcttgtagcagaaacggaaaatcgatttctcctaggatatctacctttggcattggtaagtaaaagaatactctgcttttacttgcttgcttctttcatataaatattcaaaattttgattagaaacaattccacaggttcgttttgcaaccattacttcttgcaaatgctagctcggatagggaatggttactatgacggcacaaacaacacaggtagattgtaatctcctttggtctatttgtttgattatcgctgatagtgttactaattcataatcaagaaactaaaaacatatttcttggctttgtattaacaatacacctagccagattcattcgagcatcagatgagtagactatttgagatagcttcttcaacgatcgtagccaatactacttttgatgctctcaaacttctccgatcagttgaggtaacttgacaagttcaataacatcaatttcttgagatttgtttcttgaacttgttcttgtctttgtgtcttttgcagctgtttccttgtcaggttccagacattactctcggtgatccgttgatcttgtctggaagatacaaaggagagttcccagatgaagttgaacttagaggcacactggctgatatgagctgtttcacaatagagttaacagtgcagaaggctaaagacattcctctagacaaggtttacttaattctgccttaaatgtaagaaatgcaacaaagctccttttgctaacattcaaaaaacaggttcttgcgaggagacaaatcaatgaactcactgctcgagcttggtttgaagacaagctgcaagaaaaggttgttgtaggggttgtgatttgacattgttggtcttttttcttcttcttacctaataacatctttttttttgcttaatcaggtcatgagattgagtatacaaacagggtttcctagcgaatacacgcaaatggtattatcagtcaaacacgacgaggaagagaagacgatggcaagaccagtttcaatcaaagagattctaaggaacccaccataccaaatccacaagcagatgcagaggagcaacagcatgagaaggagtttgcttgggaaacaagggtatgggttcgggaacgttgcagctactttaaagaacgtgccaccgtggatggaggagccgaaggaggtggaaggaactgaacttctgataagagcggcgtcaggagtggttgaccgcgtttgctgtatgtgttgcttgcagtgtatgtcaagggtgagtgatcagtgcaccattgtcttctctcagctctgtgcagcattggcttgtttccagtgtattggttgctgtttcgaagtctgtggctgtcttgcttgacctctagaactcaggacattgtcaaaataaaactaaggagaaaatgtaaattcattaatggattttactctcttgagacaaagttgaaaatattataattagtgtgtaaattagagttgtgatatacaccaagtttgaaaatacaagactaacgtagttgaatactaatatactactttatgaaatgagctgtatttgatttgaatataacaaaacttatcacaagatgatgaaattaattcttcttcgtgataaatattgtagatggagtctcggattagcttcttcagtacctaatttgtaataatcatgtttcattatatgaaccaaatatgcctcgtaacttgtagaaacgaataggactgagaatgatcggattattagcaatttcctttttgcaaggatga

SEQ ID NO: 147388 - DNA, 304 bp, Arabidopsis thaliana landsberg; identical to SEQ ID NO: 57310

SEQ ID NO: 147389 - DNA, 1077 bp, Arabidopsis thaliana landsberg
gaaggatatataagttatatatggggctacttgctgtcttttgtacaaactctattaacatccacgctggtctgaatggccttgaaatcggtcaaacagttgttattgccgctgctgtaagtcttatggtcatacataatgtctctgaatttttctcattttgtttcttttgggttgagatatgatgcatcccagttacctgtagatcctgatacacaacgttatgcaaatcggagcatctgttgatcccgagtatcaccaagctcatgccttctcgatatttcttactcaaccgctgatggccacatccttggcaatgcttgcttacaattggtaaaatccctagcaggctttctctttaaaactttttttttttgagtggaagtaatgatatttctgaccagttctcgcaatcttctgctgttaggtatccttcttcagtttttgttggagacacttacacagtcttcgccggaatgactatggcagttgttggtattctgggtcacttcaggtatacttccaaacccacttatcttctctgaggcacaggcacttcactaatacatggaaactaccaactcttagattgatcatttgcatcatatatccagctactgtatgaccatgcaactgattcccatgccatctttctgtattgaaattttgcttctgcagtgaaaccctcctcatcttctttcttcctcaagttctgaactttctattatcgcttcctcaggttcatatcaccttttcactcttctatggcatacgtataatcttgtcaactcatgtttcaaaaatttaacatactatatatgataactcttcagcttgctgggattgtgaaatgtccgcgccatcgtctcccaaggtaaccccctttgttttcttaccctttgtagactgattaaagaacagacgcatcactcatcttgtcttttgaaaatatccaggtatgatcctgctaccggattactgaccggcacaaaagatgggacactcgtcaatgtttacttgaggttgtttggtcctaaatcagaaaagtctctttgcatccatcttctcgttttccag

SEQ ID NO: 147390 - DNA, 931 bp, Arabidopsis thaliana landsberg
gttgttgaccaattgcaatctggtagcagctctaagaaaaagaataagactgaagtattgccagtaaaaggtctaggagttgaagttttagagaaaatggagaatgagaagaggaatgatgctatttggcaaggaaaatgctctggcactgtgtatgtctctggtagtttatgctttttttaatatgttctctggatttactttgtggttttggtggagatcttttttttttttttacttctactaccttttctcacagatacataggtggagccgagtctgaaggacatttttcattgataaatcaagcatgttcaatgtaagttatagcgagattgtagttcctattttcatggattggggacttttgctgttgtgttattattgggcatgaaagcgcattcaagttgctatgtgtgatggcatgtatgaatgatgctatccaggtttgcgcataccaatccgttgcatatagacgtattccagagtgtggtgcggtttgagtcagaagtagtcgcaatgactgctgcgttacttgggagtaaagaaacggcgtcaggaggtcaaatatgcggaaacatgacgtctggaggaacagaaagtatagtgttggctgtgaagtcatctcgtgactatatgaagtacaagaagggaatcacacggccagaaatgtatgtttcctccatcactttacgttgatcaagtatggactactataagcttaattgatggaagaatatatcatatacaagtgtaggattatacctgagtcgggtcattcggcttatgataaggcggcccagtattttaacatcaagttgtggcgagttccagttgacaaagacttccgagctgatgtgaaggcaacaaggcggcatattaacagaaacaccatcatggtaatgttttgaggtgccagttacaaaacgtt

SEQ ID NO: 147391 - DNA, 458 bp, Arabidopsis thaliana landsberg
aatatctaacctatagtttttctttatatataatgtgaatatggaaaacacaagacttcatatcttattttcatcaatcttattcttattttctctctgcagttttcaaaaactttctcacttttttctgcgtctctttttttggatcaatggcaaacgctgaacgtatgataacgcgtgtccacagccaacgtgagcgtttgaacgaaacgcttgtttctgacagaaacgaagtccttgccttgctttccaggtatttacctttttgatggctttttgtgttaaatggttaaagaacaaatagtctgatcacttcacatgattcttttagggttgaagccaaaggtaaaggtattttacaacaaaaccagatcattgctgaattcgaagctttgcctgaacaaacccagaagaaacttgaaggtggtcctttcttcgaccttctcaaatccactcag

SEQ ID NO: 147392 - DNA, 2102 bp, Arabidopsis thaliana landsberg
ggaaatagttatactcccaatagaggtgatttgatgagcgagttcgaagatgcacttttgcaacagcgactaaactatgaatcaggctctcgactagccgagttaaaggaaactcggtataagaatcgtatccacaaccgattatctcaacttgaaggtgattgctgtttgactatgctgcttgtaattttttgaaaaagcctatggagccaattatcctgtgagatgaatgcttactcttgtgttttttaaaaaaaaaaatcaggattaccttccaatagaggtgaagatttgcaggaaaaatgcttacttgagctttatggtcttaaggtatgtgtgacactagactgatcttttttattgtcagacattgtttaaaatatgatttccttgacactgacactgtctcgtttgtttatggcagttacaagaactacaatgcagggttcggggtgaggtgagtgcggaatactggctgcgtttgaattgtgcagatccggagagacaactatatgattggggcatgatgctgttgtctcgccgaatgtatggggttggagatccttttgttatggaagctgatgatcagttcaggaacaagcgtgatgccgaggtcatttgctttctaatccaacgcaaaattgcttgctcccagattttatatttttacctatagtgatgaagtctttcttcgaatggaaactgatggcgttttgagatgataggaacatctcatatatgctgatactatttgatgattttttaaactctttgttcagaggttattacggttagaagaagaggagaagaatctgattgaaacgacacagaggaaattctttgcagaagtactcaatgctgttcgtgaattccagttgcaaattcaggcgtctcatagacggtgtaagcaaagaaatgatggtgtccaggtatgatatctctgcccttatgtttttcattgctcatttttcttgtcattgaacccatgatataattgagttatgtatatccttaaacgtcatagatatacaaagtcttacaaacagaaattattgccatctatctaacaggcctggcatggaaagcaaaggcaacgtgccacccgagctgaaaaactaaggatcatggcccttaaatctgatgatcaagaggaatacatgaaactagcaaaggaaagtaagaacgaaaaactaaccctttttctagaggagacaaacaaaatctttgttagtttgggggctgcagtccagcgtcagaaagatgccaaactttcagaaaacaccaaattactgaaaggctcagaatctgacttatctgatgttgatgctcctgaggatgtgcttcctgcccaagatattgagatcattgactctgacaataatgatgattctaatgacttactagaaggcgagaggcagtttaacttggctatccattccatacaagagaaggtaactatgattgttttacaagtatttaatatgagtactgttaagtttgtttaagtcagctatcaatgctttttttaacaggtgacaaagcagccatcccttctacaaggtggggaactaagatcctatcaattagaaggacttcaatggatggtctctctatacaacaatgactataatggcattttagctgatgagatgggtttgggaagacgtattcaaccaatttctctgattgcgtatcttctggagaataaaggtgtgcctgggccttatcttatagttgctccaagagctgtgctaccaaagtgggtaaacgagtttgcaacatgggtaccaaggtatgttgcaagcaatatttctcttggtactgagaaattgcactggtatgaatgttatgtctgaaaatcagcctttttgtttttttgacagcattgcagcttttctttatgatggacgtttagaggaaaggaaagcaataagggaaaaaattgcaggagaaggaaaatttaatgtgttgataacccattatgatcttatcatgagagataaagcatttttaaagaaaattgagtggtactacatgattgttgatgaaggacatcggctgaagaaccacgaatctgctctagcaaagactttattaacagg

SEQ ID NO: 147393 - DNA, 795 bp, Arabidopsis thaliana landsberg
tggatttgtgtgagtctgcataatcatggcgaggaagatgcttgttgatggtgagattgataaggtggcggctgatgaagccaacgcgacgcactatgattttgatttgtttgtcatcggtgccgggagtggcggtgttcgtgctgctaggttttcggctaatcatggcgctaaggtctgaattatttttgaggatagtgatgatctctagacattagtgtatgtctggttttggtattaatgtgttgttgttgtttgttctgaatcaattgttgtaggttggtatttgtgagcttccatttcaccctattagctctgaggagattggaggcgttggtggaacgtaagttccttgttgatgcattatcaaacgttggaatcttacacgatcttatacctttatttgtttccactttttttggctttcagctgtgttatccgtggttgtgttcctaaaaagattctcgtctatggagctacttacggtggtgaacttgaggtatgaaccatgttttttaatcatcatttcaatgtctttctttaagctgtaaaagcaaacttcttaatagtcattttccctagcaatatttgcaaaattgtattcatgttcctaaattattgtttaggctatatgtctatgaacaattcatgtcaactgagagagaattgtgtttgatgatgtatactgttgtttaactgctggcaggatgctaaaaattatgggtgggaaataaatgagaaagtcgacttcacatggaagaagcttttgcaaaagaaggtatcaggaattgctat

SEQ ID NO: 147394 - DNA, 434 bp, Arabidopsis thaliana landsberg
ttaaagaacatcgaaacttgtacattcctcattgagttgcagcttagcagaccgtatcagtatcgaggcagcgacttatctacatgggaggtataggaatcaaaccatcttcctgaaacagaatccatctttgatttcacttcacttcttcaattggttgttttgacccttttttcaggctattgcggtgttgccttatttggacagagagctgtcgccagctaagtatagatcgttcttcatcccgcacatgtggcaggagaaaaatgtgtttggcaaatacgtagcactgagaagagtcccaaaatgatcacaaatcgttaaaactccttagacttgtagctttaactcagttcattgggtagttttgggagaatgtaataactaataactgattagtatcggctttaagttcaggtacgttcacggttcgt

SEQ ID NO: 147395 - DNA, 775 bp, Arabidopsis thaliana landsberg
agaaagacagagagtttgggggagaaaacaccccttcggagaggagcaaagcctctcctggggaagaagaagaagaagaagaagaagaagaacacgactttttgcttcttctttttaatccagattttctaaaggtcttcgtaaattttgcgtctgattatcaaattaggttttttttgttgtttccattagttgtctcattgtctgtgaagagaaaggaacagaggaaaatgtcagacctagacaagcaaatagagcagcttaaacgctgcgaggctttgaaggaatcagaagtgaaggctctttgtcttaaagctatggagattctagttgaagagagcaatgttcaaagagtcgatgctcctgtcactgtaagttcttttcctcgattcaagtttcagattttatctctgcctatctttgaagattgagttttggagagaacccatgaaagtcaaagcttgtgagttgaggaatctgacgaaaattgaatttggggttgttgaattttgtgcataattgtgactctgaactgttgtacttagattggattccgaatttagaaatgatatggtttaaattagggttttgtggatgcattgtttgatattggcttttgaatttgtgtatgatttttgggtcctatgtttacaagtctgaagatttcatggagaatgtcttgctagttgattatccttagattttgctctgttttatggatttagatatgtggcgacattcatggacagttctatgacatgaaagagcttttcaa

SEQ ID NO: 147396 - DNA, 992 bp, Arabidopsis thaliana landsberg
acgaagagaccgcggggaagcaatctgaagttagtctattgatggatgaagtggagcgtgctcagacccgactccttactcttgagagggaaaaggtctttcatatcatgctctctttgtttgaattaagggaatgccctaagataaaccaccgtttttagctctctaattttgtttattggtttgtaacagggacatctgcgttctcagctgcaaacagctaatgaagatactgataacaagaaaaggtgaggtgacacttatgcgtccatataacaaggagtcaaataacttttatctaagtttttgctttgttttaatttttttgttatgctctttctctacagtgataatattgattcgaatagtatgctggagaactcgttaactgcaaaagagaagattatttcggagcttaatatggagattcacaatgttgagacagctttagctaatgagcgagaaagtcatgttgccgagataaagaaattgaattctttgctcaataaaaaggtgaaatttgtgctatgttttgtcttttatgctgagaaattatattttgttctgaaaattagtttccggtcccttcaatgtctaatattagcttaccgtcatttggtattaaaccaggatactatcattgaagagatgaagaaagagcttcaagaaagaccatcagcaaaattagttgatgatttgcgcaaaaaagtgaaaattctgcaggtattcatcatttcaagtgttttttggtgctcacttagtttaacttcttattaacttcttgccacagatccataccttgttctttctggtaacggtacgatcgtatgtagtaatatcattgttgcatattaggctgtaggttacaattcaattgaggctgaagactgggatgctgctaccactggtgaagagatcagcaacacggagtcgcttcttcttgataaaaacagaaaaatggaacatgaggtcactcagttaaaggtacatga

SEQ ID NO: 147397 - DNA, 1751 bp, Arabidopsis thaliana landsberg
atgcttgatgttgatcctagctgtgcaatgattgtgagaaagaacgggaaaacatctttgcacactgcgggaaggtacgggcttcttcggatagtgaaagctctcatagagaaagacgcagcgattgttggtgttaaagataagaaaggtcagactgctcttcacatggctgttaaaggacgaagtttggaagtagtcgaagagattttgcaggctgattacacaatattgaatgagagagatcgaaaagggaacactgctttgcatattgctactcgaaaggcgcggccacaggtattactccactcctttcttagcttcttgtattgctagttagctttcaagaacaggggttgacacataaatgccttttgtgttttgtttattagataacgagcttattgctgacctttacggcgattgaagtgaatgcgattaacaaccagaaagaaactgctatggatttggcggataagctgcaatatagcgaatctgctttggagatcaatgaggctttggtagaagctggggctaagcatgggaggttcattggtcgagaagatgaggcgagagcattgaagcgagcagtgagtgatatcaaacacgaggtgcaatcgcagcttttgcagaatgagaaaaccaaccgtcgtgtctctgggatcgcgaaagagctgaggaaactccacagagaagcggttcagaacacgactaactccataacggtagtggcggttctgtttgcttccatagcgttcttggccatattcaacttgccgggtcagtatttcacggaggggtcgcatgtgggacaagccaatattgcagggagaaccggattccgcgtgttctgtcttttaaacgcgacatctctgtttatatcgttagcggttgtggtagttcaaataactttggtggcgtgggacacacgggcgcagaagaaagttgtgtctgtagtgaataagctaatgtgggcagcttgtgcttgcacattcggagcatttttggcgattgcatttgcggttgttggaaaggggaactcgtggatggcgattaccataacgttgcttgaagcaccgatcttggtagggacattggcaagtatgtgttatttcgtgtttcggcagcggtttaggagcggcaacgattcacagagaaggattaggagagggagtagtaagtcgttttcatggtcttactctcatcatgtatccgattttgaagatgaatcagatttcgagaagattattgctctttgaattaagtttcttaagcgtctttgtatagatcgtctcttctctttgcctttcttccaacgcaagtctgttgtattcttagaataaatcttgttggtacatattagtatcatatatagcaataaagtcgccacaggccatatctgtattgtttcttttgttctactactggaagtggttagtatatgtacaattcattcgagtactagtgaagtgtaatgtctcttattagcaaacattgtataagatgtaaatcattgtgagatgaggaaaatgtaaaaaggagcatcatttgacataaaatatccaataagtgacctctacaaactcatgtggttttccagttataaaaaaacaacacaaaaccacatgatcacttctttttcttacatctccacataaggtaaaaatataaaaagctccaaacataaaaacaaattcaaagaaacgagaaacccccaaaaaaacaatataaaggtagactgagggactgaaaaa

SEQ ID NO: 147398 - DNA, 2153 bp, Arabidopsis thaliana landsberg
acctacaggctgtgctactgttggatgcctttaacaaagataggacatccttgcaacaggccgttccagctcagcaaccagctgcaactttacctccgcccgatcctcgtactcaagaaatgatcaatgaaaaactaaagaaagcagaagagcttggtaaggagcaaacctcttattcgtatctgttttgttatatgtggtgatattgaatcggtagctctttaagttaccgtttcagtggtgcaaaattgtggtttctgtacttttgataattcttatcatttttacattcaacttctttgccaacggggaagtttctggtggctgatctaaaaatttaattggcctattaattgattctttatgaatgtacaaaactgagcttaggaaacctttgggataggcaatgttagaagaagacagtttatggttacatacatacataaaaactgaactttttcaatgttggaaacagccacagtacagttatgatatctgtacgtttatttcaggtgaacaagggatggttgatgaagcgcagaaagcactagaagaggcggaagctcttaagaaggtttgttttctttcgtaaattagttttctgtttcgttcttgtttccaagttacttcatactttataagatttggagatgttaatgaagtctattgacacagggatctctctttgtcttggtggttaatttgcttgaatagttctgcatgttccttatgtctctccctactcacttattgtataatattttcccctacttttattagttcctaagagtgttgtgcctgtacatgtttcagcttactgctagacaagaacctgtagtggattcaaccaagtacactgctgctgacgtgcgcattgtaagtcaagatcatcatttatatcaccttatctccgacatgataatatattgaaatccatttctcatagaggccctcaagattcttaattcttaggttattatcttatatagtttgtttagtctgatgaacattagaatttaaggaagatagtcctaatcctagtatccaaaaagaagtaatggcttataaagtttgaggacaattaaaatgctttggttgaagcatgtattcagtgttctcaattgtcaaacagcgtaaacagaaattgcttttgaagtgaagtatataccattttctcatctctgctcgctgtatattttttgtcactgtgttggttggtagtcctcattctctcttctcttattgtctcagacagaccagaagctgcgtctatgtgacatatgcggagcatttttgagcgtctatgacaggttaactttaattacttaaatttgtttatgttttatggttccgtggcgtttcataagaaagctagaaatagattattgggttgcaagtggttcattatttgaccccggctattgtacctccttttcaccagcaggctatttgggcccagttttacgaggattacttttgcagctaataaatgtgcgttctttcttgatttattgtgcctgttagagataaataatggaactttaaactatatctttgtcaccaatctgttatttgcatttggcaatgtcaaaaatctgttgtactgcctttagtgatcgtcggttagctgatcattttggagggaagcttcacttgggttacatgctgatccgcgacaaattggcagagcttcaggtaatatacagtagaatctttctagtgattttccttttctctcttgatatagactgtatagttatattctctctgtcttcttcaggaggagaagaacaaagttcacaaggaacgggtcgaagaaaggaggtttatttttctcaagcatttgaacacattgtttgtttacttcctttaatcttcaacatttttgctgaaaacctaaaccaatctcagatcaaaggagaggagtagagagcgagaatcaagtaaagacagagacggaggagatagccgtgaccgaggaagagatgttgaccgcaggagtagagatcgtgacaggcaccatgaccaccgagaacatgacagaaactataaccagtcacgtggctatgactcaagaagccggcgcagttcacggtcccggtctagggaaagaccgagggatcatgatcgccgcaggtaactttgattaagaa

SEQ ID NO: 147399 - DNA, 2186 bp, Arabidopsis thaliana landsberg
  unsure (1)..(2186): unsure at all n locations
ttttttgattggattttgaattggttactgaacatgtgttgacttgattatgtaaagatgcaatcaaaacggggaagagaaaacgaagaggaagtcaataatcaccatgctgttcagcagccgatgatgtatgcagagccctggtggaaaaacaaactcctttggtgttgtacctcaagcgagaccttctggaattccatcaaattcctcttctttggattgccccaatggttccgagtcaaacgnnnnnnnnnnnnnnnnnnaagacggtgcgttgaatggtgaaaacgatggcacttggaaggattcacaagctgcaacttcctctcgttcaggtttgagttcttggtctttaggcctacttggtgtattgttcatattcatcatttctgcagtactgttttactggatgacctagtgatcactgtcgaaagtgatgttgttccacgttcggaatgttgcaacttggtgaagagttgttcctcaagcaggcagggaaattaaatgggcatttgtgtgattcggcactatagggcgtgtcaagttcatgaatctggtccttgaaatatacttgcattgtaattgtagggtttcatagttctatccatgccaaggagattctgtctcgttgatatgtgcattgtgatttctttattttgtttgtaatggtgtctttcttcaacttcagtagataatcacggaatggaaggaaatgacccagcgctctctatccgtaacatgcatgatcagccacttgtacaaccaccagagcttgttggacactatatcgtatgtggtttcctctcattccttatatatatatatatatatatatgctttatgagttcttgagctgttaaattgacttcttattggtccctcaaaaggatttatcttgtataacgcccttttcatatgtatgataaactcaaaacttccttacaggcttgtgtcccaaacccatatcaggatccatattatgggggattgatgggagcatatggtcatcagcaattggtatcttgtcgaaacctctttcaatctctacaatagttccatatggtgcagtgtttatttgatgtatgtgcgcttttgccactaagtacccgtttgtggtgattttatttactgttggaatgtgtctgggttcagcaatagtcagtgagatgcttttaaagttcatttctgaaataactgagaatccaaagttatatctgaaattatcgagaacaactaatggggattcttggggtcttataagttatatgtaaagttttcgatgatctgagtctatttgttgcatttattttgttcattggtttaaacagggttttcgtccatatcttggaatgcctcgtgaaagaacagctctgccacttgacatggcacaagagcccgtttatgtgaatgcaaagcagtacgagggaattctaaggcgaagaaaagcacgtgccaaggcagagctagagaggaaagtcatccgggacagaaaggtatntttttctcatttatgaaaattgtacttgattggtgtcctggtaatctaagcatggtgtagagtccataatagcagtggacccatgctatatgaaggattgataatgagcattaagaatttgcaagtttggtttgtcgctcggtaaacttgtattgactatgtttgaaatgcgacagccatatcttcacgagtcaagacacaagcatgcaatgagaagggcacgagcgagtggaggccggtttgcgaagaaaagtgaggtagaagcgggagaggatgcaggagggagagacagagaaaggggttcagcaaccaactcatcaggctctgaacaagttgagacagactctaatgagaccctgaattcttctggtgcaccataataaaaaaagccaaagctctgagaggagagagagacacacactttggctaatataatccattgcctcaaaccggcaaatcattcttggctttttcgtttttgtgtttgctagttgttcttgtcagagtctcatattgtgtgggtttaacagttatgatgaatgtacaaagagcgagttatgttaggtgttagattttggagacaagagacaaaggaatagcaagtaggtcttgtttttattctttgaccttttttttctcttttgcaaaattgaaaaatacgtttgcttaatcgtttgcctttctgacc

SEQ ID NO: 147400 - DNA, 1654 bp, Arabidopsis thaliana landsberg
cttgagaactctattgcacaagtcgtcaacgccttctagcttagcacagagatcaccaaatgcagactgggaacaaatacatgtggctaaatctcttgtgaggaaagtaatcgaagatagtttgaagaaattggagattgagccctcaagatatagtaagccgataaggtgggaattaggagcctgttgggtgcaacatctgcaaaatcaagcttcaagtaaaagtgagtctaagaaaactgaagatcccaagcctgaaccagctgtcaagggtcttggaaagcaaggtgcactgctgaaggagataaaaaggaagatcgatgtgaaagctaacaagactgaacagggcaaagaggcccctgctaatgacactgacaatacatcagagactgaggatcaaaaggaactcgagaaacaaaacgaggaaatagaaaagatgtggaaagaactggtgacagaaactgcatatcagcgccttaaagaatcagaaactggtttccatctcaaggtttgtctgtttcttcagtggataagatattatagttgaggctagttgtaagttataattcataaatctctggtatctatttagcctagtttgttataatgaatcttaccttgtgttcaccctctccatgaacctgttctgcagtcacccaaagagctgattgaaatggcccgcaaatattacactgacactgctcttccaaaactggtcagtttctttgatctcttttgtcctgtttagggaaaatcctcagttcctcataaatttagacttgatatgttgcaggtggcagactttggatctcttgaactctcacccgtcgatggaagaactctgacagactttatgcacaccagaggcttgcaaatgcattccttgggaagagtggtaaccatttcattttatagtctttggaacccgctctcgtcaaactagatggtagaatgtgcttacgtagagaaaagcaaagttctccatttcttttaggaatcactcttttctcctctctttttaggtcgagctggctgaaaagcttcctcatgtgcaatccctctgtgttcatgaaatgattgttcgggcgtacaagcatatactgcaggctgttgtagcagctgttgaaaacaccgctgatgtggccacctcaatagcaacatgcttaaatgtcctattggggacaccgtctgacactgagagtgtatacgatgaaaagattaagtggacctgggtggaaacgttcatttccaagaggtttgggtgggattggaagcatgaaggctgccaggaactgagaaaattttccattcttagaggactgtcacacaaggtttgcaactgtcagtgaaatttgttttcaataatgactatctaacctgagattctcatatgttgcattactcatcggttcaggttggactggagcttgttcctaaagactatgagatggacacgtcttatccttttaagaagtttgatattatcagtatggttcctgtgtataaggtaccatgcataacgatcttactgtaataatcagctataatgaaacagtgatttgtttcagttacttaagaacactgctcttgtgtgcagcacgtagcatgttcatccgcagatgggcgcactttgttggaatcatccaaaacctcc

SEQ ID NO: 147401 - DNA, 2575 bp, Arabidopsis thaliana landsberg
ttaataatactaagttatctttggggacaggaggaattgaatcgtcacaggggccaaaaactgttgcttgcttctgccaaatatttccaccaagaaacacatgcttggttcaaatccatcgtgtatcctttcgtttgagctcttttattaaaaagcaccagttgatttacattttctcaatgcattggataagttaacgtattgaacttgttggctacttctgttatttagtcggtattttacatgtgaaacctgctatgtcaagagagcaaccaaatattccacatcatgttatagtccttttcctagctcaggataatccttcacttcaaagttagtgtccttagctttcagcagataacaaagaacgcaggaaagtacagatggtggaacaaccaggccaaaaagctgctggaaagagtccgcagacagtaagaataggaacttcaggtcgaagccgcccaatgtatgctgatgatattcagaaagcaaagatgcgtgccctttatatgcagagcaagaacagtaaaaaggatcctttaccaagtgccattggtgattcgaaaatcgttgctcctgagaagcccttggctcttcattcagccaaggattctgcacctattcagaacaatgaagctaagactgaagacacacctgtactctcgactgttcagcccgtcaatggattttcaactattcagcccgtcaatggacctctggctgttcagcctgtcaatggaccttcggctcttcaacccgtcaatggaccttcggccgtaattgtcccggtacaagctgatgaaattaaaaaaccttcaacacctcctaaaagcatttctagtaaggtgggagttatgatgaaaatgagttcacaaactattctcaagaattgcaagagaaaacagattgattggcatgtaccaccccgtaccatcattcgttggatttatatctcgttgccacttattgaataagctgaatgtgactctttagggtcttctttggtcacttctattttggtggttagttaggactcattctaatgcctagttttcttcaggaatggaacttgacgaactctggagagtagccgctggtggtaatagcaaggaggctgatgttcagagaaacagaaaccggcgagaaagagaaacaacatatcagtctcttcaaactataccgttgaaccctaaagaaccatgggatagggaaatggactatgatgacagtttgacccctgaaattccatctcaacagccaccagaagaaagtttaacggaaccacaggattcacttgatgaacgaagaattgctgctggtgctgccacaacctcttcatctctaagcagtcctgaacctgatctcgagttattagctgcgttacttaagaacccagatcttgtttatgcactaacttcgggaaaacccagtaatttagccggccaagatatggtaaaactgcttgatgtgattaagactggtgcaccaaactcaagcagtagctcaaataaacaggttgaagaaagggtcgaagtttcccttccatctcccactccatcaactaatcctggaatggtgcgttacttgaaacctattcaccccaaattcctcggacatatccaaaaccctattaatagatcatgttgccaaattgaatctcacgacatatagaaaaaaggaaagaactacaacaggctctagctaacaccaaactggattatgaattccagctgttagatctaacctgatgagtacaatgcccccattagaagatgttaatgtctgtttcttattctcttactgagttaagtgtattgttccaattttacagagtggatggggacaagaagggattcggaatccattttcaaggcaaaaccaagttggtactgcagttgctagatcgggtacacagcttcgtgttggttcaatgcaatggcatcaaacaaatgaacaatcaatcccacgacatgctccatcagcatacagtaactcgatcacattggctcacacagaaagagaacagcaacaatatatgcaaccaaaacttcatcacaatttacattttcaacaacaacaacaacaaccaatctcaacaacctcgtatgcagttagtgaaccagtaggacaaatgggaacaggtacatcgagttcatggaggagtcagcagagtcagaacagttactactcacatcaagaaaacgagattgcatcgggttcacaagttacttcataccaagggaatagccagtacatgagtagcaatccaggatatgaatcatggagtcctgataatagcccaagtaggaaccagcttaacatgaggggacaacaacaacaagcatcaaggaaacatgattcttctactcatccatattggaaccaaaacaaaagatggcgttaaaccatatataagactatggttctttggtcctcaatatttgcttgtcatggttgaattagcattatactctgttcagacacagattttcatttttaactcaaaacagattcatcagagataataaactaaaagaaagaatgaatggataaagttattactgtctcaattggc

SEQ ID NO: 147402 - DNA, 278 bp, Arabidopsis thaliana landsberg
cgtagaataacctttttcgtagacataacagattttggacacgtggatgatttatcaaccgtgaagattaaaaaaacgagaaatatctggattaacaatttcctgtgaataattacgatccacaaaaaagaatattaaaatcaaggaaaataaatataattgaagaaaaaagctcgaatttaagagaatcacaattaaacccaattcaggaaaaagatttcttctttgagtttttcattcatctatcggttgtttccattctcaggtttcaatcgaaa

SEQ ID NO: 147403 - DNA, 1036 bp, Arabidopsis thaliana landsberg
atggctaacgaatcgtggagtcgacgaaaaagccattctacgggctcaaccattggatcttcgtcgccagatccaacaacatctctgtctagccctcgttcgccgtgtaagccacaccagaataacaccacatttccattacgttccactcaagtaacaaaccctaattttacgttcttttaatttttcaggtgccgttctttgcgcagatggatgaccagctcttggatgcgatatgtgagcgtctagttccgtccttgaacacaaaagacacctatgttatacgcgaaggcgatcctgtaaacgagatgcttttcattattagaggtcagatggagagttcaactacagatggtggacggtcaggattctttaactctatcacacttagaccaggagatttctgcggtgaagagcttttaacctgggctttagtgccaaacattaatcataatctaccattgtccacgagaaccgtaaggactctctccgaagtagaagctttcgctctccgagcagaggacttgaaattcgtagctaaccaattcagacgtcttcacagcaagaaactccaacatgctttcaggtaatcctcgtatggtctcataagcaatataggtttcttgcttcacacgctataaggtttcttgatctttatgttttgactgtaaccagatactattcgcatcaatggagagcatggggaacttgttttatacaagctgcttggaggcgatacatgaagaggaaattagcaatggagttagctaggcaagaggaagaagacgattacttctatgacgatgatggagactatcaattcgaagaggacatgcctgaaagtagtaataacaacggagacgaaaacagcagcaataatcaaaatttgagtgcaacaatattagcgtctaagttcgcagctaatactaagagatgtgttttagggaaccaaagaggatctacaagaattgatcctgatcatccaactttgaagatgcctaaaatgtttaaaccagaggatccaggattcttctga

SEQ ID NO: 147404 - DNA, 1305 bp, Arabidopsis thaliana landsberg
atggagcctgctcatatcgattggaagagaatcgattctcgttttgttgaagacgttttttacgaacacatcagagctcctaaatggttcgatttcttggcccctacccattttgactccattgacgacgatgcttggttctgcaaacctggtaaataaagaaactattcttgtatctctgcttctattctatcgttctttactgattctggttttatcttcaactccagaatgtaatcatcccaagagacctgaggactttttctcaacgccgacttcttccaaggtttgtttctcccttcttatttactttcttgtttcctcataaagatatgaaattacagtttcttgacaatcacaaaggtttcacctttaataatttcctgcgttttctgtttcgaagcatccaagtctgagggatacgaatgagactctaacagagcagaatcagaggtggtgatctcgaacttaagggtcgccaatctcaattctgtgctatagcctttgaatgctttttggttcacactctgtttcaatttacttgtaggaggaggggatatgctttatcaccttctactccaaacaaccaagaaagtgaaaatcagaacccgaacttagccacacctccaagctaccaagcaaaatcatggagagcagcaattaaatcaacttctgtcaagaagatgaataaagaagttccaagactaaagagcacacaatcagctagaaatctgttttcagggagagacatatttggtcatatctcagatttctgctatgaattgaagagattagccacaagggttactgagagagaagatactgggaaatctgaagtgaaggagagtcatcaagtgggtggaatagtaaatcagccttactctgttcatgacttggaattgaaaaaggaaagaaagccactgcttgaagtaagcaaagataagctccctgagtccacggatgttaaaggaagcacatttaaagagaaccgtagaagaaagaagtaagttttgtcattttttcagtaaaatagtgttatgcacaacctacatagaagtgactttactaaacttctaatgatgatttgcaggagagtggatgatgcagagaacattcctgtctcacttaatgtggagactgtaaaaaacaaaggagaggagggtagaagaaagaagtaagttcctttatatgtttgagccttagatatgtatacaattgatgcccttagctcagtaaagtactaaactttggattaagtgaggattttttttaggagaatggatgatgcagagaacatccgagttc

SEQ ID NO: 147405 - DNA, 1285 bp, Arabidopsis thaliana landsberg
aacaaaagtctctctctctcgatcgacgccgcaacgtgctcctttcaggtgatctgcttcttattctccatttcgtcatctctgttgtttctagatttggatcacgttttttctttcctcgatctagtgtttgttttaactgttttcgtaatttctgatcagatttaaccggaaaagttgaatcacactgtcgcatctctcacagtcgtcggagaagaatgcacggtcgtccaaggaatgcttctaagccagaagaggaagcagcttcagctgctaaagctgttcagcttcgctctctccagtctcagtttatgacgaatcatcacgataaaatgtacaatcttctccttcatttccatcggatcagtgtacttcccagatttttagtacgatttgaaggatcctttgtttatttactaatcatttgttgcttttttggtttctagttataccaatgaagctattgagttaagcacgaagcttctagaaatcaatccggaggcgtacaccgcatggaactaccggaagcttgctgtggaggatcgccttgccagaattgagcctgatccaaacttggtcagcgcaattcttgatgaagaactcagagtggtgagttatcctgtcaattaaaagaaacgaatttgctctttatgaaagtagttgcttattagttactgtgaagtcggttctaaattcaggtagaaagtgctttgaggcagaatttcaagtcctatggtgcttggcatcatcgaaagtgggttttgagtaaagggcattcatccgtagggaatgaattgagacttttggaaaaattccagaagctggattccagaaattttcatgcttggaactatcgcaggtgaaaattagggaatgtcaacactttttgaaaggagcattgtgtatgttaatcaagcttgcatattaatgtgttgttcctttccaggtttgttgtagagctaaccaacagatcagaacaggatgagttgcagtatacagatgatatgatcaataacaatttcagcaactattctgcatggcataatcgtaggtatgcatattctttagtatatattatactttactgatttacatgttcagaaatagttttttagcataatcgtaggtatgcatattctttactatatatttttgttcacattctgcagtgtacttctatcaagtttgttggcacaaaatgctgatgggtttatgccaaatataaagattcctgaggaatatgactttgtacattcggctatttttacggaaccagatgaccaaa

SEQ ID NO: 147406 - DNA, 2075 bp, Arabidopsis thaliana landsberg
  unsure (1)..(2075): unsure at all n locations
ggtaaggtagttcttttgatactctcatttttcagatagtgaaccatggattaccacatgacttaatggacaagatcgagaagatgacaaaggaccattacaagacatgccaagaacaaaagttcaatgacatgctcaagtccaaaggtttggataatcttgagacagaagtcgaagatgtcgattgggaaagcactttctacgttcgtcacctccctcaatccaatctcaatgacatttcagatgtgtctgatgaatacaggtacataatttttttagaaaaatactattttagatcgaatgttatattcatttagtgataaataatatttattttcttctatgaaaaaaattagtcaccacacaaaaactcccccttaatcataacatctcttaggatacatgaataccaataaggccagttaattatcacttatttgtaggaccgaatttaattctatttttcttaaatacatctcaaattgactgtaaacaaatttcagttgtacactctacctcttttaccgttaattataaatattttcttactttttactttttctcacatgcatgagtttaagaatttctgactttctgtgatatttattggtaaatattttattgttaaaacccatttaaaaattattattttacttaaaagtaacttgaaacttgcatagtgaagcataatcattttcttttttgggaaatattatgtaatatattctgatttggcaggacggccatgaaagactttggtaagagactggagaatcttgctgaggatttgttggatctactgtgtgagaatctagggttagagaaagggtatttgaagaaagtgtttcatggaacaaaaggcccaacttttgggacaaaggtgagcaattatccaccatgtcctaaaccagagatgatcaaaggtcttagggcccacactgatgcaggaggcatcatcttgttgtttcaagacgacaaggtcagtggtctccagcttcttaaagatggtgactggattgatgttcctcctctcaaccactctattgtcatcaatcttggtgaccaacttgaggtatgtcatgttcacaccacattttcaaaatatcttttgctaagaaaaccaatgtgttatggtttagtctcggtttgatggaactataggaaacggttagtaaatgttataactgagttaaaccggaagaacgacatgcaatcttaattgagtatgattcggtacagctaaaccgatctgaattgtctgtaggtgataaccaacgggaagtataagagtgtgctgcaccgtgtggtgactcaacaagaaggaaacaggatgtcggttgcatcgttttacaacccgggaagcgatgccgagatctcaccagctacttcgcttgtcgagaaagattccgagtacccgagtttcgtctttgatgactacatgaagctttatgcaggggtcaagtttcagcccaaggagccacggttcgcagcaatgaagaatgcttctgcagttacagaactgagtcctacagcagccgtagagactttctaaaaatggatttgagattcaagtgaagcagagaaagaaagatgagtttgtgttgtgtgttatgtcaataagttaaaacttgtattagtgttgattaattgttggtcaattggtgtgttttaaagtgtggggtgtttatgtttatggaagatgataataattataataatctaaattctaagagttctaacgtggtcatcaccaaatcaagtcaaaacactctgtttcagaacttaacacaaatgaagctaaagtagcttttatcattaaagaagaagaaggaagttcagaagaatcaatcactaatgcaaaaacaacacaaatacttaaaaggttgaaacttaaacagagtttacaaatttatctaacaaatgcccnnnnnnnnnnnnnnnnnnnnnnnnnnnnnnnnnaaacttaaaaaaaacatctgagaatcatcaaatcaagcaagattcagtagtctacatcttcagggttattttccagtcacacaaccattcactaagccagaatcggtttttgtttc

SEQ ID NO: 147407 - DNA, 2726 bp, Arabidopsis thaliana landsberg
cttttaagtgaaatcggtttcgagagacagtgagacgaaaatgttaaggattttggggagaagagttgtttcagcttcgaaagagcttactagtattcaacaatggcggatccgaccaggaaccgattctcgtcccgatccttttcgaactttccggggactacaaaagggtttctgcgtgggcattttaccggacggagtcgacagaaattcggaggctttttctagcaattcgatcgccatggaagggatcttatcggagcttcgttcccatatcaaaaaggtaaagccatctcatttatcgattgatgtcttaattgtttgcagatgaatgatataagtgtatctcggtggagatttgtaggtattggccggaggtggagaggaagcggttaagaggaacagaagcagaaacaagcttttgcctagagaaaggattgatcggctacttgatcctggttcttcctttttggagctctctcaggttttgttttgtttctttgtttggatttaatgcacatttgcaatctagagtttattgttgattagtacttgcataagttaggaaaacaaaagaagattagggaattggcatttattaaaaacttgtttgatgttgctgcttactggatatgaatatgtttgcagcttgcaggacatgaattgtatgaggagcctttaccttcaggtgggataatcacagggataggaccaatccatggacgtatttgtatgtttatggcaaatgatcctacagttaaaggagggacgtattatcccattactatcaagaaacatctcagagcacaagagattgctgctcggtgcagacttccttgcatatatcttgttgatagtggtggtgcttaccttccaaaacaggctgaggttttccctgacaaggagaattttggtagggttttctacaacgaatcggttatgtcatctgatggaattccacaaatcgccattgttttaggctcctgcactgctggtggtgcttacattcctgccatggctgatgaaagtgtaatggtcaaagggaatggtaccatatttttggcaggaccgccacttgtcaaggtcaattttctcaagttactttctctcactctctctctcgttctagtcttaagtagtttcttgagaatctaacgctaaatgaaaaagcttttgaacaggctgctacaggagaagaagtttcagctgaggatttaggaggcgccactgttcactgtactgtgtccggtgtgtcagattattttgctcaaggtacatatattcatctctttctgcaatttaatatgaaaacaataatcgtgttttagagtttagaccttaagatgctctaagcttgcagacgagctacatggcctcgctattggaagaaacattgtcaagaatttgcacatggctgcaaaacaagggatggaaggaacatttggaagcaaaaatcttgtatacaaggaaccgctctatgacataaacgagcttcgctccattgctccagtagatcacaaacagcaatttgatgtgcggtctattattgcccggattgttgatggaagtgaatttgacgagttcaagaaacaatacggcactgtgagataatgttattcgccttattttgtatccaaatgttacctttttactttcttatgtggaacttctttttggcagacgcttgtgactggttttgctagaatttatggtcagacggtgggtattatcgggaacaatggcatactgttcaatgaatctgcactaaaaggagctcacttcatcgaattatgttctcaacgtaaaattcctcttgttttcctccaaaacatcacaggctttatggtaattgtagtgtttgtgttgtgttctcacatttggctatataagagtgtctctatctatcttacttgctccgtttttgcttataggtgggttctagagctgaggccaacggcattgcaaaagctggagcgaaaatggtgatggcagtatcctgtgctaaggtatgtttaattcttggttaagagtctgagagatttgattaggataagccagattctaagctcgggtcttcattcaggtaccaaagattacaatcataacgggtgcaagctttggtgctggaaactatgcaatgtgtgggcgtgcatacagtccagattttatgttcatttggccaaacgccagaattggcatcatgggaggcgctcaggtaaaccagaatgcaccgaaatgtttaaaccgaaaccaaactgaatcaaaatgtgtttataatcttagtgtagcagaacaaaattcagtttggttttgtttgacgttgttattggcttggcgaaaactttgcaggctgcaggtgttttaactcagattgaaagggctaccaagaagagacaaggaatcaaggtactgaataaaacattctctaaaccgatttcaactctgtttgttcaacattgatgaatttgcgtttttctttgtgatgcagtggactgaggaagagtaataagcgttcaagaagaaaacggtggatgcgtatgagagagaggcaaatccttactactcgacggcgagactttgggatgatggagtgattgatccgtgtgataccagaaaggttttgggactttgtctctctgctgctttaaaccgtccattagaagatactcgatttggtgtctttagaatgtaagcaacttttaaccaataaacattttcaagtaatg

SEQ ID NO: 147408 - DNA, 943 bp, Arabidopsis thaliana landsberg
ctaaaaatcactttgaagaatatgaagctaattagagtcaccctctttctttgtgcactagccattttattgcttgtaactccaacatcttctctacaacttaaacatccctactcatctcctagccaaggtaattaagttcactttttttgtcttaaacttttaaggtttgaatatgaagtggtaactgactttacttacaacaatacaggtttaagcaaaaagattgttacgaaaatggcgacgcgaaagctcatgatcatctctagtgaatatgtaagagattgttgtatgtatttatctcatattgaagctccagtttgatttctatgaaaagtttctaatcaaaccttctctattgcaaataataggtgatgacatcaacatctcatgaaggttcaagcgaacaacttcgagtcacttcttcaggtaaatcaatcatttgagaaattataagctgtttcttaatattatataaagtatttagacctttcttcatgaagatcttccttaaagaaatcgataattagcaagctcacataacttgagcacacttctatagtagtcaaacgaagttcaaacaaatagatataaaagtcaaacatacgaatcattgaccatgtcagaagaaaatctttatcaatgtttcttatgctttcttcttcagaattttgttattatctttctaagtataatatataaaactaaacgaaaagattcgaaacctttctgggactttcaaactgagaagtataatatgagatgattttgtattaagtctagtttatgttttgatttcacaggaaaatctaaggatgaagagaagaaactaagtgaagaagaagaagagaaaaaagctctagcgaaatatctatcgatggattatcgtacgtttagaagaagaagaccagttcacaacaaggctttacctcttgatccatga

SEQ ID NO: 147409 - DNA, 1895 bp, Arabidopsis thaliana landsberg
gcccagtagttgctgaggcaatgtttgtgaaccgagaggaaatcccaatctatcctgtatacagggatccggtaagtcatttcggtttatgttcgatcaaatgagcatgcatctgcaggagctagaatttgtgtctcatctttttatgtttacttttctcccttctcgacttgttcattgtcatcaggctgacattctttggtattcttttcaggtccatgactttggcttcttttcttatgatcccagtgctgtacagtttttgacttaccaagaaattcctcttgccccagaggcggcttctgttggactcgaaattagggttgttggaaatgatagcggagaaaaggtaagatacataggatggcggattacttcatattttagactgtatttttcagtttcatgttataaaagcagtcacttactcaacttagctctcaatttaaattttgatgaggtcagaactgtctatctattgttcaagttattctgtcaaatgtcaaacttagggtgcaaaaaaaaatgcattttaatatatgtttggtgcattaagacgcatttatggataagtaatgcttctggtaactggagtgttgatttgcaggtttccatactggctggtactcttgcgcggttggatcgggatgctccacattacaaaaagtatctctgcttcactgctcatgttttttagttctgcttattcctcaacatgaaaatttgtttgatgttacttgatacttgcatgaaatcttcgtaatttcatataggtagtaattgttgaactagtaatattccaccggtaccttttatagtttcttatggctacctgctttgtaatttttattttattttttggtgcagggatggttataacgacttcaatacgttttatatgcaagtaaagtgactctgtcctctttaatatttattgctttaaattttagtcactaacttatttcgaactgaattgcatgctgtcactctgtgtcaaagccttgttttctcttcttagtcgtgtcatgcttatggttaatccctgtttccacaaaaatgtgtctcttactcgtatttactctaaaatatcacgagtctaccactagggtaaaactttcctgtttgtagcttattgtgcaatacacaagtatgttatgctactgttattcaaagtgtaaaccttacacatacgctactgtttgttaatatggtatctgtgtttataggcagcatcaggtactaaaggtggttcaagtggttctcccgtcattgattggcaaggcagggcggtagctttgaatgctggcagcaagtcgtcaagtgcatcagccttcttcctaccacttcaacgagtgagcaatctctgtttctcgtatacttgtatcgatggttcagttacgactagaatcgagatggtgtaacttatttagtcactgaaataacccctgtaaattcagaacattagattattgtgtagcttctgcttctgtcaaagttaagaattgataagtgtataaagcctccactagagggttgtttaatgtgcttggtattccgaaaaatagttcatgctggaagtgtgtacaatgttacgaataaactacacatctacttcagatctcttcttttcatgtatgggatcctgagaatctagtaggaaacactgggaaagtcaaacatggttctggatctcattttttttgttctttacaaatcattttgtatttcaacccctatattaatttgaagtttagttagaaatttgcttaagacttttgaccaagaatggttctcttgtttggaaggttgttagggcgttaagttttctccaaaaaagcattgactcgcggacggataagccaaaagcagttcatattcctcgtggtacacttcag

SEQ ID NO: 147410 - DNA, 1494 bp, Arabidopsis thaliana landsberg; identical to SEQ ID NO: 25570

SEQ ID NO: 147411 - DNA, 4417 bp, Arabidopsis thaliana landsberg
ccgaaagatcctcactctccttctctgatctcgccatggaacctgacgtcagtatcgagactttgtcgatcattcggatcgccgtccttccgatcggcactattccgccgacgcttctccgggactaccactcgatgctgctccgtcatcacacgatcgcgctctcagctattagctctttctacactgaacatcagaaatctccattcacgaatcagccgtgggattccggctctctccggttcaaatttgtgcttggtggttctcctccgagtccttgggaggattttcagtctaatcggaagatgctcgccgtgatcggcctttgccactgtccttcgtcccctgatcttgattctgtcactgaaaaattcaatgtcgcttgtaagagttattcctcggctcttgtccggcgctgcttcgctttctcccctggcgattcgcaagtaagtatattagtttccatgcttcttatctgctatggcattcttagctcgatgccgatggatctagctagcttttttctgatttgtctctacagttgatagtgatgtccattttttgtaccagtgatttagttacttgcttatggatgcgttagattgacgatttactgaacaatgtactgtcttttgcagcttgaagatggagacaagaagggtgaaaatttgattttgtttcctccatctgacaagcaaactcaggagtttcatttacaaacaatgatgcaagacattgccgcttcgctgttaatggaatttgagaagtgggttcttcaggcagaatctgctggcacaattttgaagacgcctttggattcccaagctagtctcaactcagaggaggtttatgtctaggtgtcctataatttggtctacgtttcatttcttcctctggaagcttataacttattagcatagtcttctaggctcactagttttgtttaatgcaggttattaaggccaaaaagcgtaggctgggacgtgcacaaaaaactataggagactattccttgttggctggttcacctgttgatgccaatgctcattattctactgctctggaactggccagattgactggagattacttctggtatgccggtgccttggaaggcagtgtttgtgccttactggtaaggctttatgcaaatatatctctaaatgcattgttcttacatttttaatagtattatagtccaaaaacatggatagtgatgtgctgtttatcgaaagtgcactgattatgaaattgctctcatctgtccctctttaattaagtttgcaatcatcttagttttccgttttcttaatattaggtagatcggatgggtcaacgtgatgtggctttagaagatgaagttagatatcgatacactaatgttatcttgcactacagaaagtcatttattcaagaaattgctcagaggtaattctaccaacctgtttggctctcttcttcgataaacttaagtaatagcaatcaattctcttccttgcagagtttcgcccctaagctttgaactcgaagctacccttaagctggccagattcctttgcaggtatcattgtatgctctctatttctttaaattatcatggtgtggtttcctttcttgccttcagtctcctgcttaagtttaaggttgctatggtatttttgtctagtaggaagcttatcgctactaaaatttgaatataaactcatgggatcttgtgtgtgtgtggctttgatcctctaaaactatctgcaacattcaacttataataccaatatattgagattactattaagtattaagtggcctagtggaggatggctgtatgttaatgttttgtgattgatggtgatgttagctgggaaaagaataattattacgttttgaaaaagctaaaatacatgggttttccgtttagtatgaaatgatactctctggttgtggcagcttttatgtttttttaaccttctggttgcatcctcatttttctcttggtatctttgatcttaatcattcttacaatgtcattttatgtgttgtgcaggagggaactggctaaggaagtagtagagctattaacaaatgcagctgatggtgcaaagtctttaattgatgccagtgataggctcatattatatgttgaagtagcgcgtttatttggagcccttggttatcaacggaaagcagccttcttctgtaggcaggtcgcccaattgtatttgcttcaagacaatcgattggctgctatcagtgccatgcaagttctctctatgacaactgatgcatacagaattcaaagtagggcatccatgtcaaaagtgtcggttaacaatgtgagtttgccagcataggcattatttttcctctcttgtgtttgattgagcatggttttctggagttttttttgttatcatcacttttcactatcttggtatttatccatgtatcatactttgataatatattgtatcttctcttgtgtttgttggtaaaggaaactgggcgcctacctgacgctgggaaaatgcatcatcattccattgtctgcctgttcgagtcccattggagcactttgcagatgggtgtgcttaaggagatactcctctctgctgttcgtgctggagatcccttaactgcatggagtgctgcagctaggctattgaggtggcattatcctctaattacaccttcaggtcaaaatggacttgctaattcccttgcaaattcagcggatagattaccttctggaactcgctgtgctgaccctgccttgccttttgtaaggtatgtttatcagcagtcaacctttttgctctcagagatgttttgcttgtgcactctcaccatcatgaaacaacctaacttggtcatgttatatttcctagcactctaagtagagcaacgagatcagaaaaataagtaataatctcttttaatccatctcttgggcttcatatatgcccaatatgtgtttattttcaggaatgtgttccatgtttggttcttagctgactctggcaaaactgtgtatgttatggcaaattttaatggttcttctaagcatgattattttaatgaaatttcaggctattctctttcccactccattcctcccaagtggacatcgtaaaacgcaatccagcaagagaagattggtggacagggtctgctccttctgggccatttatttacactcctttcagcaaaggagatgccaacgaaagtagcaagcaggaattgatttgggtggtcggtgaaccagttcaggtcttagtggagttagcaaatccttgttgctttgatttgcggattgatagtatttatctctcagctcactcgagtaactttgatgcgtttcctgtcagtgtggacattccccctaactctgcaaaagtgatcacattatctggtattccaacagctgtaggaccagtgacaattccaggctgcacagttcactgctttggtgtaatcactgaacatgtgttcagggatgttgacaatctgcttcttggagcagcacaaggacttgtattttctgaccctttcagatcctgcggatctgcaaagctacgacatgtatttgttcctaacatatcagttgctcctccattgcccctccttgtggctaatgttgtgggtggtgatggtgcaattattctgtatgaaggtgaaattcgggaggtgtgtataaattttgcaaatgctggcacagttccaatagtacaggcgcatgtctcgctctctggaaagaatcaggatgctgttatctcgatcgcagatgaagctttacagtctgctcttcccttgaaacctggggcacaagtgactctgcctgtgactttaaaagcttggcatgtgggtccaactgattctgacaatactatgagcagtggcaggaatgctgcgggtaacacaggaagaccaaaagacggaaccagtccatcattgcttattcactacgcaggtattcatttttttccttgacgtatgtttctatgtatcttactttttcagtgcttcatgtatcctcacgatgactaattactaaaagcatttttgtattcatatttttgcagggccattgcctaacaatggggattcccaagaaaaagaatctatcgtgccaccgggcagacggcttgttgttcccttacaaatttgtgttttgcaaggtttgtcgtttgtgaaagctcgtttgctttccatggaaatccctgcacatgtgagtgacaaccttcgggatgaagacattgaaagagagagcaatgcagacagccttgtcaagatcaatccctttaggggaagctggggactacggtttcttgaacttgagttatctaacccaacagatgttgtttttgaaatcagcgtcttcgttcagctggaaaactctgccaaggaagatgattcttcacca

SEQ ID NO: 147412 - DNA, 1789 bp, Arabidopsis thaliana landsberg
atggagaccattcatactgattcagcttacaaagctttctcaagtaaaatctccgaaagaaagatcaattctgagatgccattcaatcaactttccgaacacgatcttaaagaagagcttgagaatacaaacataccaatcgatgagttgatagctgaggttactgtctatactctcttccctggtttatcatactttggattgagtacattacttagatatatgaatttaagcagggttagggttttgagcatgatagatgatgtatttgctttctggcttgtgttcgtactcttactggattcgactaacagaattgagattccatgttatgttgttgttgcagaagcaaaaatgcccatattcacaaatgcgggcagacctccacgagaaagtggagaagcttgaaaatgtcgatacagtggttaacctcagcatagcagtgatggtactcgctgtaatggtctcatcatctttactacgatgaagaactgatataatcatctgcacttcacttaatctatgtagtctgattcactgttgcagcttcacacccattttgtaattttttgcacaatgctataaaaaaaaattcaccaaaatcaagaaaatatcaactctcatgctcgaacctcagaaattgtagccagttatgctgcagtccacagattaattggctacttttcaagcctagatctaaggttcatgttcattcggcaatagttaaatctgcataaaacaagggaaacacaagatttaaggttcagaaattatgctcaccgtagctctcagatcgggtttggtgagctgcttggtatggcctagtaataatgtaatatcataaatgttaacaaataaaacaatattctttacttaatctgattaggatactgcaactttatccttgggtacttgaaaaagcaatagtttgttactatgctaattattgttaattttgtttcttactcaaaataactatcttctactattaatgtttttaattttaaaaattgttcaactttatattattaaagtataataaataaaaccacaagaaaatttacaaaatgtaataaaaaaccaagtaaatggaaggatgcattggtgtagccacataagtaggggcggaaggcaacaaagaaggagccatctttatcgcaactcctgaaactgagtctgaccctctacttacttcttttattgctgctctctctcattcttaattccaatctaataagtacgggctctgctagtacagatagagagagagagagtgtagaccaagacacacaacacaacacaacagagaaagagaattacattagttttttttctttcacattcctcttgcttattgctcttcaaaatctacctgtacactcttctcttttattgtcttgtttgtataaatcatctcctactaaaataattaatataacttgtcctctttctctttgcttctctgtttttcgcaattttctctttttgattctcttccttccttggaatccaccacactccatttgcttcttctgagatctgatctctctcctaggtgatgcgctgcggagatggcgaatcttgtccccggcgttttactcaagcttctccagcacatgaacaccgacgtcaaaatcgccggcgaacacaggtcctctcttttacaagtcatcagtattgttcccgctttagccggaggtgagctattcccgaatcaaggcttttatctcaaagtctctgattcctctcacgccacttatgtctctttacctgatgaacacgatgattt

SEQ ID NO: 147413 - DNA, 834 bp, Arabidopsis thaliana landsberg
atgtcgtgcgatggcagcttgcgaaaacgccagcaggtaattaattagttatctcacaacgccttaatttagtcatataagcaaacaatcaataagtgtgacacatgttgttgatatttagggaactcattcgaccaaaacgttaagtgaggttagtggaactggtagaaagccatggaatcagaagggtacaggtcgagctagacatggtacactgcgaggtccgcaggtaaatctgtttttgaattttaaggttttcatgccatcaaatatagctctctgattgaattttattgaaccattagtttcgaggtggttgtgtaatgcatggacccaaaccgagaagccatgccataaagatgaataagcaggttcgacggcttggactgaaaatagcattgacagctcgagccgcagaaggaaaagtcagcttctttctcttcttaatcataaaatgtactcttgataaccgtggcttgttattaaactgactttagttgtacctgctgattgggaaatttatgcagctcctcgtgtttgatgatttgggattgcctacgcataaaacaaagaacattgtgaactattacaaccaaatggagaacacaaagaaagtccttgttgtagaaggtggtcctattgatgaaaagctgaagctagccacccaaaatctacactatgtcaacataattccatcaatagtaagttacataatcacatatcaaacattgtggtttctcgactaattggttagcgaatcttgaactttgtttacgtaacactttgcaggggctaaatgtttacagcattctgctacacgagacgcttgtgatg

SEQ ID NO: 147414 - DNA, 858 bp, Arabidopsis thaliana landsberg
atggaaccgataacaatctttcaggtttattcgcttattggagggttctgcggttccccagtgaatttccatgccaaggatggatcaggttacaagttcttgggtgacattgttgtccagttagacaaattgaaccctcaggttaaaactcccaaattaacttgtgtctttgcagttacttacataatgtaactatcctggcaacaacaagcttaactacctatttttttctttggtgtgattataggttgcttctcgtatggtgtctgccttttcgaggtggaagcggtacgatgaaacccgtcaaggtctagccaaggtaaatagcccgacaaatgcaaacgagtcttgaattctatctaattcatttcctggttcttttgcttcattgagcctctgtgttcaatatttccgcagatcggaatctgtagccatgattcgtaatcattagattaagctgttgtgtttgtgtgttgtgtttgcaggcacaattggaaatgataatgtctgctaatgggctgtctgagaatgtctttgagattgcctccaagagtttggctgcttgagagacacgttaagaatccttttaaagacactttactctgaactatttacctactgaaattagtagtgggatatgttaaaatgatcacagattgttttgcctctgcttatgagctttactattacaataaacgtttgcattatatattacggcaatgttatttctcagaagctgtcattgctttgtctacattgagaaagatcatagaacttaataaaactttgactgtaaaataaagtgttacaatgcaaaaattttgaaagaaataaaagaaattgttgtaaacataatta

SEQ ID NO: 147415 - DNA, 1622 bp, Arabidopsis thaliana landsberg
tacgcaatcacgggggcaaattcggcaactggttcattccttgtctctccaaagaatcaagaagactccattaccaatcagcttaaggtctactactttcatcttattttgacaactttcgtattagaattctgttttagctaaatttggattttgacttaatttgcaagtatcttttacctttaggtttcaataaaagacaatctcagctttagttggtgactttttattactttccacgtgtaacattctaatttgttgacttttcctccattatttgttgaattgtcaatttgttgtttggttgcagaatggtgtgagaggtataatgctagatacatatgattttcaaaacgatatatggttgtgtcattccactggagggacttgctttaacttcacagcctttgtaagtttgcaatttgaatcattcgattttgtggtctatgagtgattaagtttggtttctaacgaaattaacttgcagcaaccagctatcaatgcacttaaagagatcaatgattttcttgaatcaaacttgtctgagattggtactatcatacttgaagattatgtcaaatctcaaatgggattgactaatgtattcaatgcatctggattgagtaagttcttgttaccaatctcgagaatgccgaaagacggtacagactggccaacggttgatgatatggtgaagcagaaccaaaggcttgtggtttttacttccaagaaggataaagaagcttctgaaggtcttgcttaccagtggaattacatggttgaaaatcagtgtgagtttttatgaacttggatcaaacatgattaaggcccagcttaacaatatgatatttaatttgtgttgtttatgtagatggtaatgatggaatgaaggatggatcatgctcgagtcgatctgaatcttcttcactagataccatgtctcggtctttggtgtttcagaactactttgaaaccagtccgaattcaacgcaagcgtgtgcggataattcctctccgttgatcgaaatgatgagaacttgccatgaagcagcgggtaaaaggtggcctaacttcatagctgttgatttttatcaggtgtgaacttttgaccaatccaactatttgtacagtttatcttctggaagtcaaattttcaaactcttctactattgatgtttaattgcagaggagtgatagtggaggagctgccgaagctgtagatgaagcaaacggtcgtctcacatgtggttgtgacagcttagtctattgcaaggtacgttacattgaaccagattggattctttcataatattgagctaatgatatatgtgtatttgcatatatgcagtcaaacgcaccttttggcacttgtgatgctcctcctccgaagtcgtctccatcaccagtctccggaggaaggatacttcacggaaaccaagaaatcttcctgcgggtaatgctgattctacagctattggattgtcatctctcgttctaatctctgcggcgactctcttgctgtggtgatagttcctcagtgagctcagtttgctttgatctgatacaaatgatttttgatttcccctttatacgtttccacaaaatggccaaaacattcaaaa

SEQ ID NO: 147416 - DNA, 1580 bp, Arabidopsis thaliana landsberg
  unsure (1)..(1580): unsure at all n locations
atgactgcagcaatagcagggggagttgctgcaggtgcagcacttctttttgctgtccagccattgcgtttgtttggtggctcaaaagaaaaccacaggaccacttttttgatgtacctggttagtcaactctcttcatctattttcccattgaagcttcttttgctgatttttatctgttttggtggaccaaattttgcagcggaagaagacccagaggttcatttaggacaactcaaaaggtttaccttgcgtgaactattagttgctacggataactttagcaataaaaatgtattgggtagaggtggttttggtaaagtgtataaaggacgtttagctgatggcactctagtggccgtgaaaaggctaaaagaagaacgtaccaagggtggggaactgcagtttcaaaccgaagttgagatgatcagtatggccgttcataggaacttgcttcggcttcgtggcttttgcatgactccaactgaaagattacttgtttatccctacatggctaatggaagtgttgcttcttgtttaagaggtaccacattctttgtcctaaaggttatttgtcatatagttttgttttgtttcgactggtttgtgattggtctgttggtaagcatcttatccttgattttctattatagagcgtcctgaaggcaatccagcacttgattggccaaaaagaaagcatattgctctgggatcagcaagggggctcgcgtatttacatgatcattgcgaccaaaagatcattcaccgggatgtgaaagctgcaaatatactgttagatgaagagtttgaagctgttgttggagactttgggctagcanaattaatgaattacaatgactcccatgtgacaactgctgtacgcggtacgattggccatatagctcccgagtacctctcgacaggaaaatcttctgagaagactgatgtttttgggtacggggtcatgcttctcgagctaatcactggacaaaaggctttcgatcttgctcggcttgcaaatgatgatgatatcatgttactcgactgggtatgtttttaatagttcccagatcatcgtttttgagtccaaaactgttattttgcaatgaataggagtgtttcttttgtgggtgtgattaggtgaaagaggttttgaaagagaagaagttggaaagcctagtggatgcagaactcgaaggaaagtacgtggaaacagaagtggagcagctgatacaaatggctctgctctgcactcaaagttctgcaatggaacgtccaaagatgtcagaagtagtgagaatgctggaaggagatggtttagctgagagatgggaagaatggcaaaaggaggagatgccaatacatgattttaattatcaagcctatcctcatgctagcactgactggctcatcccctattccaattcccttatcgaaaacgattacccctcgggtccaagataaccttttagaaagggtcttttcttgtgggttcttcaacaagtatatatatagattggtgaagttttaagatgcaaaaaaaaaccatgcacttttgaatatcaactcctctataagta

SEQ ID NO: 147417 - DNA, 1627 bp, Arabidopsis thaliana landsberg
aatgtttcaatatttgtctccatgactagtatttggggattcttcggtcgcattctctccggtactctctccgaatactttctcaagtaagtactcctcctttcatctccatatgcattttatcttaccattcacggtttgatccgctcctaagggcaatatccgtctctatttttttttctattttagatgtcactctattttagagatattttactccaatatttgtctttaaaatagactttactctaaaataaagtaaaaaatagaggaatctcattttcacctagagtcttttctaaaatagagtcttttctaaaatagaggaaaaaatagaaatatacatgggaattggtataagattaaccaaattatggtgttttagggactaataacagtaaaaactttataagctaggcacagttttggccctagtttactgttcaatccattttactatgtgtggttctgtacgatgctaccattgaaagtatcaattctcgttctaacatttaactaccaacattcattacagagctgtaacgtgacgtatataatttttcatcctcatatatggacatacaaaacattcaatgcgttctaaatttgtatatgtcttcttccttaaatgatttttctcatataaagaaaagggatcttttagaattttctggttgattcatttaactagtttttgtactacatagacaattccaaatcaaatatcttgctcttttccttattttggaccacggtcttttctcttcacgtgcccacttaattttccaccaaaatttcccctttggattcttttgaaacttttacattctactgatttataaaaattcaattttaaggttatgcaacatatatatcatctcaatcaaccatgttgattttatactttactaaccaaagaatgtataattttcttctaatttttataggaaagctggaacaccaagaccactatggaatgcagcctctcaaatccttatggccgtaggatatatactaatggctttagccgtgcctaattcactctacatcggttcaatggtggttggagtatgttacggtgtccgtctagccataactgtaccaacagcttccgaactctttggtctcaaatactacggtctcatctacaacatcttagtacttaacttgccacttggctcgtttctcttctcgggtctcctcgctggcttcctctacgatgcagaggcaacaccaactcctggtgggggcaacacgtgcgtaggagctcattgctaccgtctcatcttcatagtcatggcattagcttctgttatcggagtcggtttggatcttgtgttggcttataggactaaggagatttacgctaagattcacgctagcaagaagtcaaagaaatctggtggtagccttagttaagacactgtatatctagttccggtgcactacattgttttcagatgctgattttgtatacatgatacaatatcggattcaagatattgttgaacaaaatttcaagtaccagagatcattgttgtagtagcatcgccaatgtatttttttgtctttccgagatttgtcaaaattatataaatgtatgacattttgatagtccaattccaat

SEQ ID NO: 147418 - DNA, 1963 bp, Arabidopsis thaliana landsberg
aagaaatgatacggaagtggacctgaatgctactgggtgttcatcctcttcaattcatggagatgagatcagatacggttgtcaattacgagaaactatcgagataccctatgaacagtctctgcaaatttctgaagaaattgccaccatgggaccgataaaccggacaacaaatttccaggagaatctgggcgaaagcattaacctaactgtcactctagaggaacaaaccgtggagcagatggaaaacgaagaatccgattggcaacttatcaatggtgcaaccagtgcatggagagatgacgctgaagaggaggcagatacagatgttcctgagaattttccaaatcagttatcccagttatcatctgtggacgaggacagagaagccaacatactcggggaactcacagagatgcagcctgatgatgatgctgcatctcttcaaagcacaatacaagactggtcagaggaacattctgatcaggacacagtttcaatgggaagggctaccacattctttcctccggatgatggtaatgagaacaacatggaactcagagaactctcgagcaggtaagatatctagtaaatttttgccgtaatggcgacgcttttcaacctcattttatgtatctgatggcttgctatgggcactacaggagacgtgtctcaaatcttctgcagagcgggtttagggaaaatcttagccagttgatacaatcttacatggacagacgaagccaaaatcctgtcgactgggaagaagccgagacttattctgaccatacaatagtaggtgaagataccgaacagcaggatgatgctcagagtggtggtcaagaacttgatgctgttgaatctcctcctttgactctaccctccccagtcatccctattcagccacggtgggaccatgatcgatcccattcaaactggccggcacatgatttgcatcagggcattggaatggtaagactagtcccaaacttaatccctagggtgaagggtgccaaagcaattgtcttttctaaagatgaaggaactcattggttgatattttatatgctgttgcgcttatttgttaacttgatcaacaatatctctgcaggattgggattcgatcaacgatttgagggttgacatgggtagaatacagcaaaggatggataacctgcagaggatgctagaggcttgcatggaaatgcaactcgagttacaacggtccataagacaagaggtctctgctgcgatgcaccgctctactgaccaaccaggttttctattagtctcaagtcacattatgaccttacatatgatgattcacaagtcacaacagtatacaacaaagaatgcaactgtttttttttcttgtggactcaccttaatcgattcacaggtccatccaaggacactgcgagttacgagtcaaaatgggaatatgtaaggaaagggatctgctgcgtatgctgcgagagcaatattgactctttattgtataggtacgtatgaaactatgaaccatgaaaacaccaacatttgttttaaacatgttcccaaattgatatctaaactcctctgttttttttttcttgtttcgttcgtaaacaacagatgtggacatatgaacacctgcgagaagtgtgcaaagaagctagtggaagcgggaggaaaatgtcccatgtgtcaagcccctgtgattgaggtagttcgtgcttactctattctttgaaactcttgtgctctcctacggctccaagctctgcttatttgattctgggttttacagatatcaaatgtctttgattgtgatgtttttagcatagatatttactctgattcactcggctcttaattttatccgtggtgtaagaaagacaaacacacacttcttaactatttttatacacatgaaacatcaaaagattcaatagaaattggtgacagtgaactatctgtgact

SEQ ID NO: 147419 - DNA, 1886 bp, Arabidopsis thaliana landsberg
ggctgttgatcatcagtttgaaggtgacctttttgctacggccggagctcaacttgatatatggaatcataataggtactcaggctcctgctaaaagaaatctttggtgtttgttttaattttacgtaagcagggcttatggttttactttttgtaattaggtctcagccagttcagagtttccagtggggaactgactctgtaatatctgttcggtttaatcctggagagcctaatttattggctacatcagctaggtatattctttctactttatacttgtatatgtcatgtaattgtctgtgctacaccttccagagctttctctaacactgtaagaggatatctcttcttccagtgaccggagcataaccatatatgatctccgcttgtcttctgcggcaaggaaaattatcatgatggtatagttgaaacttttttacatattctcgtcatatttaatacattaatacccttcaaactaaacaattgcaaccggggactgctaattgcttgtcttttggcagacaaaaacaaatttaattgcatggaaccccatggagcctatgaacctgacagctgcaagtgataatcataaagtgaatttttctgtgatgggctatgctaaatcagcgtttgtcttttgcttatgtgctaattttatcccatggggaaactgaataggctaatgaagatggaagttgctatagctttgatggtagaaagttggacgaagccaagtgcgtgcataaagatcatgtttctgcagtgtaagaatgaagaatgatttatctcaagtatcagctataatatttaacaagatatcatccaaatgcattatgattatctaatttcatcatttttcaggatggatattgacttttcaccgactggtcgtgagtttgttacgggttcttatgatcgatctgtgagaatcttcccatacaatggaggacacagcagggaaatctaccatacaaagaggatgcagaggtacaatctactgaacagtctatatatacttcaagttcagatgttctagtgtaccaccttggtaatttgatttagtctaagcaatttctaaatttcatttcttttttcttgtagagtattctgtgtcaaatatagctgtgatgctacatatgtaatatcgggtagtgatgacacccaatctcaggctatggaaggcaaaggcatcagagcaattgggagttgtaagattctgtgaatttatacaaaataaagaccaaaaaagagttaccacaggcttagcagttgatccaatagtgcatatgattatgagatattactcgtacatgctttcttaagaagttttaacttggaacggtgaattgtcaatgttgattggtgtgttgtgctgcagattcttccaagggaacaaaagaagcatgagtacaacgaggctgtgaagaaccggtacaagcatctttctgaggttaagcgcattgtgaggtaactgaccaatgaaaactgtggttttatcccatgctttaactctggagattgtcaaaagataactatactaacatggtaacgttttggttattgtgaattacagacacaggcacttgccaaaaccaatatacaaagcgatgggtatcattcgaactgtgaacgattcgaagagaagaaaagaagcacgaaggaaagctcacagtgctccaggaacagtggtcacagcacctctgcgcaaaagaaagatcatcaaagaagtggagtgactctactctttctccgtttgttcctttcaaggatgatgatacgtggagaggattgtattggtatagtgagggtaagattaggaacatgaacatttttgctgtgttgtaagcctttctttatgccattaagttattaccggttag

SEQ ID NO: 147420 - DNA, 2471 bp, Arabidopsis thaliana landsberg
ttcaagatctcgaagagttctgttggcgtatgttcatcatcctttagctgctaataagggttcatctgttgaagagttaaagcaaggtctttgttgtacaaagactgtcactcttgttagttctcggagatgttctacattgtgctttgttggaaaatctcaagacactgaaactaagtaagcccaattttcttagctttcattgttcgaacttgtcttgttctgtttcatacttagttataagtttcttgtgtgttgtgttagttcccaagttgtacaaaaagaaggtgagaagcaagtgatgccgaggaggaagagtagtaactcaagccaacttttggtggaatatgtgtctaatgatgcgaagtttgtgaatgaacgggctcgtaatgactttgttcttctatctcggtactttttcgcgtatccaacggttacatcatctagaaattatgcattagtggaggtttcttatgtgttgaggtttgtgtgtttgcagtggcatcatgaggcttgatgctcgtgcacgacaggatgttgccattcttgggtccgggttccttaaactcgatggtaagatttgtttctctttcacactaatatataattcttttactgcttcctaacttgccttgtgggtttttgatgtagctcgagcaagagaagatacagagaaaatagatcgtgatgttaagagaaaggccgagcgccttcatcatattgctactgtatgcagcttattccttcattgatatatgcacatttactcactactcttctggttttgttgttgtcttaattttcttatttggtttttatgttcatagatattaaaaaacatagctgagtctaagttgaaaaatgctgctgataagcattggagcgatggtgccttagaggtatgcccatctgcctcattcttggtttacttgtggaaagttatgtgtgatcataaagtataatcactatctgagattgacatgataaaagtgacaactcaaaagtatttcgggagaattggcggatgatatactatttccctgatttccaggctgatttaaggcgagcagatttccgtgctaaacaacgagccatggaagacgcattcatggctttagaggtaaacacaaagtcttggtatttttgttcatcttccagcatggtaacacctcctctgtcctgttttggtgcagttcattaagaacatccacgacatgatggtgaacaaaatgcttgacagcttgtaagaagcctatgtccttgtcacttcctctttttcttgatatcaagatctcaatgttaaaattgttattctaaggctgacatctgaaaccggtaccacggatcgcatatcgcttgagaagaatggaatagctctcgggtttttccctggggaagtttcatctgatcgcatatctgctattgaggtctgatacaccaggaaaaggctatgttttctcaagtattgttctctctaatggttcctttttgatgttgaaaacaggaagcttacaagagtatggcatcagcgctctcagaagccgatgggattgactacactgaccccgaagaggtatggtccaacattgtcaataccaaaaaaattctgttacagtgttttcataagtgatcatattcttttggttttaacagctcgagttattagtcacgactctgattgaccttgatgcaatggatggtaaaagtagtgcatctctcttggctgaatgctcaagctctccagatgtcaatacaaggtcaacaccagcattctattacgttccttaactactttcttcgatgagttcttcgcttaacattctcttaggtgaatatttcattgtgtgttcctattctgatttgagatccctctgtttatttctcgtcttgttgtagaaaagcgttggctaatgccttagcagcggcaccatcaatgtggacactaggaaatgcaggcatgggagcattacaggtaatagagaatatgaaaatcttgatgaccattcttgcaaagtgatggactttggataaaatattaaagtaccctttttgcagagactcgctgaagacagtaacccggcgattgcagcagctgcttcgagagcgatcaatgcgctgaagaagcaatgggaagtagaggaaggagactcactgaggtttatgatgaacttcgagactccgaatgatgatgatgatgtagacagtgaccttgatgagatctgaaaatgatgatttcatgtaaacgaagatgaagtttgtagataattttcagtgaactttagtgttacagagatgatagtaggtgacttcgttggggtcatgtaattaattaaaactggccgatttagtattttgttgttgagatattcatatataactctttggagtttaagttgtattaaactattatgtgttttgttgtactgtacacataatgataacaagaatgagaaacgtttggaaagaacgaa

SEQ ID NO: 147421 - DNA, 474 bp, Arabidopsis thaliana landsberg
aacctactttggttcgccgacatttcttcctcggttgctgaggacattttaatatacacattgcagctgacggaaaagaagctagaggagcacgagacaaatctaaggttgaactcttcagacaacattgcagcagtctccagcattgtccttaaaaagcagaggagaagccgagccaggcaagggaagcggaaatgccaagatgaccagcacattgtagacacattttcagaatgggaagctaatgatgatctgcaggtaataggaaagctaatggaagcgtctgacttaaaatggaattgctggttccctaagaacaagagcaaaagctctcctcctaaaccagtagatgctttcacttcctccggggaagaaaaaacaggcgtcgattggggagcattaagaaagcgaagacgaggctctagaattcctgctgctgattttaagcatatgatcatcaaccaagtagtatag

SEQ ID NO: 147422 - DNA, 1456 bp, Arabidopsis thaliana landsberg
atgatttatcgaatcaatgcaattagcagtgacgggaagcaaataggcaaaaatctaatcaatattggggggaaaacgtacaccgtgctgacgagaaccggcgttgatgcgctcgatccagagacctctcatctcacgtttcttgttgcgcctatctctgtaagagtactgcagagctttctcgactctttccctcgcaattcttatacaattcttagctcttcctctgaaacccttcgctagcttgaagatctccttcttgttcatcttttctctttattcttcttcctcctctatctattcttcgtccttctctcactaatactgtaactccatttccttcttctaacgccgcctctgtgtatcccccttctgtttcaattccgggtcgatcgggtcgggtcgtagacaaatccggtcacacaattattaaaaccaattctccatctactgggcctttattatataacatcacaaactaaacaaagcccactatcccatccagtaactcccgacagaggacacgtgttgccatgtcattaccacgtgtcacaagctttccaactctgcttcattttcccgggaaacaaacaaaaacagaaccattattacttttccggaaacagaatttaagtggctttgctctgttcttcttgacccatcacacagaaaaaaccaaaaaaagaaagaatttcaagttttcaactgtcaaaatcttgtagtagtaatggaaaatcatcaccgaatatccgccacaaaatacaacggcgaagcagtgtcggacgatgtgggccaggggaagctatattctccaaaccacgcgatcaaaatctctccagaatccgacgaaaacgtgggccaagggaacctctactctcctgaccacgcgatcaaaatcgcaacgaaccctgattccgtggattcctcatcagaggaagaagaaggagagaagcagaggaagacgatcatgttggggctgaagaatcttgcggcggttaaggataaagtgttagaaaaactatcggctgcttcggttccatctgagtcgcttgaaaacgctaaacagtttttggaaggagccattaaggatttcgccggagcggcgcagggtatgacgaaagacgcgttgcaccggattaaaactcagctcgctgttattgttccgtctgtttctcctgccgtcaccgaaaaggtttagttttaaaaacaattggtccaccgggtaaactaatttggactcttttttggctgacttgtgaatttacttttgacggagcagatagtggacgatgctgagaaagaagccattgacggagaggaagaagatgagagcaagtcaaaagaaagctccgggaagttgccgtttgtttcccgacatcttcgtttttcggctctctcgccaaacctttctccaagctttgatgggtttgtgtcgtacgccttcatgactatgtga

SEQ ID NO: 147423 - DNA, 299 bp, Arabidopsis thaliana landsberg
atgaaggctgataacttgaggcagcagaccgttcaccagctgaggcggatcttgaccgtccgacaagctgcacggtgtttcctagtcatcggagagtactatggacggctcagagctcttagctccctttggttgtcacgcccacgagagtaagacacatttttatgcatatatacatttcatagacgtataatagtgctaaaatatgaatttgatatcgggaattatcaatgtgaataggacactgatgagtgatgaaaccttttgtcaaacgacgacggatttgcagattgttcaat

SEQ ID NO: 147424 - DNA, 3996 bp, Arabidopsis thaliana landsberg
atggaggaagacgaggatcagtttttgttgagtagcttaggtgtgacatcggccaatcctgaagatctagaacagaagatactcgatgaggtaaatatttgctcattcgtttggtattagtgctgcattgttgattctatgaaagggttagtaatttatgaaaactagcttgaactctaaatgtgtttatctctttgtcaggcgacgaagaaaccatacaacgatgagggtgggagcgaggaggagaagtctacacagcttgaaggaaccaatctgctttcatctagccaaaacgagcttttgaataaattgagggctgtaaagtttgaaatagatgctgttgcatcaactgttgagaacgtcgacgagattgcagcagaaaagggcttaaagaaagatgatgaatcagatttacaagggttgcatagtggttctgctcttcagcatgcccttgccacagaccggctaagaagtcttaagaagagaaaaattcaacttgaaaaggaacttactggtcttcatggtcagagtgcgtctagtagtgctgatcacggtaatctactgcgagatttggtgaaggagaagcctagtcttaagagaaaattgaaagagattcggaaaccaagcagaagagatgggaagaaggtgaaagtagtctcctttcgtgaggacacagattttgatgctgtttttgatggagcttcagctggttttgttgaaacggtacgtccagttatcttctaaaggttttatatatttgacctgattcctgtgggattatgctctttatctgtgggtatgtaaaatgcatatatgaaagacagtgactaatttcaagggtgttcttgtctaggaaagagatgaactggtgagaaaaggaattttaactccctttcacaagctcgatggttctgaacgccgacttcaacaacctggaccgtaaaactcacgcaccctaccttgaggagacgacgaaaatgaggactccagcattattgatagagctgtccaatctatgtcgctggctgcaaaggctcgtcccacaaccaagctacttgatgcagaagacttgccaaagcttgaaccgcccactgctccttttagaaggctgagaaagctttacaagactcctaattctccggataatgaagcaaagaaacgtaaagctgggaagaagagcaaaaagacgcggcctttgcctgaaaagaaatggagaaagcgaatctctcgtgaagactctagtcttcaaggaagtggtatgactgatgctattgacaattatttgtatttacagattgctgtttgggccctttgattgaatttcatggctattaattggagcgaatgcttttgaaaagataaggctgtgatattggatcttcccgatgttgagatatcacatgttatcaatgcaatgcttttaagtgataagtctcaacagtttctaccaatgttaagcaaattcttttttttccctcacttgagtttatgtaaaccaacaagttatgatgttgattcttgttgcaatgtttcaggagatggaaggagaatcttgaccacttccagttgcgaggaagaagagctagatgattttgatgatgcagatgacaacgaaagatcttctgtacagcttgaaggtggattaaacattcctgaatgcatctttcgtaaactttttgactaccaaagagttggggtgcaatggctttgggaacttcattgccaaagggctggtggcattatcggggacgagatgggtcttggtaaaactatacaggtcttatcttttctcggatccttgcatttcagtaagatgtacaaaccgagtattatcatatgtcctgttacactcttgcgtcaatggagaagagaagcacagaaatggtacccagattttcacgtggaaatactccatgactcagcacaagattctgggcacggcaaaggtcaaggcaaggcctctgaaagtgattacgacagtgagagttccgttgatagtgatcatgagccaaagtctaagaacaccaagaagtgggattctttgttaaaccgggttctaaattctgagtcagggctcctcatcaccacatatgagcaattgaggttgcagggtgagaagctgctcaatattgagtggggttatgcagtactggacgaaggccatcggatccggaacccaaattctgacattactttggtgtgcaaacagttacagaccgtccatcgaattattatgactggggcaccaatccagaataaactaacagaactctggtccttgttcgattttgttttcccgggaaaactgggggtcctgcctgtgtttgaggcagaattttctgttcccataactgtgggtggttatgccaatgcttctcctttacaagtgtcgactgcctataggtaaattacctggtctttcttttgaatcacttagttaactcatcacagtttgtgctctaaagaattcttgacaatgtgcaggtgtgctgttgttctccgtgatttgattatgccgtacctcctccgccgtatgaaggccgatgtaaacgcacatcttacaaaaaagactgaacacgttctcttttgcagtctcactgtggagcagcgatctacctacagggcattccttgcaagctccgaagtagaacagatttttgatggcaacaggaattcgctttatgggattgatgtgatgcgtaagatatgcaaccaccctgatctacttgagagagaacattctcaccagaacccagattatggaaacccagaacgcagtgggaagatgaaggttgttgcagaagtgctcaaggtctggaaacagcaaggacaccgtgtacttctgttttcacagactcagcaaatgcttgacatcctcgagagcttcttggttgcaaatgagtatagttaccggaggatggatggtcttactccagtgaaacagagaatggctttaattgatgagtttaataattcagaagacatgtttgttttcgttctgacgacgaaggttggtggtttgggaacaaatttgactggtgcgaacagggtcattatctttgacccggattggaacccctcaaatgatatgcaggtacgttttactttgaatgtcacagattcagtgtgcaaaaaacccgtcgtggccataaataacaatcaattttctgcttttttgggcaggcaagggaacgtgcatggcgtattgggcagaagaaggatgttaccgtttacagattgatcactcgtggcacaattgaggagaaggtatatcatagacagatttataaacattttctcaccaataagatcttgaagaatccacaacagagaagattcttcaaagctcgggatatgaaagatcttttcatcctgaaagatgatggcgatagcaacgcctccacggaaacctctaacatcttcagtcagctggcggaagagataaacatcgtaggagttcaatcagataaaaaacctgaatccgatacacaacttgctcttcacaaaactgcagagggatcctcagagcaaacagatgtggaaatgactgataaaactggtgaagccatggatgaagagacaaatatcttaaagagtctctttgatgcgcatggaatacatgtaagtacattaataagtgctcattgaaggttcttctccgacttactttcccataatttccaattcccttcactctcttacaatttttaacacagagtgctgtgaatcacgacgccataatgaatgcaaacgacgaggaagagaagatgagacttgaacaccaagcatctcaagtggcacaaagagctgcggaagcattgcgccaatcacgaatgctgcgtagccgcgaaagcatctcagtgcctacatggacgggaagatctggttgtgcaggtgcaccatcatctgtacggaggagatttggatcaactgtcaattcccggttaacccagactggagacaaaccatcagcgattaagaatggaatcagtgcgg

SEQ ID NO: 147425 - DNA, 1103 bp, Arabidopsis thaliana landsberg
aagattttaatcgaattcaaacattaattctctgacaatcagaaaacaaagaaaaatgagaacaactcttatcttcttcacgagactgactaaacaatcatagatttttccgttttttgggtttcgtctggtgttactctctccttctggttagttctttttttccgaattcttacaaattattgcggtttcattaagatgaattatgatttggatcaccatccgttgtttttgtgtccggttttgattcttaggtctaatcgcgtttcatgttttttttttgtgttcttctgggtttgataattttatagttgaagttttatgaaatttgatttcaattgcaaataatgatgatttgtttagtaagttgataaattgacaaagaatctggctttggtttttgtttgcttctaagaaaattaggaactaattcttcaatttacctggaaagcaaaacatatcagattctctaaaaagtagttttgtaataagcttttttggtgatggatctgtcggcaatcagaaagattcttcctttgaaataaatgattcatattatttttcctataaatagattcaaaacggttaataagattttgctaaatctacctaatttctaaatcacattgatcttgaattgaattctcagtctcttgtcttatctttagagttatggtgaaataatggcagcagctgaagcaagagcagtgtggcaaagaacagttaatcgttgctttgtccaagaagacgctaaaagagctcccaagttaacttattgccaatcatcttcatcctcaactgcttcttcaactaagcaagtggaagtttctggttcttctcctcgagtttctgttgaaccacggactcaatcatcttgtgcaggtttcatgcctcttcctcgaaacccgaatttccctgatctgttaccccacaacaccagactgtggagtcatcctcatcatcagtttcaggtgaataagaagcagccattggaggatgaggttaacaatcaaggtgtatctgagaagaagtctgaattgcgagctggagagaaacaaggaaagtcttttaattccgaaagctttcaagagttatagagttga

SEQ ID NO: 147426 - DNA, 1540 bp, Arabidopsis thaliana landsberg
  unsure (1)..(1540): unsure at all n locations
agtcacgtggcatgacagaagatgctctagaaggagcaactgatcctgactacagatntgagttggccatacagctcggtagattggctgtcgcaaaggttagtctgtagtttttaccatgtgagaagctttatttccatgacttaccgatatgtttttactcgaattctttttttttgacaggacattgctgtagaggcacaaaatgaatctaaatggaagcaacttggagaattagctatgtcaagtgggaaggtgaccattttttagctgcaatcagtgttctaggattcttacaaaggttaaagctaacatgtatttttcttttcattttccttcccatgcttggactacttagctggatatggctgaggaatgcatgaggcatgctatggatttgagtggtctgctgctgctttattcttcattgggccatgcagacggaatgatgaagctggcagcaaatgcaaaagagcaaggaaagaacaatgtcgcttttctttgcttgttcatgttgggtcaagtagaagactgcctgcatctgttggtggaaaggtacattgtttactatttcttacatgtggaacatatattcccgcaactaattacgtctatgctgatattaatatggttacagtaatcgaatacctgaagccgctctgatggcgagatcgtaccttccaagcaaggtctccgaaatagtggcattgtggagaaacgatttgaccaaggttagtggtagacacatccgatgcaccttgtgattgaatttcaaaccttgcctgttgagatatccacaatttttcttcatcctctgtcaatctggatatagataagtccaaaggctgctgaatctctggctgatcccgaagagtatcccaatctctttgaggagtggcaagtcgccctgtcccttgaaaatagagctgcagagacgaggtatcttttcgtcgttgccgtcattagcttattcttaaaaacagtgcttatgaggaaacctttttaattgaattgtgggacttaagccatttagagtcatgtgtctgtattacatagcaaggtagccgtcatgtatttgcttataatttgaatttatacccgtataaacataagccgaatgtcgatttcattttttcaggatcctcataaacaaagtatttttgttgacttatcttgcaggggcgtccatcctcctgctggggattattgtagtcatgcagacagagatcatacaactttagtggatgcttttagaattatgcaaatagaggaagagggtcgacttgagcaaggggatgttctcgacgaggtatgcatgtttacattacatgcattgaagaggattgtcttttacccatgatatccaatccaatggtcttggccatggtggacaatggtaggatcattaattctactgtcgctgcttcagtttgttgtgaacaggttggggaagagggggaagatggagaggaagaggaggaggaggctcctcttcaccagtgtctatcatctttactatctgacgtgcttcacgcaggcg

SEQ ID NO: 147427 - DNA, 1057 bp, Arabidopsis thaliana landsberg; identical to SEQ ID NO: 34536

SEQ ID NO: 147428 - DNA, 2234 bp, Arabidopsis thaliana landsberg
  unsure (1)..(2234): unsure at all n locations
atgcaggctatagcgacggttaagcgaacacctgcttacaaaaataagctcaaggcattagaactcgaacgcacaggtggagtaagtaacaagaagaagggttcaaagcagattgaccagtatgtacccccagttatttaaattgcctttttattagctgagaatgtgtcgtatcgctgaataaatcataatcatttattgtttgggcaggaaactacaggaagagctaagcaacgaacttgacttacaaatcaaaggagctgaaaaaccatcggtctgggaacttctcggtgttcgattcattctcctaccatacactatcattaaggtttcattttcttaaaatactttcactgtgccacatttcacagattcctccatatcctactttcccgagatagctgattcaacattctgttatcttccagcttctagtatggtacagcagttgggtgtggagatataaggtcaagaaagctccttattcatgggaagacgcatcatacctaacccgaagatcacttagtgtgcctgccgacgcatgggctaatctaggtatccttctattctctaatttccaacctgaaccgacatattgataaagattgatgtctaatacaatgtgattaaatctattgtgcaaattcgatatttttcagatgaatataggaaggaagatctggtgcgncnaanctcgttatccggagaaagggtataaggtttcatcgtcttatttcatctgtaaatgggctgcttccactcaaaggcagcaaaagaatttcgaggacacgaagaccctgttaagcttgcctctgagacagcttgtaagtttactcgcgctataagtttaaacctcctctagattcatttctctcaaagctgcatgttcatttgttttctgatatgagatgagaatcatcagttagattcaaatcattctttctctgttcactgatttagtttatctccggtttggatttttttagttttgtgttttggagtctttgtctgcctaacaatttctagtaatgatccttcaaagttggttaacactctatctcatgtttcttgttaccaataccatcaccttaatcttgttccttaacttgtcaagacgagttctctctccatgcaaattctaaatgtgaattattagtctctttgtttgtttgtttgtttgtttgttcctggtaattctttgttttgatctcgtagtgttgcttgtttttttctcttttccagttagtgtgagtgaggttgaagcattatttgagctattcaagagcataagcagttcggttgttgatgatggtctgattaacaaggtacaaagtttgtttcttttgacccaatttggatcttttcatgaccccatcgttgtatctttttgttctttacgctattcatctacagtatttttcaacttagttgactttatttgagcaataattattcttccatgacgatatgtctgttccatattgcatcgattcaatgtatcgtagcccttaatgtttgacttgaacttaacttattttattgattgctttgattttgaattttgaagccttcatggcccaccttgtttatgttgttttttaatcctggcttcacatgtatgcaggaggagtttcaacttgctttgttcaaaagccggaagagggagaatatatttgctaatagggtaaaatcttaattcttcaggcttttacaagattcgtcttctggaagagtgatctaaaccaagataatatgtccattatactaaacaatattgcttttccgcagatatttgatatgtttgatgttaaacgaaaaggagtcatcgatttcggggactttgtaagatcactcaatgttttccaccccaatgcttctctagaagacaaaatagattgtaagttgacataagatagtttcatatataggtgtttattgaagcttttgtgaagagatttattgattctggtctgccattatttctgaggtacgtttaggctttacgacatggactgcacggggtacattgaacgacaagaggtaatactaactagcaagctttgaatactagtcatgatagatctttgccatgtgcttgagtatacatcttttacttaataactttgcgagaaatcgataatgaatgtgatatatttgccggtcatgcaaatggtgatcgcgcttctctgcgaatctgaaatggaacctgcttgtgaaaccatagagataatact

SEQ ID NO: 147429 - DNA, 428 bp, Arabidopsis thaliana landsberg
aaaaaaaactctcttccaaaaatggcaattagggtttcccacaagtctttcctcgtcgcacttcttctcatactcttcatttcctctcctactcaaggtaaatttatagctaatatatatatacacacaagcgcgctcacctcacgagtttctagctatatcaagtataatttgaatgaatcttcttcttgttttttggttgaatatcaaaatatattacccaataatgagttcttgatatataaacattttgattttttagcacgaagcttacgagaagtagtaaggaatagaacgctattggttgtggagaagagtcaagagagtcggaaaataaggcacgaaggtggaggaagtgatgttgatggattgatggatatggattataattctgcgagcaagaaaagaccgatacacaatcggccatc

SEQ ID NO: 147430 - DNA, 627 bp, Arabidopsis thaliana landsberg
gcgatcaagaagttcacgagtggagatacgatatcggtattggacccgaagctagaacaaaattcagcgaccaacttagcattagagaaggtattggagatggcgtttcaatgtctagctcctcatagacgttcgagaccaagcatgaaaaaatgcagtgagattttgtggggaattcgtaaagattacagagagttgctcaacacaagtctttgatgatattattctccccgcttatataatatggttttgaatacacaattatatattatttgtttgaatattaatctgtcatacacaatgcattcttgtacgagaattgttgatttgtaattgattttgaaatctgtagtattatattaacgtgtatttggtgttaataaattgagttattatcattctatctggacctggctgtttcaatgcctcttctactaagtttactttgaccaagccgtcagtggagttagctcatctactgttactattgattctgaactcaaagaacttgtctgggaaccagtttcggataagaaaaactctcaagtggacttttgtgtttgggttgctcgtctgaaacttgacagtagagaacattgctttagtggcaaggaaagcaagtcatga

SEQ ID NO: 147431 - DNA, 1325 bp, Arabidopsis thaliana landsberg
gatgctcttttgcgatccctcaacgccgtggagttgcggcggagcaggacgttctcggctgtacggacttctaatttctcagttactgcggcggcgacggatgttggtggtcggaattcgacggatgcatcggtaatgacaacggcgatgagcggggtggagagaggtgtgcgagtagggaaatcgagctccgcgcttgagcagctagatattgagcgaggcgtttgcgttccattccgaaagtattctccggagactgtatgattgctgtttttcctagtatcagtcaatttcaagttttgagctctgttgcaatttgttaattcacttatgagctggttcttctttggatttagttgaatcttatgacttagatggaatcgatttgcatgtatattgttgttgattgtttgaattggaaatatactggtgtttggtaatcaggtgaggagtaaagtgctggaatcaagaggagcagtcgtgtctctagtttcaaggggtgtggagattgtttggactcttgggttgtattggtctaccttaacgtatgattttttggttggaagggatgaggaagttgtcccctttcgtgctaggcagcttaggaacctgttgtgcaatttgggaccttcatttatcaaagctggacaagtatgtggatccatcttttttgttagaaaatggcattaacagggttctcaaagtttcttctttaatatctgttctatgggtggcaggttctcgcaaataggcctgatatcatccgtgaagactacatgaacgagctctgcatactccaagatgatgttcctccattcccaaacgaggtaaaatgtcttgtctttttggggaatttgttgagcaatatatttttcttattatcatttacacatcgcctggtgaagctaagtggtgaaggacttttgtaggttgctttcaatatcatcgaggaagagttaggccaacctcttgagaacatatttagcaagatttcttcacaaacaatagcagctgcaagcttaggacaagtttatcgagctactctacgtgccactggagaggatgttgctatcaaggtcttctaaatgaaaattttattgtggctacagagttcatacaggtttatcaaactgaaactgttttaaagctttggttttgacatttatttttatgcatatacaggtgcagagaccacaaatagagcctataatttatcgggatctctttcttttccgaaccctcgcctccttcttaaatggcttcagtctacagaaactgggttgcaacgcagagctaatagttgatgaatttggagaaaagctttt

SEQ ID NO: 147432 - DNA, 1291 bp, Arabidopsis thaliana landsberg
  unsure (1)..(1291): unsure at all n locations
atgggagaaaaacaaaggaagctgcttgtgttgtatgcctctcagaccggaaacgctcttgatgcggcggagcgtattggccgcgaagcagaacgccgtggactgccagcttctgtcgtctccaccgacgaattcgacacggtatgtgtgtagtaaaaccaatttgattttaaaagctcgttactttgttttggaagatggtttgcttcgtttttatatgatgattgctaatatgttttggaagcaaacccctttcaattgcaaaaattgttgattgctgatatgttttcccctcgccaataatcagctgttagcgcaaactctcgacataaaagtgttttcctttttatcatgtgttgttttctgcagagttccttacctcatcatgaggaggctgttgtttttgttgtctccactacagggcaaggagactctcctgattcctttaaggttcgtttaaagtcctgaaatttgttaccaattagtttattcctgtaaaacgcttttaattaatcgtagcttattattgttcattggcatancaatcattcaaggcattttggaggtttgttcttcaaagaaatctgggaaactattggttgcaacaagttcgctatgcagtgtttggactaggtgattctggttaccagaagtacaacgtaagttcttctgcctctttatattcagtttcactttgttttaacattccacatgtttcgttattcccaagtatgtccagttttgttttaatctattcatcaannngagaagaaaaaactaggctttactaaggaggaatgatattagcaaactttgctttctattcaggggtttttcttttttgttgtnnnntcctcattgccagaaatcgtgggatgatttattctctgtggcacaaattcatgacatgatttatattcagtttcgctttgttttaacattccccatgttgggctattcccaagttcctccagattttttttgatgttttaatcaatgtgagaagaaaaaactaggctttactaaggaagaatgatattagcaaacttacccttctcctttctattcagggttttttatttttgtaaaagaatcctcactgccagaaatcgtgagatttgtctgatttactcttctgtggcacaaattcatgacatgattctctttctgatggctttagtttgtagcaaagaagctagacaaaagattatcagatcttggggccacaaccatcattgaaaaaggtctaggagatgatcaacacccatcagggtatgatacggtatattaa

SEQ ID NO: 147433 - DNA, 602 bp, Arabidopsis thaliana landsberg
ctttgattctggaatctaggtttaaagtttagacctttgagatcactatatcacaaaatggaactcaatttctcttcaatggctataacaaaccccaaaatcccttctttcggttttacacccaccggaatattcctaaacccatcaaaatcagtgtgtttggcttctcatcatcgccttccgagagtttcatgctctgtttctactactactgattctcccaagctagtgacttcaacaaaggtaagttttttatttgtgggttttgctgaaatgatgtgttgtttggatgttttcgataagaattggcgataaattgatatgctttaggtgacggcaatggatggagtgagctctagagacttggagatgtcgaatttaacggcgttatcgcctttggatggacgttattggagtaaagttaaggacttggcttcttctttgagcgagtttggattgatctatttccgagtttgtgtcgaggtattgggttatgttctgattcattgattgattaggaagattggttttgtctgagtagttagctaaagtcttcatcttagaacttttgttagatcaaatggcatattaagctttcaaat

SEQ ID NO: 147434 - DNA, 1884 bp, Arabidopsis thaliana landsberg
atgactcctttccgaaggtaaaagtgatcctgctaatgcatctactgccgacatcaatctttcagcagagtagacaaagatgaggagagaaacctcaaccccaagggtcagtgagtattgtgtctcttctatgtctggtgatttgatattccaagatcacctcctgaaggaagaaattccaatttccacacaatcagatccaagttcctcataagtcttagaagatcccatgatcacgttgagaacaatctttcagcaaaagagctaagccctagaagctcctatttcagtgaaaatagtctgtgaacgtagaaatcttgttgtaatgcaagcctgtggagaatgtctagatttagttggtttgataccaatgacaatgagtgagtgattcgtacacctgaaattcagcgtttgttgaaatttttaaatcgcatataacatgatgaatactttgatatctattttctttactattctcatacatatccgcatatagtaaaaatagcacattgttttacaaaaatatgacatgttatacacttttttctacattaagacattaaccatattcatttccgtttgtttagttttgtcttaagataaagaaagaaaaaaaaaacaaaagtcggggcacgtggcagcatcggcgttaaaaagcatgtggcgtagactcgctcacgttttgtccttctccttcttcttccaccaccgcctcacgcatctctctgtttctgtgattctgtttctgtctttgtggttatggcagagacttctacgcttctcttctctaccttctcctctcacctcacgatctctccttttcgccaatctcatccctccgccgctcgattctcatctcttctttcccgcgttcggccatcacgattcgcggttaaagcatcacattacggtaacttctccgatgacgatgctttcaacttcttcccttggtccgatgcaaacaacggtaatcgtctgtgatctgaatttcaatgactggtttagaaaattcgaactaggttgatgatctctctgtgatctgaattatgtaactaaaccggaaccggtttacttgggacatttttgatcactagatgaaatttggactaaaggatcaatggagtttctgattcagtgttctgttttgttggtacagagattgaatgggttcctgaagaaaggattacacttttcacatctgatggattagttcagattggtggcaatatggttcctcgccgcatcaaatcatctaatgtatgtaaaattcatttcatttcattgagaggtgttgtaactcttttatgtaatcatatatatgttttgtgacagaagaaacatgggagatctagatcactagaaaaacatcaaaagtttcatgaaagtgcttacatggatcctgctcaaggtctatgtcttggagctctctttgacatcgcagcgacaaatgtatgcaacgcttacttttttggtttgttaaacttgaacatacagatgataatgtagtgcgttgtgtataaacaatgtcagggactggatatgggaagaagactatgtatctttggattctgtcgttctgtcgagatgcttagtgatgttgttgaagatactgtcttagaacacggtggagaggtttgtgtttaccatgaaaaatctttctttctctgttaacattgttgggttattgaatcagtacttttgtgtgttttaaagattgttgctacggagacagagagcacaagcggtttacaagagaagctaacgatgacagtggcggttccatatctctggggggttcctccggctgcagaaaggcttcaccttgcggttcgaactggcggaggcatcgtagacaaagtttattggcaatggcatttcttgtga

SEQ ID NO: 147435 - DNA, 3068 bp, Arabidopsis thaliana landsberg
atgcccatgttaatggcgacacgtatcgatataatccaaaagcttaatgtatatccaaggtttcaaaaccatgacaagaagaaactaatcactctctccaatttggaccgtcagtgtcctttactcatgtactctgtcttcttctacaagaataccacaactcgtgactttgactccgtcttctccaacctgaagctcgggctggaggagactatgtctgtgtggtatcccgcggcagggagactgggtttggacggaggtggctgcaagctcaacatccggtgtaacgatggtggcgcagtcatggtggaggcggtggcgacaggtgtcaagttgtccgagcttggtgatttgactcagtacaatgagttttatgagaatttagtttacaagccttccttggatggtgatttctctgtgatgcctcttgttgttgctcaggtaaatttattgcaaattctatacgtttcctttctcaagaattttgaataatttacgtgtaaaaatgttaggattttatgttactactagattttaacccgcggtataccgcggagataatttattttttaaagttactatatataatagtttgcaaattatatttatttataaaatatttttgttttatagtttacgattgttattaagtaacgtcctgtcaaacccgtcccgccaatccgtcccgtaaaaaaaactcactgattttatttatgatatgtttatgaatcattgtctaaatattttttaattttgtagtaattaaatgctatcaaatatctctgcggtttgatgattataatcgaattattatagtcatgtagaaaaacaatatcaaaaatgataattttgtagtaattaaatgatattaaatattttggaagttttattttagtaactaatcgtgtagttaatgtggagagattttgggaagattgtcaaatatttaattcaaagattttctttttaattatcaaaaacaattattaaatgtcagtagcagccactgtaaataaatctcaactccaagatttattttacaaagtggctgcaaaaatgtatatatagatatctatatatcaatatttagttatatacgtactttgactagatgtctacaattttcatcaatacgaatggccagttaaagtaaacctatataagcacaaacattcattagcagagttataataaggaattttgagatcaaattcagattagaacgtacattctaagcaaacctttacacacaaatatctacgtccacatgaataaatatataatacttttgctgtaattaaagttttggatgggtttttaatttatgtgtatgctaagctaaagtgattattactaaaatccactaaatttatatatttaaacaaatagatatgaaacgcctgagaaacgggtagtgatttagttaatatttgatgatatatcgacgtataataaatgtaggtgacaagatttgcatgtggaggttactcaattggaatcggtacaagccactctctatttgatggaatctcagcttacgaattcattcacgcgtgggcctccaactctcacattcacaacaaatccaacagcaagattactaataaaaaggaagatgtggtcatcaaaccggttcatgatcgacgaaatctactggttaaccgggatgctgtccgagaaaccaatgctgcagccatttgtcatctgtaccagttgatcaaacaggcgatgatgacctatcaggagcaaaaccgtaacttagagttaccagactctggttttgtgatcaaaacgttcgagcttaatggcgatgcgatagaaagcatgaagaagaaatcactagaagggttcatgtgctcctcctttgagtttcttgctgctcatttgtggaaggtgaattcaagaaatttattttacaaattactgttttcacccaaaaatttaggtgtgcgttttaaaattttcaaaacatttttgatgatttaaaaaaaaaactatattaagaattttttaaaatagccattataagaaagttagaaacataaatattaagcgtataattttgcaggcaagaacaagggctttagggttgaggagagacgccatggtgtgtttacaattcgcagtggacataaggaaaagaacggagacaccgctgccagaagggttttccggcaacgcatacgtgcttgcctcggtggcatccaccgccagagaattacttgaagagctaacactcgagtcaatagtcaacaagatcagagaagccaagaaatcaattgaccaaggttacataaactcttacatggaagcactcggaggtagtaatgacggaaatctccctcctctcaaagagctaaccctaatctccgactggacaaaaatgccatttcacaatgttggctttggcaacggcggcgagccagcggattacatggccccactgtgtccaccggtgccacaagttgcttatttcatgaagaaccctaaagatgccaaaggtgttcttgtgaggattggcttggacccacgagatgttaatggcttttcaaatcatttccttgattgctaatatattagctggtgataattaattaattagtagaatctttgtggtagtatacagtatgataatggctcctctatatgcatgcgtgtgcgctaaagacactttattgtaattgggttatgatgatgtataatttaatgacatctctctgctttgtatttgttgtcgttatcacttttatactcatttcgtgataggctttattttcttccagaatttctggataaataattataaagttatgtttctttgtagacttttttcttaaggtcgccaatgttgggtggttgacacctaagccaggttattgggcatatggggccgatttaggctggtagtacaaatcattgtactactttgattctaacgttattttgcacttagacacgaagactttgacttcctcttcaaaacacctttacatttgtagcaaagagggtactttttgaattttatttatggatttggatcttcctaagttgctcaaaccagtggggga

SEQ ID NO: 147436 - DNA, 460 bp, Arabidopsis thaliana landsberg
ttatcataggaagaaacgggggaagcagcaaaggggcaatgattgtggaagagtgggataagtatctagcaatgttctggcaacttgtacctccgagtgaagaagacacacctgaggctaactcagaccacatcctgaaaacaaccacaggagatgaagaacaggtttcaagcacattagcagagaagtaaaacctacacatttgatcgtggtttcctctttgtacagtcaaagtcgtggtggaggagataagtaagtctctcagttgctgagaacataacaatttacaagttcaccacttgattttgatgtggttttaattcgttctggactcgcttatcttttggtttacttcgtcccagtcacgttagtaataaaacgaaatccagcatgcttgtactttgtatggaaacatcattagtcttccgattcccgattattaagaaagggttttcgattt

SEQ ID NO: 147437 - DNA, 2193 bp, Arabidopsis thaliana landsberg
tcgagtggttgaagctgctccatctaaggtcattgtcctcccggcttcaggtactgaattgcatgttcagttaagagaacaggatgtatcatggatggattttctttccaacgccaaaccccattctaggtaaattgtttacatctctacacttgcaatcactcagagagtgtagataagacatgctccaattttgcttgcagtggagagaactactatcgtccgatttatctacctgtagagtctgtgattaacattctcttctcatctggaactacaggtaaaaataatgtgatcatcaaattgtaatagattttgtttagatgcatctaatgattagttcttttttcttaaccaggtgagccgaaagctataccgtggacacaactatcaccaattcgtagtgcttgtgatggatgggctcatcttgatgtccaagtgggtcacacatattgttggcctacaaatcttggatgggtaatgggaccaactcttatgttctcctgctttctaactggtgcaactctcgctctctacagcgggtctccccttggccgcggttttggaaagtttgttcaggcaagacatctccattgttgtctccttttcaattttagtaaggttcgataaatcctcacttatttgtgcttgatattacttcaggatgctggagttacagttcttggtactgttccaagcttggtgaaaacttggaagagaacaaactgtatggaagggcttaattggacaaagattaagtaaggagcaacaaaccttgttttgttttcgggtttatacgagaaattttaacttagaagctgttgtgttttgttaggtttttcgccactacaggagaagcttccaatgttgacgatgttctctggctttcttctaaagctgattacaaacctgtgatcgaatgctgtggaggcacggaacttgcttcgtcatacatcataggaagccctcttcaaccgcaggcttttggagcgtttagcacaccatccatgacaactagaatcatcatcttcgatgaaaatggcgtcccatatgtgacaaactgaaactttagacatttggagtattttcttagaatatccagagattgatgtagactggtttttgcagccggatgatcaaccatgtactggagaagtcggtttgttcccccagcaccttggggccacggatagacttctgaatgcaaatcacgacgaggtttacttcaagggaatgcccatgtataaggaaacagtgagtagttttagaacttctatatttacatctaaacaaaattgcaaacttacgtcagttaaacgattcctctgttctgttgcgttctgcagcgacttagaagacacggtgacattgtgaagcgaactgttggaggatattacaatgttcaaggtagagctgatgataccatgaaccttggaggcattaaggtactacatacattgtatgtctatatacccaacttcgattagagttggaacttttctcaagttttcatcttttgtttatctgttataacgcagacgagttctattgagatcgaacgtgtgtgtgatcaagctgatgagtgcatctctgagacagctgcagtcaccttaacaccacctaacggtggtccagagttgctggtcatattcgcagtcttgaaagaagggttcaagcaacagagtggagaagagctaaagatgaaattttcaagaaccattcaaaaagatcttaatcctctcttcaaggtaatcaatatctttgatgagtttttctataaattcaaagttattataagattttttgtgtgcttaaaaatggattttgcaaaaatattgcaggtgagttttgtgaagattgtgccggagtttccaagaacagcttctagcaagctactgagaagagtcttgagagatcagattaagcaagaactactatccttacgaagtcgaatataaagccttgatcttaagtttaactagaataaaataagatctgctgagtagtagttgatctacacatgattgggtactgctcggtccaaataagaaaaccgattaaatcaaatctaccggtccttgaattctctagcctgattcacatttacatgactaaacactttgactttgttatgtttgggtttgtgtttggtgtatatatttcatatcagattataatcttaattttcctcaa

SEQ ID NO: 147438 - DNA, 1581 bp, Arabidopsis thaliana landsberg
agaagagtggtacgtgccatgttatgacttcatatgttcaacctctgttactattttttggagctctattcatctgcaggtatatctatcaagtagttcctcgggactttctgagatttaattgttgagatattttggtggtatcctcatctgaagtgcttggttgagataattgattgctggtgactattccttatatagggcattagatcctgttgtccttcctacagaagctagcaaaattgtgaaggatcgactgttgaattttgtgaggtcattgtcaacggtacttgcatttgcttactgcttatccaggtaagcgtattgtctaatttaaatacaagacttcgtcttcatcttatgtttctgtattttagtggcttctatcacgtgaaattgctatgtggccatctcatgacttctgattctttgatgttcccatgcagtcttatccaacaaacacaaaagctattctcagaaacgagtaatccgagcgatacaagaaatgtatgtaaagtgacactcataaaaagtgctttaataattttgtagagttattattcttaggatgtttggtctattttgcatatctgtctacgcaagatcagaaatctctatcaaaaatataattggcttctcaatatgttttgctaatttgcccctggaatggtacagatgggatttcaatttgctgggaaagcattgtattctgctgtatgggttgctgctgtatcacttttcatggagttgctgggtttctctacacaaaaatggctcactgctggaggtcttgggacagttttgattactcttgctggccgagaggtgaaaaacctaattctcattttaattactggtttcttcggaatatccactgttcgctttagacgttccttttcctgttttatgctaaagatatttcataaaaactgagtttttttttgttttttggttccagattttgacaaactttctttcaagtgttatgattcatgcaacccggccatttgttttgaatgagtggattcaaacaaagatagaaggttatgaagtgtctggtactgtggaggttagaatctctgagcttagatgatgtgaattttttcctagcttcggtgcacgtcattgccatacctgaacgtttccttaaaattagctagctatcgttctgaattgcttgttgcaatgcatttacagcatgtaggttggtggtcaccaacaatcataagaggtgaagaccgcgaggcaattcacatcccaaaccataagttcacagttaacgtcgtgagaaaccttactcagaaaactcattggcgtattaaaactcacctagcaatcagtcacttggatgtcaacaaaataaatgtgagttttctaattcccatatggtcgttaactctttatacaagttaaggtccaatcatggagtttttttagctgatccttgtttggaacttcctcaaacagaatattgtagctgacatgcggaaagttttggccaagaatcctatggttgagcagcagaggttacatagaagggtattcttggagaatgtcattccagaaaatcaggccctctcg

SEQ ID NO: 147439 - DNA, 588 bp, Arabidopsis thaliana landsberg
ggtatcaacgggaagaacaacactatttttatggagggccctcctttattgaattatctcgccgcagaaagagacggggaaaatccattgaagaatcctcggattccaggaaaacaacaatctgttatgtcctttactaagaaactgactcctggaatcaatgtccctggtggagatggcttcccgagcaaagtgttcttcaacggtgaggagtgctctctcccaaccatactcccaatgagaagtagccaacaccggaaacacatctgtgttttcctcctggcattacctgttttggctctcttgattctgcgggcgtaactacactgaagcctcccgttgggttggcgatacagtttcttgattcttccccggcttactcgagaacgggtccaatccgcagtttatggatggagaatcactcgattctttttcaacctgatgagtgttggaacaagctttatataggtgctatgaagatatgttaccattcttgtattgtttatgattagagaatgtcagtaatcactaatcagtatgtattactatattttgtttactcattctccgccattagtttgttcctaa

SEQ ID NO: 147440 - DNA, 808 bp, Arabidopsis thaliana landsberg
ataaatggtcatattgacatagctgtgcactcaatgaaagatgtcccaacttacttaccagaaaaaacgattttaccttgtaaccttccgcgtgaggatgttcgagatgcgtttatttgtctaactgcagccacgttagctgagcttccagctggaagcgttgtgggaacagcttctctcaggagaaaatcgcagattctccacaaatatcctgcattacatgtaagttttcacaacatagatcacaacatagaaactgccatttcttatggatcagttttgtctttctatttattgatacatgtctttattgccttttgcaggttgaggaaaacttcaggggtaatgtgcagacaagactatcaaaactacaaggaggaaaggtccaagcaactctattagcactagctggtcttaagagattgagtatgacagagaatgtcgcatctatcttatctctcgatgaaatgcttccagctgttgctcaaggagctattggaattgcctgtagaactgatgatgataaaatggtatgtcaagctctcttggaatttacattatttgatgatgtttctatttatgggatctttggattggcatctatgatttgtagtaaatgatcggactggtgttttacatctgtaggcaacttacttagcctcactgaaccgcgaggaaacaagactagcgatttcatgcgagagagcttttcttgaaacgctagatggctcatgccgtactcatattgctggataaaaatccaaggacgaagaaggcaactgcattttcagaggatgggttgcttccc

SEQ ID NO: 147441 - DNA, 1883 bp, Arabidopsis thaliana landsberg
gaggaggcgttggcaatcaaagcagcaggcaagtcgtggtacaagactatgatctccgacagtgattacaccgagtttgataacttcaccaaatggctcggtgctagccagtaataatctcgtctgctttggaacactttccatattttagtcaaaagattttggtttttttaatctgttttgtctttgggtgtctggatatcaagttgaattatgaacaagtttcacttttttacatctccatttcttacttcgcctttatcagtttcatttatttatctcttgctccttcgtttcctatgatgatgcttgttatgttatgaacctacttaaaaacaagctgaagctttctttggtttaccccagcagaaacattaatcaagttcaattgatcaatatgtcgattgatttactgtttaaaggcatagtgtgtctatcaacccttaagtctttttggtggatagtgaagctcaaacccaattcaaatgtcgatcaaccctaacgtttttgtgctcgatagtaaagcatgagtataaaaagaacgtcgcttcttcctacaatcacacagatcatttgaagctttgattagttggtacaacatactcgaggaatacagaatgacacgtggtgtgtatctgttggataaatttgtattattcttctttactatggatggtttctggaaggcgcgccaagagtccttctttttccatctacaaatcatgaccgtccatctccaaaagaagactgaaacagtgaaactagaagcttcattttgatcatcagccagttttataaattgatccgtatactaaagtaacaactactagcactttcttctgtgatcgatcattgtgtttaaactaaaggtttgtatgttcttgtaatcttattgatctcgataggttctccattctctttaggttttaaagccttcaacgatttccagaaggaagcgaatttgaaaaaaatggtgaagaagagttacccggaagtgaaagaagagtacaagaaagctgttcagagatgcaagaggaagctccgtggtcttattgccgagaagcactgtgctcccatcgtcctccgtcttgcgtaagatcctctctctggttccagtcttttctgttactgtgagtactgagttgttcgattgatggcttctcagagcatattttgttggcggaaatttgcagatggcactcggctgggacatttgatgtgaagacgaagacaggaggaccgtttgggacgataaggcatccccaagagctagcccatgatgccaacaatggtcttgatattgccgttaggcttcttgaccctatcaaggagctgttccctattctgtcatatgctgacttctaccaggtaaattttcaacaatgtactgagttttttgacctctaattgtgaagcaagggatgcatcaagctgtagtaattaggaacttgaggtagaaccatagaatcaagggttttttgatgcatcagtgattataccgagaggggaaacatttggaagggattttgttggttggtacagctaagttatgacttaaaatgggttcttctctagcttgagccgtcggctattggccctctggtttgtctgcagtgaactagattcacacatgttagattgatactgaatctaaaagcttactttgtatttcgcatggctttaagggcttgattcatctgtgtttcttggttactgtagctagctggagttgttgctgttgagatcactggaggaccagagattccatttcatcctggtagactggtgagtcaatattcaacttctcagttttctggctaccaattattagctatctcttcgttttaaaacgcaactcactgatgatgagacaccactggtag

SEQ ID NO: 147442 - DNA, 1634 bp, Arabidopsis thaliana landsberg
gaatttgaccaaccacctgttttgttgatcctttaggttttaaatatcacattagatggccgaaagcggaggtgatagtggttcagtggccacacctgttcaacagcgagcacatgaggcatggaggatttaccaacactatcttgacaagactacacctcatgcaaattacagatggattggaactcttgtcgtcgctcttatctactgtttgagggtttactatattcagggtttctacatcatcgcctatggtcttggaatctaccttctcaatctgcttatcgggttcttgtcccctcttgttgatcctgaagctggtggggtctctgatgggccttctctgcctactagaggttctgatgagttcaagcctttcattcgccgtctccccgagttcaaattctggtaatgccatgtcgaattctctcatgagcctttatacatttttgttgatttttccaagtttaccagttgcaatgtcaaattcctttcatgatctgtcgtgagttttaaattccttcatgatcttttttttactgcattgctaccttccatggggtcatgattgatgatgattgtagattctgggaatgttctgaatatctctgaatgcatgtctccatagtccattctttgttcattttagtatttttgatgtttgaggctttcacaactgatcctggtagatggagaatcacagatatgtgagcagtaagctttatcttctcattacatattgcattctatacagttacaacatcagaatccctgtggtggtatactataaaaacgtaagataccattgtctttcggctaatgaaggatagctacttacatgtattgttgtctcaggtactccatgacaaaggctttctgcatagctttcctcatgacattcttctcggtgtttgacgttcctgtgttttggccaattctgctgtgctattggatcgttctctttgttctcaccatgagacgccagatcgcccacatgatcaagtacaaatacatccctttcagcttcggcaaacaggtaaaacttctaactgattgcggttttgacttgcaagttaattcatccatttgtctactcatgcatgttacattttgcaactgaatttttgatagctacaccaacttatccacattcatatcggtcgatacaagatacttgatgaatagtgttatagattttgagattaattaggctacttccaaaaagtctttgttttcttggtaataattgttggtttgtgtggcagaaatatggtggacggagcagcagcggctcacgtgcggattgatctgaccaatttgctgaccattagctactttttttgtctttgcaaaagagaaagaaaaaattgttaagaatatcattttggaccatttttacattgacaaaactatgcagagctataaggaagaattataggcaggataaaaaaggatggaaactaaacttgatttagctcggaagaaaattgttccctttagttgtttatccatgatttgcaatatgatctataatctgttgctttactaattagacccgaaagcagactactacttcgactataccggctgccgcttctaaacccgtgaatactggaccgtgtagtaaacgatga

SEQ ID NO: 147443 - DNA, 1442 bp, Arabidopsis thaliana landsberg
ctcgatttttgttggagtccttgattcgagcaagtttaaagactcgagggttttcttctggattacgtatttagatactcgtgtaagtgcaatttctctctttttcttctgttttatgggtgttggtgatttagggttttgcaaaatcgttttgtttgctgggtgattaagcttgggtgatttagaaagacgaattagatcaaggaacttatttcttgttatgagtcaatttgggttttaaagattcaatttttgatcagaatataatctaattgttgtgtgttgttactcgtaatgcaggttttctgaaagggtcatcactgctattgtcatagcttgagaaaggatctatttttaatatcagtgatattggtatctatgagatttggagtagttgtttggaggaacgtgtcctcttgcttgatgtgaagattgcttcttgttgtttgctgtttcttaatggagtggaggggaatcctctgctcgttgctttttattgtttccgtgggagagtcgtcaagtagatttgggataatgtggcatcctaatcttggtgttgattctggacaatacttgacttggccaatcttaagtgctagtgtattcgtggttattgccatcctcctccccatgtatcttatctttgagcacttagcttcttataatcaaccagaggtttgttattacttctttaacacccactttgtcgtattctcttactcataataaatgatactgattcatctttatgactcttcactgacattgctattatcgaattgatccattaaattgataatatcaccatcatcagtaactaagcataacgctttctcttgtaaattacaggaacagaagtttcttattggacttattctgatggttcctgtttatgccgtggaatcggtaggtttaataagttactatatactttaatcctgtatttgtagtgaaatttccattaagatttgtgttcagatatttttctaattcggggtttcttataatttccgagcagtttttgtctttggtgaattcagaagcagctttcaactgcgaggtgattagagattgttatgaagcttttgcactctattgtttcgagagatatttgatagcttgcctaggtaatgcttatataaccgtcaaagtctgtatccatagcttctgagtcactgactatgatcttttgggcttcaaataagcaagtggttgattattgaagccatactttattcagttaaaaatatatatatttggaatctgttgacttttgattatttctcagttataatttacaagtctatttcttctctatatccgcagatggagaagaacgtacaattgaattcatggaacaacagacagttatcacccagagtactcctcttatagaaggcacatgttcttatggggttgtagagcatccctttccaatgaac

SEQ ID NO: 147444 - DNA, 4447 bp, Arabidopsis thaliana landsberg
tggtgaagaccatgatgttcctaagattgatccttcttgtatatactttgaagtgagtaaactctctgagttgagaccggtggctgtagaaaaggatgggattactggttcgttgatgagtccaaggaagacaacagagtctgcttgtgttattattcccccaaagatttttcgggttcttgataaaccgcttcacgagtttctcggtcacagtggtgatatccttgatatctcttggtccaagaacaatgtgagtcgtctttcttgaccttcccttcatttttacactgatgctttgaaccgaactctaggtcttaaaattgattttataaccataaggagctgcttttagaactacctagacaccttttttatgcatgtttcgttatgttttgagatctgtaacacacaagaacgtagattcagcccctgtatgtgtaatcttgaacagaaaactagaccgagttgctcattctgtgatattggtggcagcgtctgttgtcagcttcagtagacaatagtgttcggctttggcagatcggctgtgaggactgtcttggaatcttctctcacaataactacggtaatgttcttctccgtctatacaatgtcattgttttcctttcctcccttgttgttagtcgatcattcaatctgaacgccattgtattgtttttttttttgcatttttgcagttacatccgttcagtttaacccggttgatgatgatcacttcatcagtggttccatagatggaaaagttcgtatctggtcagcttcacagtgccaagttgtagattgggccgatgctagaggcattgtaaccgcagtttgttatcaacctgatgggcaggtgtgacttggaaccaaaaatccttttcctttatcgacttgactcgactcagattttttcctaaaagaatacattttccattgcaggcagtgattatcggaactttgacaagcgattgtcgcttctacaatgtatcaggtaaagctcataaataacacacacagacgcatgggcttgtcttagaaactccagagtttgagttaattagcctaagaaacctgatttcttacatagttatctctctttctggttcaggccactgccttcaacttgatggtcatatatgtctgcacaacaaaaagaagtcgtcgaataaacgaataatcggctttcaggtgcatatttcttcttaaatttgtctcccaagattgaacattttataatgatgcttagctagtttcttctgcagtttgattctactgacccaagcagtgtcatggtggcatcagcagattcacaagtgaggatcattagtggtcgcaacgttgtccacaaatacaaaggtaatgcttctaaagacatactactacatacactattcgaacaaaaatttgcaaattctgaaatgtgttaatcttctaggatctcgaaatgctggaaaccagatatcggcatcttttacagcagacgggaagcatatagtctctgcgtgtgacgattcatcggtctacgtctggaactgcgttggacacgaccctgaacagtcgtctcctggttttttctctcacaccaaacgacttaaaatccgatcattcgaaaaattctctgcggatgtttcagtagctatcccgtggtgcggatttacgcctgtactctccggcggatccgagctatcgccatcgctcttctcattagggcgcgagtacgttctcgattctcccaagggatctgccacttggccggaagagaagctagcgagctcgttttctccggtgaaagcgatccgtagatcgcattacaaattcctccggtcttcgtgccggagaacgtcggagtcatctcatctctggggattggttatagtcaccggtggttgggatggacggatcaaattgtttcacaactatggtttgcctgttcccgtttgaaatccaacgaggctacgaaacgctccttctcaaacgtcgacgtataaactcttctgtttcgaaagtggtgaagttagaagccatagtttttggagtttatacgggcctaagtttgggcctaacacggtggcccggtgggtcgtagctgagtgtcaccattatcggagctagcctgagctgaaggttcggaattgcttcatgggtagggaaaacgaaaagaagaaggggtgactcagatttttgccttttttaatcgtaaaaattattagtattatacttgtcagttctttttttttccttctttttgtaagtaataatatatagggaaatgtaactgaggcctgtgttttttcgtgtatataccatggttttctctccaatactatatttttggtacataatactggtgttacaaaaccttaaatcattgtgtaaatagtcatagtatgtggcgttatcaatttttttttaatataatattttttagaacagagtatttaggttatgcttatgcacacgactcgttctttaagatatctctctattatgatttttgtttccagtgtgagcaagaaacttgcatagttcttttcttccattcaaagatattcctatcgagatataagaaggaaaccaagtattattggcttatagactcgtagtgtagatatcaccgcggattatattacactttaactaataattaaaaaccattagaaattaaaaaattagaaccgaaaagaaatctgtaaatctcttgaccaacaaaagttttttgtaaatttatctttgctactgatgtgactctggtgatctcccaaagacaaagcaaagcatattttggaataccatttaccagcattctccattttgatgttttgattcttactacacttaacaatgaattatgtgctaccatttttctctctttctatgtttactatagtcggagttctcttaatcctttcaacaggtatttttcgtttaccatttttaatcttgttacttcactttttttttactttttcataatcattctgaaatagtgaaaatccactatcttgtagtatatatacgttagcatttgaatcaacgggttattttgttcattatcaggaagtgaagcgagtattggtgtaaactacggcacactagctaacaacctccctccaccgcaacaagtagcggagttcctcctccattccaccgtcattaaccgtatccgcctcttcgacaccgatcctcaaatcctccaagccttcgctaacaccggtatcgccgtcacagtaaccgtccccaacgaccaaatcccacacttaaccaacctctcctccgccaaacaatggatctccgatcatatccaacctcacttcccatcaacaaacatcatccgtatcctcgtcggaaacgaagtcatctccaccgccgatcacctcctcatcagaaccttaatcccggctatgcaatctctccacaccgcattagtctccgcctctctccaccgtcgaatccaaatctcaacaccacattctttaggaatcctcagtaattcaaccccaccgtcttccgctaaattccggcgaggctacgacactcaagtcctgaagcctctccttagcttcctccgctctacttcttcgccgttcgtcgtgaatccttatcccttcttcggttattcaatcgaaactctcgatttcgctctctttagacctaatccaggcttatttgatcaacacacgaagcttctctacacaaacatgctcgatgctcagcttgattcggtttattccgccatggataaattagggttttcagatgttgagatcgtgattggtgaaattggatggccatcggagggagatatagatcagaacggagttgatgttgatacagcggctgagtttaacaagaatctgattgcgcgtgtagattccggtaccggaactccattgatgccaaatcggacttttgaaacttacattttcgcgctcttcaatgaaaatctcaaatcgggaccaacgtcggagcgtaaattcggcatcttccgatcaaatctgacaccgatttacgacatcggaatcctccggccaacggtaataaatcgccgccgcaattcacaacattatttagtttcatatatgttaacgaatttggtttcttgaattgacagtttagaatatcggatccggttttcaatcctcgatcaccggttagaggatcgtcgtcgaagcgatggtgcgtgacaaaggccggtgctgagacggtggctttacaaaggaacattgattacgtatgtgggttgggtttggattgtaggcccattaatgaaggtgggctttgtttcttgccgaacacagtgagagcccattcggagtacgcaatgaacttgtattaccaaactatggagaaacacgagttcgattgcgatttcgacaacactggagagataactacgattgatcccagtatgaatcattaattaaattataatttagggaaattaact

SEQ ID NO: 147445 - DNA, 1326 bp, Arabidopsis thaliana landsberg
  unsure (1)..(1326): unsure at all n locations
tctaggatccctcaattttggttactttctacattctcaggttagatatccagaccgtataactctcattagagggaaccacgagagccggcagattacgcaggtgagtggagtcttttttagaaaactttggtgcgtgtttataatttcagactacttaagagtctggttttagtaggtatatggattttatgatgagtgtctgcgtaaatatggctctgtaaatgtttggagatactgcacagatatctttgactacttgaggtatacaccctttttctgcttttgttttggagttccgagtagatattatttcggttaatgtaatggaaacttcctatcttttatttgtctaagtctttcagctcttgtcgagaacaagatattttgtgttcatggaggtctctctccagctattatgactctagaccaggttgagacagtgataatacaatcataaggtttctagctataaggatataactgactaatcacttcatacatatcttgtggcagatcagggctattgatcgaaagcaagaagtaccacatgatggtgctatgtgtgatcttttatggtctgatccagaagatattgtcgatggttggggattgagtccccgtggtgccggattccttttcggcggcagtgttgttacgtcttttaaccactcaaacaacattgattacatatgtcgagctcatcagctagtgatggaaggttacaaatggatgttcaatagccagatagtcactgtttggtctgccccaaattactgttataggtaattaattagatagatactcacaaccttacacatgatcttgattcctttgccttgagcgttcatgttacttgtgtttgaatgtggtccagatgcggtaatgtagctgcaattctagagctcgatgagaatctaaacaaagagtttcgtgtcttcgatgcagccccacaagtaagatcctgacctatctaacttcatgtccaaattctggtttgatttgtgagacataacatgactatggatgcaggaatcgagaggagctctagccaagaaacctgcacctgattatttcctgtgagacgcaagtgaatacagaaactggttccttcttctcattgcagagcaagaaagctacccaaaatcatcggtgtatacgttgtaaaaatgcaaaagaatctacaatccatgtgttgccaaagagatctctactcaagggtccgtttgagtagaatctttgtgtcttaaaaaaagcttctttttttttttttccttctcttttgtttgnaatgctacttttacaaaaaggaaaagaaaattggga

SEQ ID NO: 147446 - DNA, 485 bp, Arabidopsis thaliana landsberg
ctctctctctctcaacttcttccacagcaaatttcttcgattctgtgagctctctcccatccttttcaagtggcttcgtttctaaaagtaagtttttttaatctatgggttctcttcaagtggttgttccttttcgaatctctgtaccctggatgaaatcgagtacagctttaattactctgtttttctttgggattgctctgtttcccttctcttagaggtgtataattactctcaaatgtgttgtttttttcattcataaattcattaatattgctgcagaattgattggttgaagaaagtggaaacatggttgaatcggacaagtcatccgttgaagagctgaagaagagggttaggaagagaagccgtgggaagaagaatgagcagcaaaaggctgaagaaaaaacccacactgtagaggaaaacgctgaccaaacgcccaagaagagtgaaaagaaggttaaaaaagtgaaaggcaaaat

SEQ ID NO: 147447 - DNA, 1683 bp, Arabidopsis thaliana landsberg
cgatttgagaaaaataatactatcacgaagatggcgaaagcaagctttattctactcggaactctcttcctcttcggagccatagcttcaattcaggtaacttcattcatatcctctcgaatcgatatctgttcaaatgtttcgttaccacaaacgatacattagatctacatcaacattctaatggaagtcaccagattgcttaagcttctagtgttatacttcaggaattaagaactatgtgattatgatgagacagttcaaatctctgtttgtttaattcaggcaaaagaagatctcaaggaaattactcacaaggtttacttcgatgtagagatcgacggcaaatccgctggtatgattcgatgattttagtcaaaatgtttgttcattaagcttacagatttgttaaaatggattgttgctcagatacagctgatgattcttggtttgttttgatgtttgattgattctctggttatgattatgtcgcaggtcgcgttgttataggactatttggcaaggcagttcctaaaactgcaggtacaattatatggtttttgaagtttttgatcatggttctggactattttagtgtgtgctttatatctaagagagtaattcgtgagtgtgtttgcttctttgcagaaaacttcagagctttgtgcacaggtaatctactaactatattcttatagtttcactatataaactttacattatgcacaatctcgaaacaatattacaagccggacaatgagagtgctagtatttgttttcattaacatttgtttcgagatctaatgaaattattacggagttataatggagataagatgcattttatttaatcttttcggaaccggtttgtgttacaatgtttaaatttggcaggggagaaaggtgtagggaagagtgggaaacctctacactacaagggaagcaagttccatcgaatcattcccagctttatgatccagggaggtgacttcacgcatgggaacggtatgggtggagaatcaatctatggtcagaagtttgctgatgagaacttcaagctgaagcacactggaccaggttggtgatcattattttccttgaagcaaagttttggcaagtatttagaaatgtctgatggttgacaatgtgattggatacaggtgtactttcaatggcgaactcgggagaagacacaaatggttcgcagttttttatcacaacggtgacaacaagctggttagatggaaggcatgtggtgtttgggaaagtggtgcaaggaatggatgtagtttataagattgaagctgagggcaaacaaagcggaactcctaagagcaaagtcgtaattgcagacagtggagaacttcctctctaagaatagcattttaaagttactcttacgagttagttgtaatctaaacacgtcccaaatgctacaagaacagaatggtgtcactggactctgaaatttcgttttcttgcgtaacagacttttccatgaaaatagtactcggcctttcctgtttttagatacgccatggaaactctatggagtagctgctgtatcagcacgaatatcttcatcccatgctgctttgctctgtagatgaagaagctaatcttattactagtaaacgggataaccagtaaattggccaaaaatatcagatataaccagtcaaa

SEQ ID NO: 147448 - DNA, 590 bp, Arabidopsis thaliana landsberg
  unsure (1)..(590): unsure at all n locations
aggctgcaaagattgttaaacaagtattcactgttnnnnctgtctatgacattattgttcctgctcttctaagtggcggtgtgtggaatcttccaaaaacttgtaactttacattgggtgttccaattggacccatgcttgcaaaaccaaccaaaggtgtagctgagatactgaataaattccaggacatcgttttcacatgtgaatacaaatatgatggggaacgtgcacaggtgatatttggtgtctactgaattaggatgaatgctattcttagatatgagttatttaaatatggtatggcttatcatcaatcaatttctgcagatacattttatggaggatggtacatttgagatatacagtcgaaatgctgaaagaaacactgggaagtacccggatgttgctcttgcgttatcaaggtaaacatctggtgtaactggttgaaaacattagagattcaatctttctactgaagttagtgaaacatctcaatgcagattaaagaagccttctgtgaaatcttttattctggattgtgaagttgttgctttcgacagggagaaaaagaaaattcttccgttccaggt

SEQ ID NO: 147449 - DNA, 774 bp, Arabidopsis thaliana landsberg
gccgggtcaaatcaatctactgttctctctcctatctggtaaacttttcctcttcgccatgaaacttttttcttgctagggttttagtttctacagttctcttcccaaaaattaggggttttgtcacaatttctcaatttcttgttccatttttcttcttttctccataatcattgcttaatttagaatccccaattttacaaattagggtttttgtttaattttaggggtttttgattttcaactgttaatagtgttctcgatgtcataattctgattttttttattatctattccgaaattagggcaaaaatctcagacaaacctgcaaaattagggtatttgaggatatggattatgatcggtacaagttatttgttggtggtattgcgaaagagacaagtgaagaagctctgaagcagtattttagcagatatggagctgtgttggaagctgttgtagctaaagagaaagtcactggaaaacctataggttttgggtttgttcgctttgctaatgattgtgatgttgttaaagctcttatagacactcacttcattctcggtaaacccgtaagtgttaccgcctttttatgcttgtgtcaattgggttttgtcgtatactctgtggattgattatgtgtgtgtttgtattaggttgatgtgagaaaggcgattaggaaacatgaaatataccaacagtcgtttagcatgcagtttttggagagaaaaatgccacagatgaatggtggcttgcgtgagatgtctaatcatg

SEQ ID NO: 147450 - DNA, 3225 bp, Arabidopsis thaliana landsberg
  unsure (1)..(3225): unsure at all n locations
tgaaatctggattcgtctcctccattaaacatctttcgtctgataacaccgatccatctctttctttctctctccgtcgactctcgttcttaaagatgaaagctttctacgtattcgttgttgctcttcttctcaccttgaattatagggttcgtttttgttccttcgtgtcttgctctcgtttacggaattgcttgtatgtaatgacatggatctgacttttgtttgtgtatagggagaagcaagtggttctgttttcttcattgatggatccaacaatcaatatcttcgtccacgatcatccagtgaggtaatgattttcgtcccaaatgtgtggatgaccgatttgaaataatctcaaatttgatcattttatatttcaatctaagatcgtttctggaaattatacgagtttggtccattgaagtagtaaaataagatctattgtttggtctaagtggcaccaatttgtagttttcttgtctgtttttttttgttattttgatattgatgagagatcaatggacagattgcaaatttatgtttgacaagtactaaagtttgtgatttaatagttctttttgatgaattttagttaaatctcttttctttgaattgaaatgcacaggcacttcccatgtcgcctgttgaaatatctgcagcagtgtctgccttgttgggttttgcaccttcagcaactttgacagctgatggctcatccaaggttattttagtattatagtagagttgtttttctctctctgggttaaagtcctgtacttcatcgtttatttgttttgcattttgttatagttgaacaagattctaaaacctaatccatttgagaggcctcgcgctgcttttgtgctagaaatcgctggagctgatggtatgtgattggaaagctttagttttctgacatgaaccaaaaattttagttgtaaaatattcaagtgtttggttttttacttgcagatatgcttttggaaacctcccctagtcattctttcttgggcaatgccataaggagcagtattaagtctgattcgtacaaagctgatactgaacttccaggtgccctatcagcttgaataccagaaccatctgagcatgactagtttctaacttttttttctttatgggtttaagtcttactttggatattctgctaatcttttcaaaattctgcagacaatgaagtggttgttgtgtctgtcaatgaaccctcctctgatgtgactgacaaggacattaatgattttgttagttaacagcacctgtcattctaagtgcaaacactatttttttttcctttttaatattatgtgaccacaagttaatggtgtggttataatatacttaggcatcttggttgggtggannnnnnnnnnnnnnnnnnnnaccatcgtctggattgttgagtatccctctggctgggggtgctaatgtggagttcaatttggaaaaggtaatattcttaattccatgaaaaattgtatgattttatgtgggagaggttgctgtattacctgtagatattgtgattttcatatgaagaaggcacatgacttttgtttctctgggcaggaagcagagaggaaatttgcattgaaccttttgggtctatatcagaatatcagacaggcagtcagcgtttatgacgatttatctcatggtattgacagaactgccgaattaacggttggacgctttggtggtatcgatgtaagggcatttttgttattctgtttttttccctttcctcagtttctcagtcttggtatataaattagagggtggagttcattgcatacgcaaatgtgtcacctttagtctcttcaaaacttatgacatttctgttgatcgtaataatggctgttggttgtgcactcttttcgggatactcctgcttagctatttaaggaatagcagaggattcgaaagtgaattatgataagatctcagggaactggaaatgttttgagctggttgtagtcgtctaagctatctttacacttattgtatccaaggattgcaaggctgataaggaccttgtaatgagtttatatcttgagtttatttttcattgaaaatgtctaattgttcaaccatcatgttattgtacttagcttatatttgtttgcaaaggttgtcaatgtctctaatataatttattctttctggaaattataggctttagcacaggagtatggacaaggtatggctaagcaagggatggatgtattactttccacattatcaaagctattcaatctgttggagacatctcataaaggtgaattgtctctctgatttaataaactcgttttcaaagatatgtgttagaaagtagttcaagatggggaactcattctctggaacatttgtcttttttcttaactgaatttatgtaagctgagagatgtattggctcttgtaggccaaattgttggggttatcgtccttgatgagagagtaaaccaagaatcagaaaatcttttgaactttgggtcttcccgttcatctgcacgctcaatggtggaagtggagggaattccaagtgcagccattatcgctgaggttatacttgttaggctgactcttgcatggttgactggaatcattcttctcattgcaactatccttggggtaagatctcattactactagtctactaccaagcagattctttggccaatgtaaagttgaatgtttccacctaaagtggcctattgaagaactcaatcgtagtttgaaaactgaatgtattaagtcactcgaagttgacgtacttgtcatgttggttgcaggtatacttccttatgaacatgcctttgacgaaggatactcttctatattcaaatgtaaagctcgactaagaaatgaaacagagcttcaaaaacggcaaaaggacactgattttctctacaggtcgttcgtttacatatttttgtgtgtatcaagccgggtttctcaactggccgcctttgaaaccggtgttatttgaatgtttaaagagaaggatgaaacttttgctggtcagagcagttgatgtgttatgtgtatattgccatattggctgcattctctacttataaatattttctttcttacatacattctgagtctcagacctaataataaaagaccactctggacacttgatgtgtatcttctgactctagcagagcttttgatcatgaatctgaatatattattgcaatt

SEQ ID NO: 147451 - DNA, 1452 bp, Arabidopsis thaliana landsberg
ttataatgtctgcttatgtttttctagtggagcaactgtttacatggtgtgccggaacaaggaaagaggacaagaggctctttctaagattcaaacctcaacaggaaaccaaaatgtgtacttagaagtatgatcattttctactttcaaattcatttttgcaagtttccatactctttatcaacccttttagttttgcttctttcttaggtatgtgatttgtcttcccttaatgaaataaagtcatttgcttcgagtttcgcttccaaggatgtcccggttcatgtgctggtatgtggtcttttcttttactaattcttagaataacatttcacttgtttgattctggttttcaaattgtaggttaataatgctggtttgcttgagaacaaacgtactactacacctgaagggttggtcccatttatctttcttgaacgttccaatattatttcatcttgagttaattttacacacctatgatcttctgttatagattcgagttaagtttcgcggtgaatgtacttgggacatacacaatgacagagttgatgcttccattgttggagaaagcaacaccagacgccaaagtcattacagttgcctctggtggaatgtacacttcaccgcttactacagatcttcaggtaatcaatctgctggacacatatgtcatcttcaagaattgcttatgttcattttctttttacctctttggaactgcttgcaccactcctatgtcagatatataactcaagctacatatgattgttctgcagtttagtggtgaaaaatttgatggagtggaacaatacgcacgaaacaaaagaatccaggtctgtaaaatctgaatctactagtcaagaagtcacttttttcggtcttctgagtttgtttttgtgttaggtggctctgacagaaaaatgggctgataagtacaaaaataaaggcatagggttctactcaatgcaccctggctgggctgagacaccaggtgttgccaagagtttaccgagtttcagtgaatcgtaagatagttctgctaaaggaaacatctttaatgctgaaggaaacatctttatggtgctaaagaatgttttaaacttgtgaatcaggttcgcgggtaagcttagaacaagcgaacaaggagccgatacaatcgtttggttagcactgcagccaaaagagaagcttgtctctggtgcattctatttcgatagagctgaagcaccaaaacatctaaagcttgcaggtacaagcaagtctcatgaccttattgactcagtcattgattctgtgcattccatggcagctcttaatccttaaatgtccatcttcgacatagtttttttcttgaaaataaaatgtgattgcacgtaacagtattagtcttttctcattattgtggaaatattatagtatggaatatttatatcttttacttattacata

SEQ ID NO: 147452 - DNA, 974 bp, Arabidopsis thaliana landsberg; identical to SEQ ID NO: 40089

SEQ ID NO: 147453 - DNA, 230 bp, Arabidopsis thaliana landsberg
agattatcacggaaccaagaccttaatcatcaaatcgaacagtcagcagctagcaaaatcactcgatagaaatagttacctcgcgacagagcatcaatcggagaagacgaaacgaaaagatcaacgcagacggaggaagaagagacgatcgattgatggtagattgatatgacatggtgcgaaaaaagagcaaacagagattagatatatactgaggaggagagaaaaaa

SEQ ID NO: 147454 - DNA, 1329 bp, Arabidopsis thaliana landsberg
  unsure (1)..(1329): unsure at all n locations
atgaagagttcnnnnnnnnnnnnnnnnnnnnnagttcgggtaagtattcctataactcttttattgaagatttttttgtttatgtttctttatttttgcgttgtttcagagcataagtttgccaactcaccatcaagagaaaacagaggatacatctttaccggatagcagtgctgagatggttccaaaaacccctccgccaaagaatggtgcaggccttcactcagcaccatcaacacctgccggaggacgtccaagtttgaacgtgcctgccggtaatgtttcaaatacatcagttaccttatcaacttctattcctactcaaacttccatagaaagcatggggagtttgtctcccgtggctgccaaggaagaagacgcaacaaccttgccttctcgtaaaccaccctcatctgttgcggatactccattgaggggcattggtagagttggtatccccaaccaaccccaaccaagccagcctccgtctcctattccagctaacgggtctcgcattagtgcaacttcagctgctgaagttgcaaagagaaatataatgggagttgagagcaacgtccaacctcttacttctccactgagcaaaatggtgttgccaccaactgcaaagggtaatgatggaactgcctctgatagcaaccctggtgatgttgcggctagtattggtagagctttttcaccatctattgtatctggttcgcagtggaggcctggtagtccctttcagagtcagaatgaaacggtgtgtgttttgaattcgattataagtttaaggatccctgggacatttgcattatactatggtagtttgagcaatatcatggctttacttgttagtctgagcaatatcatggcttgttagtttttttcgtattctggaacatacttcagaaacaagttctgattcttgtgatgtggaactctgtgtataattgggtttacactcttaacataatcctaaccaggctcttttgagatgtattcctagggctttacttatttttctactggtagtccctttctactgtcttctttttctactattaaatacgtacattggcttttaggttcgtgggagaactgaaatagcaccagaccaaagagagaaattcttacagagattacagcaagtacagcaaggccatggtaacctcttaggcataccttctttatctggaggaaacgagaagcagttttcttcacaacaacaaaatcctcttttacagcaggtagcatattcaatatggaataatcacatgcttaatagtattcaaaacattccatcatattaagagattatcttttctaatc

SEQ ID NO: 147455 - DNA, 716 bp, Arabidopsis thaliana landsberg
atgaacaaggaagagactgacaagacaattgatgaacaaggttggcttcacacaggagatataggttacatcgatgatgatggagatatcttcatcgttgatcgtatcaaagaacttatcaaatacaaaggttttcaggtaaaatgttacgttataccaaaaataaaacataatttttcctttgtttcatattggccccattttcaaagttttggtgtaatattccaataggttgctccggccgagcttgaagctattctactcactcatccatccgttgaagacgttgccgtcgtgccgtgagtatctatataaatatattgccctaatgatttcttgaaactgatatattaaaacatgaaatgaaaaggttaccggacgaggaagccggggagattccggcggcttgcgtggtgataaatccgaaagcgacagaaaaggaagaagacattctcaactttgttgcagcaaatgtggctcattacaagaaggtcagagccgtccattttgtggattcaatccctaaatctctctctggtaaaatcatgaggaggcttcttagagacaagatcctcagcatcaacaagaagtagaagaaagaaaactcttacaagcttttaattaatctactttggttaaagaaattgtccttaaacaataaatactctttgtggtttcattattgctccttgattaggaaattctacagttcaatt

SEQ ID NO: 147456 - DNA, 951 bp, Arabidopsis thaliana landsberg
atggatgacattccagatgaggatacattgtctgatcaggactttagtaatgaagatgacatcgacgaggacagcctgcaaactatgtcttatgttgtggcaagaacaaaaagtcacataaccgtccagctgcaagttgttcaggtatgtacaaaatgttatacgatgcattgagatgccaagttgtctaatagcaacaaatgtgaagtatgaaaatgttaaaaataacatattgaaaaagccatacaaaattgaatctagcaatgttatagtctctaattttgccttgctccagaataatgatctaactccgtctctcactactgtattttctcctgttttcaggtagtgacggatctctaccgaatccatcagcagtcattgttggcatcgcacgttactgttatactggagatactctcatcaatctcatcacatgcccaccagttaaattctgatttgatattgcagaagaaagtgaggagagcgtgctctatcctggagctctctgaacctcccatgcttcatttcgaaaatgacacgtttcagaactacctggacattcttcaagccatagtgacaaataatccaggagtgtcgttggagctaaacgtagagtctcagctgatgacagtgtgtatgcaaatactgaagatgtacctgaaatgcactttgtttcagggtgatgagttggaagaaaccaggcagcccaaaaactggattctacccatgggagcagcctcgaaggaagaagcagcagcgagatctcccctagtggttgcagtgctgaaggctctgagggaactgaaaagagattcattcaagaggtatgcaccgaatttcttcccattgttggtggagcttgtgcggagcgagcacagctcttcacaagtcccacaagtcttaagcacagtgttccatacatgtatgggtgcaatgatggatgaataa

SEQ ID NO: 147457 - DNA, 3627 bp, Arabidopsis thaliana landsberg
agatccacgtgaatttgacattcgcaaatcacatttttcatcatccaacttcaaagtcttcactaattatccagcagtgaaaaccaaagtccattgccctcttattgatcataaagcccacacgtaaattgcaatctccttcaaataaaaccatttagtagcttcacaaccaaacattgcattgccatcactatggaactcaatttccaacgtggttttagattgagcatgacctgccaaaattttcgaaaatttttgaattgcaacaacgaatacagaagaaacaaaaaagccaaaatgaccgaatctgtaacaaaaaaaaaacttcgacaatctaagcataagagattagcacccatcgtaagtccgaggaaaaaacaccaattccgaaccgcgaaactcggacatttgcatgattgcctcaactctaaaaaactcgaataccatcgtagttacatatgataattgatacacaccccattcctttatttccaaactttctttcaaatgcatattgaatctaaagatgattcattgcaaaaaaaatataatcatatgtgattcatatttcatatttcgtaagcataccatttaaaaggtttaggtttgctaaaacgacagcgtttcaattacttgaatgttataacttagaaggaaaaagaattccaaagaaagtacaacagacaaaagaagagatcacaatcatctgccatgaaagttcaaaggttccagagcggaagccgcagccacgaattgactcaccaacaacactctctcttctctttctctctcttcattattattgaaaaagattccaaatttttcaatttcacatgacatcgcacttctctcttccttttgctttcgcatcttcttcttcgtcaacgaatcctcggactctccggcgatgccccgtcgattaaacgacggcgagcctggccgttttaccgccaccgctcttcttttaatcggtttaatctcttgtgttatcgtctacgctgttttctcttctgtcctccgtccatcccaagatcctacactcgttgattccgcggttcgattcaaagaggagccgcgagatcacgatgcaactgaagacggtgaaggtgggtgttgccgtggaattgataatctggagctttggggtccggcggtgaagtggggcacggattttaagtttaattcgtctgatggatgttgtaaagcttgtaaagttatgtgtagtggcaacgatggaccttgcttgtgcgattcatgggtgttttgtgggaacaaagaggattgtggctcgaagtttggagaggtaaaagtctgatccttgtcatgcgaatcgcattgtgcatgatttaccaatatagtccgccaactgttcgacaaaatgcttaattgagccttgtatcgtcaaatatctagagatttagtcgaaagttactaaatttaaagaaacctcgtgatttttttttactctgtgtgtgattagtaattgagaaatgctgactttgatgacacttgccacagtgcaagttccagagactgaggtagtttttttctctgcgcagtgttggttgaagaagcaaaaagatgtcttggtgcctgatcgacaaggaggtggcgagaaagtaatgtggacatctggacttatcttcggacaaggccaggtagtgatctatttaatacgtcttgaaaattaactccattgatcgaccaaagttcaaagttaatgcattttttccaaacgctggaaatagtaggtttcaatgagatattattaattataatttaattgtgttctcattttcctccaaacatttactattccatgaaaattactcagcctttggtattgatttgtctgtctgatcagatgatagtagctgctctgttttatcaaatttcacaagatcatactttcactgtgtcctcagttttctactttttaatctgagaatttactgtgttggtgattttaatttggtggagtgtaaccaaatcttatgtctctctgatataactgctctgctttccttcttctcttgaaaacaaatagtgttctcgatgatgtcctatttactgattagctattttgcttcttttagggcattgttggttttgaaacggaacacggcgtaattcatgtcaaagtaagtgtctttactataatgtatcttttgtacttcgagagaaagttccagtttttgtttataatttccagatttgacaccgatgctttcttttattgcagcttcaccctgaatgcgctcctcactcagtatactacattttgagtttgttaactctacgccactgtgcaggctgccagtttcatcgagcagagaaccggggatcatattgggacaccgaaggcaatcatgtaaagaatgtaagagaccttacacaaattttgctttttaattcgtagattttgcataatcactttccagtatagatcatagcagctatgatctgatctcataggacgaatccatgtcttaggatctctgtcaaattgatagactcttagccatttgattcatctattatacatttttatttatctgtctttgatattgaagttcaaaggtgtgataaacttttagccgtttgcttttacatttttccaaaagaatatccgtcattgatgttaaacatcacgggtgtgatcaatggcaactgactgcctctggctaaacccacattgttgtacaatcctgtatctggtttgagactgtatcgattatactcagaccctttctatcgattaaatttccttgaatgtttgttcatatctcgcataaaatgtgaggcacacctgattgtactttaggcatgaaccttaactggtctgatagcatagtagacattgtgacatgtgttatgcactgatttctgtcaatttgatggaacctttagccttttgattcatctggttgcacacctttagttttagtaacacatcttgatatcgaagatgagtcgtatgatgaatgctttagtactgtatggagtaagcttttcgtggtttatatcgggtcaaattcccttttagcttgttcataccttaatgcaggcctttcttcctctatacaaacatatttgacttgttattaaaagtctcacattttatccgtgtccctgcaggctccctttggtccaccatacgctatgattcaaggaatactccaggccgagggaaacattttcacaccgatcccaaccgagcactgcccaactataagccgtggctcggtggcgtgggtcggctcgggtccagaattcttcatcagtttagcaaaccaccatgaatggaaacaatcttacactgtattcggctcagttctaccagaagacatggatgtcgtggagacaatagccggtttaccaacaagagccgatgtctggaacagcgtcaatgtctctgtgctggagaaaccggtttccttaaccgtacggagaatgaagacgggccaagaacaagaagaaaccggttcatgaagaacaagctagaaatgagttcagaatagttattgtttcttttttggaattttacaatttctctttgttcatagatagaaaactgaaattttcttggtcttctggccatttcaatgaaaaattattggttaccat

SEQ ID NO: 147458 - DNA, 343 bp, Arabidopsis thaliana landsberg; identical to SEQ ID NO: 39641

SEQ ID NO: 147459 - DNA, 1340 bp, Arabidopsis thaliana landsberg
  unsure (1)..(1340): unsure at all n locations
gtcactcactctgtaaagtataaaccctaaaaatcgaatcttttaaccgattagccgatccctccaccggaaaatcggaaggtaaacctcaatagaattctcttactatttttttgttattcgtcataccagatttttccgattaacgaaatgtcattatcatcatcatgatgattgatgtgtgagattgctgggaaaaagtcagagtgactgattcttctctaaagcatcaaactttacattttgttgagttattcgtgttattgagtcttaattctgtgttgaattttctctagtagaagcgtaaatggcggatgttgaagatcgtgcggcgaaggggatctctgactacgatcaaggtggtgtaaagacgacggaactggaaaggaagattgaggatatggagaacaagaatcaggagctcacgagagagaatcgtgaattgaaggagaggttagagaggcttacgggagaaattgaagagatgaaagacgtagaagcggagatgaatcagagattcggagagatggagaaagagatcgaggagtacgaggaagagaagaaggctttggaagctatttctactagagctgtggagcttgaaactgaggtgtcgaatcttcatgacgatctgatcacttccttgaacggagtggataagacggcggaagaagtggcggagctgaagaaagcgttggcggagatagtggagaagctggaggggtgtgagaaggaagctgagggtttaaggaaagatagagctgaggttgagaagagggttagggatttggaaaggaagattggggttttggaagtgagggaaatggaggagaagagtaagaaacttagatcagaagaggaaatgagggagatagatgatgagaaaaagagagagattgaggaattgcagaagacagtcattgttttgaatctggaattggtgaagaatgtagaagaattgaagaaatggaagtctgagaagaagctcacggaggaagctttgagtgaaactcaaaaacgagagaaggagctggagttgaagaaggacgagttactgaagaaggttgaggaaggtaacaagacggtttttgctttgaatgagagaaccatgaagcctagtaatggagtcaaaaaccnacatggtggtgaccaaaagggttccttggaagctgagtatcagtggccagtggttgttgctggatcagttggagctgctggtttgggtgcagcgacctttttcgtctgctattctaagctaaggtgattttgatgaatatgttagagaaagaataactgatgaccaagttcttaagattgatatctgggatggaattatatag

SEQ ID NO: 147460 - DNA, 1087 bp, Arabidopsis thaliana landsberg
gtttatctgaacttagtttcgacccaagagcagaaattaggaaggttgcattgaaagtcctgtttgatactctgaggaaccatggtgaccatttcagtctggcgttatgggaacgggtttttgagtctgttttatttcgaatattcgactatgtgcgtcaggacgttgacccatctgaggatgattcaacagatcagagaggttacaatggtgaagtcgaccaagagtcttggctttatgagacatgctcgttagctctacagctggttgtagacctctttgtaaatttttacaagacggttaaccctctccttaagaaggtactgatgttatttgtaagcttgataaaacgtcctcaccaaagtcttgctggtgcgggtattgctgcgcttgtccgtctgatgagagatgtcggtcatcaattctctaacgaacaatggctcgaggttgtgtcatgtatcaaagaagcagcagatgctacatcccctgacttctcatacgttaccagtgaagatttgatggaggatgtaagcaatgaggacgaaacaaacgataattccaacgacgcactgagaagaaggaacaggcagcttcatgctgtcgtcacagatgccaaatctaaagcttcaattcagatttttgtgattcaggtcagtcaagtcttcagtctctttggtgatgaagcatggatagatatatacacacataatcgatctcatgagtatatgtgtatgtctgtgtacttgctctttattttcaggcggtaacagatatctacgacatgtaccgtatgtctctcacagccaatcacatgttgatgctcttcgacgctatgcacggcattggatccaacgctcacaaaatcaacgctgatctactcttacgttccaagctccaggagctcgggtcgtcccttgaatcccaagaagctcctcgtctgcgcctggagaacgaatctttccaaacatgtatgaccttcttagacaacctcatctcagatcagcctgtgggttacaacgaggctgaaatagaatcccacctcataagcctctgcagagaggtgttagagttctacataaatatttca

SEQ ID NO: 147461 - DNA, 260 bp, Arabidopsis thaliana landsberg
caaaacctctctcttctctctctcactagctcgaacacccaaaacagttagagattcaaatgccgtcggagtcatcgtacaaagtccaccgtccggcgaaatccggaggatctcgacgagactcaagccccgactcaataatcttcacacctgaatctaatctcagtctcttctcctccgcttccgtcagcgtcgatcgttgctcttccacctccgacgctcacgaccgggacgactctctcatctccggtccctctctg

SEQ ID NO: 147462 - DNA, 623 bp, Arabidopsis thaliana landsberg
gttgtccagcggttccaagagttatttgctcaaacaaagtacaaggaggctgctgagcttgctgctgaatctcctcagggcattctacggacacctgatacggtggccaaattccaggtatatgttccatattcaagcaaagaatcctctgtgaacatgttgtctataatgtatgtttgtaacaccagtctgaaactacaacatcacactttacaattttgcagagtgttcctgtacaagcagggcaaactcctccattgttacagtattttgggacccttttgactagagggaagctcaattcatatgagtctttggaactatctcggcttgttgtgaatcaaaacaaaaagaacctcttggaaaactggttggcagaggataagttagaatgcagtgaagaactcggagaccttgtcaaagtaatcttaaaatgaccattttcatttaaagtgtctcctatgggcttctttagtatgctgtaacggtaatattttctgattcagactgtggataatgaccttgctctaaaaatatacatcaaagctagagctactccaaaagtcgttgcagcttttgcagagcgaagggagtttgacaaaatactgatttactcaaagcag

SEQ ID NO: 147463 - DNA, 404 bp, Arabidopsis thaliana landsberg
gttcaaacaccgcaatgggtagcatacacgattctatgttgcagacagatgatgtaagctatcaatattctttcatttttatctggtaatgcaccatttgcacttttagtatcctttgttactggtcagaactctcttataaacagaggttatagtgtaactttgagtggcttaaatttcctgtgatgaattgtttgtcagttttgcacttatgggactgtagacttgtatcctgctatatagtatcgtttcagtattctatatggagattcttttctatcttttttgaagtgcattataactactagaattttccttatttattacttgtatttgctgttgtcataggaggcaactccattgaaaaagaagctggacgagtttggcagctttttggctaaggt

SEQ ID NO: 147464 - DNA, 360 bp, Arabidopsis thaliana landsberg
atctcactttctctttcagaaaaacaaacagtttcttagtttcgttcgagatgagcggtgaagtttggagatggaacaagcaagcagagatgaattcgataagagattgtttgaaacattgtaattccatcgctatcgacacagagtttcccggatgcttaaaggagactcccatggacgcaagtgatgaaattcgttatagagacatgaaattcaatgtggacaacacccatctcatccagttagggttaacgctattcggcaaaggaatcactaaaacctgggagatcaacttgtcagatttcaacgaatctaagagcttgaaaaatgatgaatctatagcgtttttaaaaaacaatg

SEQ ID NO: 147465 - DNA, 406 bp, Arabidopsis thaliana landsberg
gtgtgcagttgggaactgttacagtttgcgtaaggatcatgatactgctctcaaaatgtttcagagagctatccaactgaatgaaagattcacatatgcacataccctttgtggccacgagtacaattcttttcgatgcatcttttgcgcataatcggcatatgcatgtacgttaataacataccggtctcaccttggctgcacaggtttgccgcattggaagaattcgaggatgcagagagatgctaccggaaggctctgggcatagatacaagacactataatgcatggtacggtcttggaatgacctatcttcgtcaggagaaattcgagtttgcgcagcatcaatttcaactggctctccaaataaatccaagatcttcagtcatcatgtgttactatggaa

SEQ ID NO: 147466 - DNA, 1000 bp, Arabidopsis thaliana landsberg
tcttacagtaattatgactgattctgatttgcttgcaattcatgtaggattcgggatctggactagatggaaaggatggttggtttacgatcttttctttttcctttcgttactatcatgcggctaacaccgtgaaagctacttatcagagagttctttattgtttttccattcagctgaagcagcatcagagaatggtggttctgccaatggtccgcaaaatggaagtgctggtacacctattctaccggtgagccagaccgtaccaatcatgccaatgacagctgcaggtgttcctggcccaccaacaaatttaaatattgggatggattactggggtgctccaacttcagctggtatccctggaatgcatgggaaagtatctacaccagttcctggagttgttgctccaggctcgcgagatggtggccattcacaaccctggttacaggtgtgcccacctttcttaggcagatttaaatcgccttttatcctcaaactcagatttgtttgtcttgcaattaggacgatagagaacttaagcgacagagacggaagcagtccaatagggagtctgctcgaagatcaaggttgcgtaaacaggtactaaacatccatttagatcacctctagcacgcccatgtgagcaaattattgacccggtgtttgtgatttaggccgaatgtgatgagctggcccaacgcgctgaggtgttgaacgaagaaaacacaaatctcagagcagaaatcagcaagctcaaaagccaatgcgaagatcttaccaccgagaacacctctctcaaggtaaaaaaaaagtaatctttcaaaattagttttagagccagccaacgaaacagttaccaactttgttcttgcaggaccaactttcattattccctccacttgaaggcataagcatggacaatgaccaccaagaaccagacaccaatcaaacaggtgccgcagagagaaaggttgattcatacaaagactcaacgtga

SEQ ID NO: 147467 - DNA, 519 bp, Arabidopsis thaliana landsberg
atgagatttgctactctgttttcggttttgcttcttcttcttcgattcggtttaatcgtggaatcgatcatcgtcccagttgatttcttggctctgcaagcgattcgtaaatcactcgatgatttgccaggttccaatttcttcgattcatgggatttcacctctgatccttgtaacttcgccggagtttactgtgacggtgataaagtaaccgcgcttaacctcggtgatccaagagccggttcacccggtttatctggtcggattgacccggctattggaaaactctctgctttaacggagctctctatcgtcccgggtcggatcatgggttcgttaccgcatacaatctcacagtcaaagaatcttcgatttctcgcaatcagtcggaatttcatctccggtgagattccagcgagtctaagcgagcttcggggactcaaaacgcttgatctgagctataatcagctaaccgggtcgatccctccgtcaatcggatccttaccggagctatccgat

SEQ ID NO: 147468 - DNA, 586 bp, Arabidopsis thaliana landsberg
tcagcttcttcatccactagaagttcaatgatgaaaccagcattaccgtcatcttcatctgttcaacgttcgactctgaagtcaccgttgcgagatgatagatctgttgttgctaaggagaggaacggttttgggaaagctccttctgtgtctaaaagtgatgatgaggattctgaggatgataaaccattgagtgctaggcttaaattggattctaaagaggttaccaaacagccaagctcttcaggacgtgggagtacgcagcaagcagtacaaaagagcaacatgaggcctcagggattgagtgattacactaaaaagaaagttttggatgagagagctcccatgtcctcaacggttcagacaaagaccagtgtgggtacatcaagtagcaagcctgttcatattgaacagaagagacctttggttaacaatattgatcggaatggtttgaaacctaagactgaagggcacagttctcaggcacctgctaagagacctcttgaaaaggggagttcttcgaatcaatcttctgttaagaggcccaagctgtcagagccagctagaccagtgaaagtggagcaag

SEQ ID NO: 147469 - DNA, 2609 bp, Arabidopsis thaliana landsberg
atgattgaacaacttgggcttattataataatgggcctgatacattatcaatccgagagagtcaagcctcgtgagtggttaaagctctcttcatcggaaaattccggattgggaacaccaaaacaaatcaccggcgatcggaaaccggcgacgtaagctatgagcagtacggcagggaggctcgtgacttcaaaatccgagcttgacctcgatcaccctaacatcgaagattaccttccttctggttcttccatcaatgaacctcgcggcaagctcagcctgtatgtaaaactctctccgaaatttccgttgaatttgaattcgatttgatccgctgattaagtattcacctttctttatgattcgcaggcgtgatttgctagacatctctccaacgctcactgaagctgctggtgccattgttgatgtaagatatttcagactaaaacccaaatctgtctcaccattactctatcaaaagacttcaaatttatcacataaaggatagatttttgagtataagatgttttgttttgtgggtttgattgttgcaggactcgttcacaagatgtttcaaatcaaatcctccagaaccttggaactggaatatttacttattcccactatactgctttggggttgttgttagatactgtatcctctttcccttgaggttggttcctcttatttattcaattatatatggctcttatcctctccagagctcaaagtttagatctgcatgtttgtactgagcagtttcattgttttaaaacttgcaggtgcttcactttagcttttgggtggattattttcctttcattgtttatccctgtaaatgcgttgctgaaaggtcaagataggttgaggaaaaagatagaggtaggttggattctctcgtttgtcttgtataatttcgttttcactatgttattccgttattcttccatctagaattcaggaagattttcctttcttttgctgtgttaccagagggtcttggtggaaatgatttgcagcttttttgtcgcctcatggaccggagttgtcaaatatcacgggccacgtcctagcatccgtcctaagcaggtcatgcttcattttaaaaaacgttattttgtgtctccatgatacacatgcttactttatgagtggggtttacaggtctatgttgccaaccatacttcaatgattgatttcatcgtattggagcagatgaccgcatttgctgttataatgcagaagcatcctggttgggttggtaagtcctcaggcttttagagagcgaaaagtgtgcttataaccttttatgattgctcagtttttaataggcttgtgactgatttagtgattggtttgccctttgtgcattattgtgaaagccatgattgacttttgttgctttatatatgaaggtcttctgcaaagcacaatattagagagtgtgggatgtatctggttcaatcgttcagaggcaaaggatcgtgaaattgtagcaaaaaagtatgcatgattcttatcctctttaagtgtcattacgtgatctactcacactaatcatgggaacatgaatcacgtgattcaggttaagggaccatgtccaaggagctgacagtaatcctcttctcatatttcccgaagggacatgtgtaaataataattacacagtgatgtttaagaaggtatttggacttaactttgatgtgatttgcactactactacactatagtttctgattcgcttcatgacaatgtcagggtgcttttgaattggactgcactgtttgtccaattgcaattaaatacaacaagatttttgttgacgccttctggaatagcagaaagtaagcgtattttatttaagactttcatattagacgggacagatacgactttttgtttcacttatattgaatagttgcgatttaggttcatttctttgtcttggtaactaaatatgttgcatgctttttgcagacaatcatttactatgcacttgctgcaactcatgacatcatgggctgttgtatgtgaagtgtggtacttggaaccacaaaccataaggcccggtgaaacaggaattgaatttgcagagaggtaaaacactcttcttttggatctacatcagagaagtcatatatactaagaagtttgcatccactttatataattgtgacagggtcagagacatgatatctcttcgggcgggtctcaaaaaggtcccttgggatggatacttgaagtattcgagaccaagccccaagcatagtgaacgcaagtatgtcgttctttctagagattctactgtcattattctttctatttgaaactcttaaaagaattttgagtagcatggttatctattagctgattagatcaaagtcatacttggaacttgcagaaattgttctgatccttgaatctatacgaagtatttacagttcacattcttgtgcctgttgatggtaatttggttttctttaaactaaacaggcaacagagtttcgcagagtcgatcctggctagattggaagagaagtgaatgtaaagatgaagttatatttatgtgttttcattttccatagagatactatgagtcatgactatgt

SEQ ID NO: 147470 - DNA, 1210 bp, Arabidopsis thaliana landsberg
ctaaactcaatatataatgataacacgttcacgtgttcatcgtcaaaagagtgtctcagtgagtacaatcttcaggtgtcttctagttttgatcagacgctctattcaattctcttaattagtcatatctttcttttttccctcgtttcgtgttaattttattttaaaacaaaggattaaagagtcaatctttcttttggtaacatggagccttaatgatcctttgttagctctagctaggattttacgtactacttagggtattcaaactaaaataaaatcaagaagaagaacagagagatggtgaggacaccatgttgcaaagaagaaggaataaagaaaggagcttggactcctgaggaagatcaaaagcttattgcttatcttcacctacatggtgaaggtggatggcgtactctccctgaaaaagctggtactttatttttatcatatggttcaattattagctacgatttaattaaaagaaatttatatatattattgttataatgtgtgtaaatgtatttaggattgaagagatgtggaaagagttgtagattgagatgggctaattacttaagacccgacattaagagaggagagtttagtcctgaagaagacgacactatcatcaagcttcatgctcttaagggtaacaagtaagtatctcttttttcttctttcttagtttggattagataatcattactatatgtgtaatgttgcatgaaaatactttacttttcatctcaaatgccaaccataacttttatttttttgataaagattccaaatcttcattagagtaaaataatatttgttagtattattttattgatggttgtgtttgattattgaaggtgggccgcaatcgccactagcttggcgggacgaactgacaacgaaataaaaaactattggaacacaaatctcaagaagcggttgaagcaaaaaggcatcgatgcaatcactcacaaaccgatcaattcaaccggttttgaaccaaaagtaaataaaccggtatattcatccggttccgctaggcttcttaaccgcgtcgcaagcaaatacgcggttgaattaaaccgggacttactgaccgggatcatcagtggaaactccaccgtcgccgaagattcacaaaactccggcgacgttgattctccgacctccacattgctcaacaaaatggcggcaacatcagttttga

SEQ ID NO: 147471 - DNA, 1001 bp, Arabidopsis thaliana landsberg
atgtactctagtggtagctctgttcctgcggttaatcgtgtatattccgaagccagtgacaatgttagtccggtgatgatcggaacaaaaatggtggagagagtaataaacatgcggaaacttgctccacccagatcagatgacaagggttctcctcatggtaacttgtctgcaaagtattcatcacccgacagtgcaggatttggaagaacgctctccaagaagtcccttgatatggcaataaggcatatggtatgtatctctctcttctctcttcctcaagtggtggcaattgcgtttaactgatgatcaaacgttttgatgaaaacaggatatacgtagaactattccagggaacctgagaccactaatgacgaatattccagcatcatcaatgtacagtgtgaggtctggacatacacgtggtagaccgatgaatgtttcagactcttctccactagcaacaagcagcaacgcaagctcagagatcagtgtctgcaacaacaatggcatttgcttagaggcaagtgaaaaggaagacgacgcaggcagcgagagaggttgcaggtcccctgcaagcttacaagggagatgaaggaagaaagaagaaaagccttttgtaaaacgttcacatttgagattctcttttattgtttgtgagttttaattatcacacgagtttgataatgatgatatgtgaagtagcgttttgatgttttatgtaaacctctccactctcgtctctactttaaccctaaaatggatggatcctttaaccgattgatttgagatattaaccactattcaatggtaactgactaaaacataaaaagttatcattccaatatgacataattatgttaataacacacatgaaccataaaatctctcagctgtttataacacataatgaaatgcaaagactgaattcacacagatgtaagcagcgaataaggaaacaaaagaggtttttaagcagcagtatctgcctcagtgggctt

SEQ ID NO: 147472 - DNA, 404 bp, Arabidopsis thaliana landsberg
aagaaacaatggcagctatgaagctcctactctctcaagctcgccgccaaggtctaatcaaacccttttcgtctccatttcaacaaatcccaagactcttctcttcatcttcatcttcatcttcatcttcatcttcatcatccgattcgaatccatctcccgattcaaacgaatctcgcaaaaaggctgttacaatcgagccagtatcgtacgcggccaaacccaaggatcagaaatctgaaccgaaaaatgttgaatcgacggagaaccttcagtctccagaatcagcgaactggactcgtgaagaaatccgatatgtgaaagactctccttcgatcaattccgtttcttacgctcagcgtgtggcttcactttccgaggatcgtgtcgcccgtgagaatgaa

SEQ ID NO: 147473 - DNA, 967 bp, Arabidopsis thaliana landsberg
tggaggcgttgaaacagccctctttaacagctcacttcgtttcacattcctaaattcctctcaatcttcttcttacttaacttattatataagtctctgtttctctctgacaaaaatattccaccacaaaaaaaaatggctcaattcttagagaaggcaacttcggctctcagcgaagccaaagaatccgttacaagcaccgctgaatccgtcacggcttctctcactgatgctgagaaaaccgttaaccaaaccgccaggagcactctaactgacgccgagcaaccgttgcagcatctgtgaaacggtcaagaccgaggctgcagccgcaccagacaagcgtctggtgtgtctacacaggtcggtattggtcacaaacttttacatgttttttatcgtcccagcaaaactaacaagacacgtttttaaatttgaataggctaaggatgcagtggacaaagctttttctagaggtatagaaggagccaaatctttgcttcaaactttcgaagcgaagagcagcgatatttcctcaaagcttgttggaggtgttaccaatcttgtgagtggagcatcgagcagcaccgtggcaaaccgagaccttccagtatctacagacaaccaggtcaaagatttatgcaaaaccctcttttcttaaaatccttcaaaagaaaaagtttattgtctcttataccaaaagattgtaattctcatgatcatgttttaacaattgaatatatgtgttttgcagcctctgctagcgtctggcgaaacgacgccgtggtggaagaattgttgtggagttcttgatcttttcaagaaagatacttaagttaaaaagatcaaaaaaatgacaaattaacgaatttcacgagatgaagaaacagagcactagaagaagaaagaaccctcatccttttgattatttatttccttcctttttgattttgatttgagattgtgtcta

SEQ ID NO: 147474 - DNA, 248 bp, Arabidopsis thaliana landsberg
tctcacaaaccctagatcgattttgtttttctctcatgtccaaagacaaagtctcttctcccaccgccgatctcattctgcagcttgctgctacactcgtcgctgctcttggcgctcaatgctaccgcctcacactaccgccgtctcctccgcccagaatcctgacgccgcaagtgctaccttcgtcttgctaccatggcttcctcctttcaatcctacccgaattctttaccatcgcgcgagctctc

SEQ ID NO: 147475 - DNA, 948 bp, Arabidopsis thaliana landsberg
cttcttttctgtacttaattccagaataacttcactatcaacattaccagcagagattggagatctatcacgtctaggaacattggatcttcgttctaatcaggtattgtgctcatttctttgatggatattgttttctgacaatctatatatattttcgaaacctttatctattgacagtcactttctaatcaatggtctacacacttgtgctttctccgaattttcagctcaaggaatatccagttggggcatgtaaattgaagctctcgtacctagatctttcaaataattccttgacaggattgcatcctgagctcggtatggttagcaaacagcactaagcatttctgcatcccctgcttgctaataaatttacatatgacttcataagaatagttattagcataaaactcatgtcctcacatttttaggaaacatgactactctgagaaagcttgtgcttgttggcaatcctttgagaacccttagaaggtttccttttactccgtctctgtcttgtttcttgattgcctagtcttaaatagattgatacttgaagaggcgaataattctcttttgttttttttgctctccagctcattagtaaatggtcctacagctgctctattgaagtatcttaggagccgcctttctaatagtgaaggtactttggtccaacttccctctttgtctctcatctaagtggtcatggctaactgtaaaaggtttgcaattatagaaacaagtgcaagcactccaacaaaggaaaatgtgattgcttcagcagctcgtatgtccatttcttcaaaggtaagtgaaccacagatctgagcaccatcctgttaagaattcaatgttcttaatagaaactagaagttattatcttaattgattgcacaaaactcaggaactttctctggaaggtctcaacttgagtgatgtccc

SEQ ID NO: 147476 - DNA, 524 bp, Arabidopsis thaliana landsberg
aaaacatctctctgcttctttagtttcacatctcacacaagtctttgctctctcttaacagtttttcttctatcatctttaaactatgggaactgttgtgtatcaacaagggtttcagtctcagcttaatgagcctagggctttaaggcttaggctatcttcaccaaatcctcacttttctcaaccatttggtttagctctcaaatctcatttacttgactcctctcatgcagaggacacccgaaaccgtaacgatgacaaagctgctgcttccccggtctctgactcgagtggctggagctctctccagtccctatcctctggctcctcctcctccacaaagacgacgacaagctctgagaaagagagtagttactatgttcaacgtccgtcttcttgtagagctctaagcgaccagagcttagcattgtgcactgagaatctcggaagcgaatctggttctgatgttacagatattgatgagttgttctcgcttgacgtgcaaaccaagaatctcggggaaa

SEQ ID NO: 147477 - DNA, 446 bp, Arabidopsis thaliana landsberg
taaggggacacttaaagagagaaacaaatccttcttctaaaatattcttcaatcttcttctcgaagcttctccaaaaatggcgattacttcttctagaaccgccagatcaaacggatctgcttcgctccgatccaaatcaccgtccggtcgattctgtggcgtttactcaaaccgtgtgccgtcatcatctccgtcgtcgtcaggtttcgcttcttccacaagctcaagtttctcgtcaccgtcgacagcgtttttcagcagccacaatcagaacaaccaccaccaacacagatctgcttctccgacgcgtgtgaatctattcacatcagcaccgatgacgcaatcgtttcgttactcaatcgataacagatctatatcaccgaatcgatctatcgctgtttcctccaacaaacctagcaatcatcacaagattccggattcgagg

SEQ ID NO: 147478 - DNA, 878 bp, Arabidopsis thaliana landsberg
atgctgtctcaagagaaagctcgaagacttggccataactttgttgggactgagcaaatactgttgggtctaattggagaagggactgggattgccgccaaggttcttaaatccatggggatcaatcttaaagattcacgcgtggaagtagaaaagataattgggagaggcagtggattcgtggcagtggagattccatttactcctcgcgcaaagcgggtgctggagttgtcactagaggaagctcgacaacttggtatgggtctatttctattatgaatatttagccttggagcttgttatgtgttgtgcaatacataagctttcttgactgatgaagctaactaattcttctccatttgggaaatgttttgctatttcgaaatctagggcataactacattggttcagagcaccttttgcttggtctacttcgtgaaggggagggtgtggcagctcgtgtcttggagaatttgggtgcagatcctagtaatatacggacacaggtaaatgcaccaactctggattctaaggttaatgttatgtcttagtaaaccatttcgttataacattttgagatacatatatcatttttaggttatacgtatggtcggggaaaacaatgaagtcacagcaagcgttggtgggggaagcagcggaaacagcaaaatgccaacacttgaagagtatgggactaacttaactaaactagcagaggaggtactaaaaatgtgtactcattttgaagagagtgtcatgttaatgcttgaaggtttctactaaaatttggtttttctctttctatggcagggtaaactggatccggttgttggaaggcagccacagatcgaacgagtggtccagatcttggctcgaag

SEQ ID NO: 147479 - DNA, 670 bp, Arabidopsis thaliana landsberg
cacatttgtaacactaattttcaaatcctaaacatgaaaccttcatcaccaatttcactcactagttcttcaattgctagaaaagctcgtttttctccttacctcttcacactcttagccttcattcttttcgtctctgtcctctatggtgaagattttatgtgcatctttggacagctcgagcctaacttcgtcctcccgccttctcgaacacccggtaatattttgtttattcactaaacttgtggtttgaatacgcgttgacaatgaggaattgagtttgtgttttggttttcaatttcttggattcttaagaaaagaataagaaatcggagaagcttgcgtttgctattggtaaaacagaggaaagctgtgacgttttcagcgggaaatgggtgagagatgaagtctcccgtccactgtatgaggaatgggagtgtccgtacattcaacctcagcttacatgtcaagaacacggccgtcccgacaaagactaccagttttggcggtggcagcctaatcactgcgatcttccctcgtaagctcactctaaacgctctgttttctctgtttcatgggttactctgttttctctgtttcatgtgttgctctgttttctctgtttcataggttcaacgcgtcactgatgctggagacattaagagggtag

SEQ ID NO: 147480 - DNA, 1384 bp, Arabidopsis thaliana landsberg
ttaaaagttgcaaaggaagcagcaactgtacctgtagctgctacacaaccatcatatcacaagagctctcaagatattaatgagtgggatcaaccaatgcggactccttcccctcaggctcgtgcgcctcttgcccctattcagcaatcaaactcatccacatatgtttccgactatggagcagaggcagaagatggctccggttttgaagactgtaagtttcttggaccattaaaagttttgaaatttctcatatgctcaaactcgcactaggatatgctatttggagttatttgtcatatattcatttctttctggtatgccttgtttcagttgagttcaaatcagtgtacgttaggaatttgccttccgacatatctgcttctgaaatagaggaagagtttaagaacttcggtacaatcaagcctgatggtgtgttcctcagaacccgcaaggtaaataatcttcatttcgtgtttttttttaatccttttctctatgtttatcttaattgatatgaagagccaaaactaacaatcttatgcaactaaacatgtaggatgttatgggcgtatgttatgcatttgttgagtttgaggacatgacttccgttgagaatgcgattaaggtctagattctattccacagttacctcactagattaattttcatcttctgttcccctttcgctttgttcttatcattttccgtttgtgtaacaataatatataggcttctcctatatacttgggtggaaggcaagtatacattgaggaacgaagaccaaatcccgctggtgttcgcggagcaagtaagtcttcttttgaaaccgtgctctatgaccaacaaattttgtatcataaaacttcttaagagcgtcttgtgaaagcctcataagaaagaaagtgtacaacatgtaactcattctgactttgatgtgtattgacttggtcaggaagaggaggaggacgtggaaggggtggttacccaacagaagcaccaagaggccggtttggtgggcgtgggtctggcagaggaaaccaggatggaggtgactacaggccaagaggaaatggttactaccgcggtggtggtcgctaaaagaaaaaagaatctcgtcaaagttttagtgctaccaaagaatgaaatgattcagttcttcttcctttatctacggaagaagtagtttgtaatttctattttgttgggtttggtttttggctcaaagaaacaaagattttggcttatatatgtttttctttaaatttgttatagatttagccatttagagcttttgactgttatctccctttgggaatggtttagttttggtataacatttcaatttttggtttccttactggattgaattccaaacttcatc

SEQ ID NO: 147481 - DNA, 1183 bp, Arabidopsis thaliana landsberg
  unsure (1)..(1183): unsure at all n locations
gctggtatggctgctgcacgaggtttgttaggcaaagaaactgctcttctgaacaatccgcgacatatggtcccttccttgacagaaacaggagctcggcttttcgttacaagattcttgggacaattcatatcaaccggttctgtaacgtgaggctcaccctaccttctcaacttagattatattatgttagattattacttaccgctatggacttaacagaatactagaagaaggaggaacaatgttcacattcggagggaaggattctacttgtcctctaaaatctatcctcaagattcacagtcctcaattttactggaaggtacatatatataaatatgacaatgaatagttggaatagtcttttattaatccatgatctttgaactttgattcttgattcttgatattcaggttatgacacaagcggatttaggacttgcagatgcttatatcaatggagatttttctttcgttgataaagaatcaggacttttaaatctgattatggtacataatatatacatgtagaagcatagatacttgagtttttcgtcttttcgagtttgtttaattaatgaaactttctgcagattctcattgctaacagagatacaaaatcaaatcttagtaagaaaaggtaaaagctttgaatttttctgaaataaggaaaggcatgcaagctttgtctcctaagcttttcaattctcgcaggggatggtggtcaccgatgattataactgcgggtttagcatctgcaaagtattttctaaagcatgtctctaggcagaacactctaacacaagctcgtagaaacatttctcgtcactatgaccttgtatgtagcttgaggccctgagcctccatctctcttatatctctgtttcctttttgtttgagttcataatcaaattctctgcttggttaattcacnnnnnnnnnnnnnnnnnnnnnnnnnnnnnnnnnnnnnnatgacttactcctctgcagtattcaaggtgaccatgaaatgtttttagggaattttttttttttttttggtttctctgacttgactatgattctgacttcaaccattcacaatgatcatagtcggatgatgaggatctgagaactgcacagataagaaaaatctcgcttctgatagataaggtaaagcattttcttgatttagaacaac

SEQ ID NO: 147482 - DNA, 294 bp, Arabidopsis thaliana landsberg
  unsure (1)..(294): unsure at all n locations
ctaaaaaatcaccgtgtctctcgtccctggtttggtccttcgagaagtgtgaacaaaaatgggttttctctttggtttgttcataggaatcgcggtttctttcggtttggtcgtcgcatttgctcgctactctagtgtcagatccactcgtcgagctgatttggtaaaaccaatttcatattttcgtattgtgattaatccatctaagaagattaataaataagaagaacaattttttggttntgaataggcaaagaccattgctgcatttgcaagaatgacagttcaagattc

SEQ ID NO: 147483 - DNA, 852 bp, Arabidopsis thaliana landsberg
atggatgttatggctttgttaacagctttagtttgtgcacaaggtacttatgctctgcatcattctcctctctggtagttctgttttggaaatccatgttttagaacaattttttctgatctgtggtctgcaggtaggaacgaggctactactaatgggtctccgggagtgcctcaaagagagcaacttcttcagatacttaacaagatcaaggctttacctttgcctatgaatcttacctcgaagttgaacaatatcggaattttagccaggaaaaatccggagcaaccctccccgatgaatcctcaaaatagtatgaatggggcttcttctccatctacgatggacttgcttgctgctctctcggcatctttaggttcatctgctccagaggccatagcttttttatctcaaggagggtttggtaacaaagaaagcaatgataggactaagttaacttcttctgaccacagcgccacaaccagtttagaaaagaaaactttggagtttccttcttttgggggaggagagaggacaagtagcactaaccattctccatctcagtattcagattcacgcggtcaagacactagatcgagcttatctctacaactattcacctcttcaccagaagaggagagtcgaccaaaagttgcatcttcaacaaagtattattcttctgcgagcagtaaccctgttgaggatagatcaccatcatcatctccagtcatgcaagagttattccctttgcatacttctcctgaacccaggaggtataacaattacaaagacaatagtaacagtcccaggaccagttgtttgcccctagagctctttggtgcatctgataga

SEQ ID NO: 147484 - DNA, 884 bp, Arabidopsis thaliana landsberg
caacttatacttggtgcgattgatttggtagacgccaattccaaaaccggtggatatattgtttactcaacatgttcagttatgatacccgaggttggtaaaccatactttttctgttccactatttttttttcctggcatcttcatgttttctcactagttctatttgtacaacaaattatgcagaacgaagctgtcatcgattatgctctgaaaaacagggatgttaaactcgttccatgtggacttgattttggccgaccagggtaatatacattttcatctgcattgaaaaatttcatgattcgtcatctgaacacaaatgttttgctgcatatcttcagatttagcagttttagagaacaccggttccacccttctttagagaagactagacgtttctatcctcacgtgcacaacatggatggattctttgttgcaaaggtatacacttggttaacctatgaatagcttttccctgcaaaacagatgttttataaaatatgaatagtgattaaaccaacgaggtatttactttttcctttctttgttctgcagctgaagaagatgagcaatgcaatgcagccttcaggaaatgatgagccagctgtaacaatggagcaagctcaggtgtcgtctagtgatgatgatgatgagaaagctgaggccattgaggagttggagaagccacctgttgccagtgggcaacccaagagagagagtaacactaaagaagacacgaacaaacgaaaaaatccaaggtcaaaggaaattcacaaaggcaaaaggaataaaaacacaaaaaccgaaagtggtaatgtggaagaacccaggaagcaaaagaagaagagatcacaatggaagaatgagattgctcaagctag

SEQ ID NO: 147485 - DNA, 5394 bp, Arabidopsis thaliana landsberg
  unsure (1)..(5394): unsure at all n locations
cttttgttcatgaaacgtggtggagaactcatatatgccggtccacttggccagacgtcttgtgagcttatcaagtatttcgaggtaggttgtgttcttgatctattaatttttaacatgtaaaataaagtctcttgactgctactgttttcttctttagtcaattgaaggggtgcaaaagatcaaacctggccataatccggcagcatggatgcttgatgtcactgcttctaccgaggaacaccggcttggagttgattttgctgaaatttacaggaactcaaatctttgtcagtatgtgcctttcctcatttagtcaaaactatgcatgttagctttccataagttcggtttaccttagtttatgtctccgttctactgcagacgcaacaaggagctgatcgaagtactcagcaagccaagtaacattgcaaaagaaatcgagtttccaaccagatactctcagtcactgtatagtcagtttgttgcttgcctgtggaaacaaaacctatcatattggcgaaacccacaatacactgcagttcgattcttctacaccgtggttatctcgctgatgcttggaacaatatgttggaaatttggctccaaaaggtatgagtaaagtggcacattgctatcaccaaagagtgatgattcctttaaccaatgatacatttcttcatatatagggacactcaacaacagttatttaatgcaatgggatcgatgtacgctgcggttctcttcattggaatcaccaatgcaaccgctgcacagcccgttgtttccatagaaagatttgtttcataccgcgagagagcagcgggaatgtactcggcacttccctttgcatttgcacaggtcacagatatgtttattatctttctatctttctcatccccgcttttgagtttaaaaacctaaaaattgtatgagtttgcaggtgtttatagaatttccatacgtgttagcacaatccacaatatacagcaccatattctatgcaatggccgcgttcgaatggtccgcggtgaagttcttgtggtacttattcttcatgtacttttcgataatgtacttcaccttctacgggatgatgacgacagcaatcaccccaaaccacaatgtcgcctcgattatagcagcacctttctacatgctctggaatcttttcagtggcttcatgatcccatacaaggtacattactaagcttatcttttatttctttagaaatactaatgttttgaatgatttgactacagaggattcctctgtggtggagatggtactactgggcaaacccggtggcttggacactgtacggtnnnnnnnnnnnnnnnnnnnnnnnnnnnnnnagatcggtgaagctatcggacggtatccatcaggtgatggtgaaacaactgcttgaggatgtgatgggatataaacatgacttcttaggtgtctcagctattatggttgtcgccttttgcgtcttcttctcccttgtgtttgcattcgccattaaagctttcaatttccagagaagatgttggattgattaccacttaccaactctcatattcatatatacacgtatacaacaatcatctattgtttatttgtatattggggcttttatacccaagaaggcaggggactgcctattcttcctctgtcattacatgtatgggatcaataaaagcttgtgttgtgttttatgttccttgtcattttttctgagaaatgtgtattggtcatctataacaatcactgatcatgaaccagtactgtaatagagatatatctctagtttactggttgtacacatctttgctagtatatatttggccaagtgcatatacgcttattcactcactagaaagatttccccatgtgtaacttatggtaatttttcatgtaaatagagtttcaagagctatatgtcgtctccttccaatcactaaagttagtgacaaacttagtaagtaggtttagtttcttatgaagtcaatttgtccaagcttgaatattagatcttttcgcattccgattaaccttcattttttatgtttttcgggtcgagataggcgtaaccatcaaaggttcattctggtttgaggtactcccataaacatttcgatgaaactccaatcctgcctccggttggagtctagtccacttgaccaccttcgcttcctagagatctccaaccctctattgaaggattacttacgcttcttgaaccaccattccaagcaacaacaaaccaatggaagcaacgacgcaactcactctaccaagatcatttccaacatcggcttgtacatagtatagcaccaaaacaaacacattagtcttgctacttccaccaaaagtagagagaaatagagccacaaaaaaagagttaatctagtaaaatacaacagaaaatctagtaaatacgacataatctagtcgatctttcgtaaaaaagcatagaaaatcaattaaaatcttataataaatgtgattagtacggacaacttcctaggatagtgatgattattctgtactaatacaaatttcatagttattaataaaagaagagttgaaaaaaaaaaaaaaacacgaaagaagtcagtgacattcgttacatctccattggcttacatattcacagagacaaaaaaaaaaaactccttccattttccctttttcctctcccaacaaaaaccctaaaagatcatctctctctgcagattcagtttctcgccatcgacgacgacgacaacaaaatcacatatcttctctatcgatctccaatcatcatcttcttcctaactacaggtccagcttcttctcttcgatttccttacgctttcgtctctctctcaattcgtgatgtgtattcgtttaaatcgtccgcgtgatttcgtgaaatttcgccgaattctggaatcttctccgatattcttcaatttgcttccatctgtagaagaatcagaagctttggtctatgtcggtcaatttaagaatctgttcccaatttttcttcataattcactttcatcgttttacgaattggaacctttcgaatgtttcatcgttttgttagtcactggaattggcttagcaaaaaagctgagtctctatagaagactgaatttgcttatttttctggaaaaaagtatcaattcaccattttatttacctaattcatagttttggtagctaagatatgtgttgtgttgtagttttaaaggttctaaagaagtctcatgttagcttttggagtatcaaattaactatttgctcgtttcttggtattttttaggtgtattgatgttctttgcagagatgtctccagcaacaaagtcaaagtctaaggataaaaaaactggtaaagaagctcaaaaggcatcaccaaagccttcactttcggttaatgggaatagcagcttggcagctagtggttataatcctcttttaggaacatttcaagctcttgattcagtgtcgatagcttctatctcaccattacagtatagtcgtttccggagtatagatgaggcagatgtaaatgggattgagtctgattcagtttcgaataatggtagctgttctggtgagtcagaagatcacaaggagaaaacaactaatctgccccttaagcaggaggtgataccaggtgcagataatgacaagcgagaaaaagttcgtcaaaagaatgagagaaaacatcaacgccagaaggagaggagggctcaggagttgaatgagaagtgtagcacatatcttatttccagaaagcttgaagcccgtacacagcaaattgtggcaatgggaatatctcaagagcatgcgacaacggcattaatgatgaatgatggtaaagtagaggaatctgttcattggttgtttgataggcttgaggaagaaatagagaagcaaagcattcagagtcctgggaatttgaaaatagacataacagaagagctagctaggattacaaaaatggagttgcaacttaagtgtacaaggcaggaaatagagcgtgcggttgttcaagcagagggtgatttggacagagcagaagaagtcttgaaaggcacaaagtatgaagagttttctgtgccagtgaaacaagaggaatgtggtgatcctcttacacccagtaatggaaaacttatagtaggaataggttatcagaattcggatgtagaaaggtcagaaattccgtcacctggcttacatccaacaagagatgacaagaactttaactatacaaaatcaccctccacaactgaatccgtgaacaaaatgttggctcagcctatgaaacgacccgaactgaagttagattggccaaaacctcagcaatctgctgctttggctgataaaaggtggccaccaaccacaggacaggttccttcggcttcttactctttgccatcatcgccatcaccgtcacctcagcctgctgtgagggtcgaagctcgctatttagctagtggaaatgaatttaagaacttccagcagcagcagcagcagcctgcaaatagagaatcagtcatggtgatgaggcagcggccacaggttgtaatcacaaatcacgttccaacctcaagcatgagtgcaccccctaccagttggcatcctgcagcgagcatagagataatgaagtcaaatgggttcatgcaaacacataatatccctagtgcgcgaagcccaagtccaaaccatctgaatccaaatcaggtctaccagcaacttcagtatcaaaaccagaagcgattcactaacaacaaccaagtggatccacatggtagtatggccagagggaatggcgggcaatggactagaaatacagcatcatctccacccatatctgctgcgtcttcgctgggattattctctgcggttggttcagctggaacatcgggtgcatcttcacctatagattggatctctggcggttcagtggactacacaaacatagactggagtctagatcaaagtttatcacaaaatagtagagtcaatggaaactggtccgggttaaagagcagcagccaaatatatgatgagaacatgaaccggtacagtctaaatggttccatgggaggtagactcaacaacagcaacggtgtatctatggagaattcaggtgctggtgttatcgtggaaacacaacaagcagctacctctccagattggacttcaccatttgaaggaaaagatatctttagcttgtctagacaatatgtgtctccttctctgtaagagcataggagtttcatatggaaatgaaagtaataaaacaagaaaaaaagaagacagaaaatggtttcatgacttatgtgtggttgcttctctctttgattatcattcgtgaatatgtctttttaaaaaacttttaatttatattt

SEQ ID NO: 147486 - DNA, 655 bp, Arabidopsis thaliana landsberg
gaatttcaccagcaagaaggcttcctctgagacgatcagggatcctcacttattctcatttgctttcaacagaggtgaatgtttaataggataataattgtgatttcttacaaatatatactgagaagttgagaatgtcctgtatccttctaactgtatcatttttcttttatatgcgtctgcctggatccccgcaggaaagtttcaggtgagattatacaactttcattactcgagatgctgttctgcatattctacccttcttaacaatatgctctgcaacaggttgaggagatttacaactttgctcaagatgacctcttgactgaggatatatatttcctagacacccatgctgaagtttttgtctgggttggtcaatgtgtggagcctaaggaaaagcaaactgtatttgagattggccaagtaactatttccttatcaattttgcttcttgttttgcttctttttcttttcttgtactgtttgttcattgagacagtttatgagcagaaatacatagatcttgctggatccttggaaggcttgcatcctaaagtcccaatctacaaaatcaatgaagggaacgaaccatgcttcttcaccacttacttttcttgggatgccactaaagctatcgtaagtgaattagtgt

SEQ ID NO: 147487 - DNA, 383 bp, Arabidopsis thaliana landsberg
  unsure (1)..(383): unsure at all n locations
tctctttctttcaattccactgcaatggcgaaaacagagaagagagtccgagaaggactcggatcttcttcgtatttcctcggctgtttcggattctcccggaaaatatactccgacaagccgatggttacgaagggagacggtggtgagaagaagaagatgaagaagaagcgaatccctcggtggtttttgtgttccaagttccgcctgaagaacagcgagatcaaaccgtcgccgatcgaggaaacagagaaacctacttcgagagtagaagatgaaactgatgataagcagaaacccctctccgtgatacgtcgtataactgatcgtaaaaatattccggttgatgataaagccatgaatcangaaacaaaagaggtatc

SEQ ID NO: 147488 - DNA, 1688 bp, Arabidopsis thaliana landsberg
gaagttgccacgtgccaatgagttgaccaatgaggaaactcagtgcgttatccgtagggataatcagataagcagaatctgattttgtcaccagagtgcttttatagattacacaacacacgttcgtttctttcttcttctaacacactcttgagtcttgaggtcaacaacgtcgagaataatggcatcatctctttgtgcttcttctgccatcgctgccatttcttctccaaggtaagctcatctttttatctcttcttatcagttatcatcacttgctatataggaatgatcactaagatccttgtacagttgtacttaattagtttcgttaacatgactatgatagtgatccattgattgggatttatgatctagtatccgagaatgtgtgtgcggttgtaaaattagtgatccatcatccatttagattaaacgttgtgcgactattgtttgtgtgatccaaacaccgatctgccctatgtaataatatgaatttatgtatggttggtgttattgaagttgtgactaaatttttagggctatgatatatgtgcagtttcttgggtggtaagaaactgaggctgaagaagaagttgactgttccagctgtgtccaggccagatgcgtcggtgcgcgccgtcgcagctgatccagatagaccaatctggttcccgggaagcactcctccagagtggctagacggtagcctccctggtgacttcggatttgatcctcttggtctttgtgagtatattttttttgttcctccttgcatgctttttaacaagttttataaacaaaattagactatatttataattttctgacaaaatttagacacatgtcagcatcggacccggacagtctaaaatggaacgtacaagccgagatagtccactgccgatgggctatgctaggagccgccgggatattcatcccagagttcctaacgaagatcggaatcctcaacactccgtcatggtacacggcgggagagcaagagtatttcacggacaaaaccacactctttgtcgttgagctcattttgatcggatgggcagaaggacgtagatgggccgatatcatcaagcccggtagcgtcaacactgacccagtcttcccaaacaacaaactgacgggcacagacgttggttacccaggtgggttatggttcgacccgttgggttggggatccggtagcccggctaagctcaaggagttgaggaccaaggagatcaagaacggaaggttggctatgttggcagtgatgggtgcttggttccaacacatctacactggcactggtcctattgataacctttttgcacatcttgctgatcctggtcacgccaccatcttcgctgtaagtgtgatccgaatcaaaacatatcttcttaaatattcataacatccactcgtttaaatgactagcttttgtgtttttttacaggctttcacacccaagtgagacaacgaaaaagggttatggggaggtgaatgcgtttgtgtgtgatcatgtttgtacaaatatcgttttgaacttaaaagtattatgtattttatataaattgtggtcgaatgcaaattaaggtttcacataacactcttttttcctaactcaatgatcataagatgcttttacattgtcattcagagcttaaaagagtccatcttaattgtttttc

SEQ ID NO: 147489 - DNA, 694 bp, Arabidopsis thaliana landsberg
agaataattacgaagaaatggagaattttggtgaagggagaagaagtggaggcggaatgttgccgttgctggctctaagcgccgtcgcggagtactatagactaccgtggaaaccaccggtgacggcgagtctcctggccgcgaacactctcgtttatctcaggccggcgtttatcgatcccgttattcctcacatcagtgaggtctggttcaatcctcacctcatcttcaaggtaaaccaatcttaataaattccttcattcgccaagagaaattgattgcaatttgaccgatttcgatctgaaattcgaatttgagtttcctgggaaatttgtaccaatatctggagaattagggattttgttcttcgatatctaattagatcattcttgattgattaattctattctctgttaaagtttttttttttaatcttgatgtgtatttgttgaacagcataaggacttgaagcgtttatttctatcagcgttctaccatgttaacgagcctcacttagtctataacatgatgtcacttctctggaaaggtatcaagcttgagacatcaatgggaagcagtgagtttgcttcaatggtctttactcttattggtatgtctcaaggagtcacattgttgttagccaaatcgcttcttctcttgtttgactatgacagagcttactacaacgagtatg

SEQ ID NO: 147490 - DNA, 1142 bp, Arabidopsis thaliana landsberg
cctggaagacaaaaaaggggaaaaaccattatccttaaagtaaccaacacttctctctctctttcttcaatggatttgcaactgaaacaatggagaagccagcagcagcaacaacatcagacagagtcagaagaacaaccttctgcagctaagataccaaaacatgtctttgaccagattcattctcacactgcaacttctactgctcttcctctctttacccctgagcctacttcttctaaactctcctctttgtctcctgattcttcctccaggttccccagtgagtcttttcttcctcttatcttatctttcttgataaagaattagacttttcattcatatagtttgtgtttaattgattttgattcctttttgtagagatggggagcttctttagctgggcacagtggcaagaacttgaactacaagctctgatctacaggtacatgttggctggtgctgctgttcctcaggagctccttttaccaatcaagaaaagccttctccatctatctccttcctactttcttcaccatcctcttcaacacctacctcattaccaacctgcttgtgagtctcgagaacagtcttcatctatctattttttaaatataaatgggttttgtgctactggtgttggagttgtgttcccaagatccagactttcaatattagtatattatctcgctttgccaatcttgaagatctaaacatgtgtgaatgggattaagtaggattagaatcttgttattgatctgatatgtgatatgaatgttgaaaacagggtatttgggaagggcagcgatggatcctgagccaggcagatgcaggagaacggatggtaagaagtggagatgttcaagagacgtcttcgctggccacaagtattgcgagcgccacatgcaccgtggccgcaaccgttcaagaaagcctgtggaaactccaaccaccgtcaatgcaactgccacgtccatggcttcatcagtagcagccgcagccaccactacaacagcaacaacaacatctacgtttgcttttggtggtggtggtggtagtgaggaagtggttggtcaaggaggatctttcttcttctctggctcttctaactcttcatctgaacttctccaccttagtcaaag

SEQ ID NO: 147491 - DNA, 434 bp, Arabidopsis thaliana landsberg
ctctctctttcattccctacataaaaagcttcgagctcccatcactatataccctccaaagatgcaattttcaagaaactcaatccttaggcaactaagccgaaaagaaggttggagatcggcttctaaaaggtggacttccggagatagctcaacagccttcatcgacgacacaagtggtggtggttgtggtggtggttactcatcaatggagggtctttatgcagtttactccggtggagacacgtcggcgacaagtaagagagtgatggttgtagttgatgaaagttcgaggtctaagcatgctataatgtgggctttgactcatttgactaacaaaggagatatatagtgactcttcttcatgttgtgtctcctgatgatgaagctactccttctttggctcaatctcttggttctctttgcaaaggttg

SEQ ID NO: 147492 - DNA, 635 bp, Arabidopsis thaliana landsberg
tgcgctccaggtcttgatgatcttcgtgattggacaaacaatgtccaacctcacattccaatttacactgctatacgtgatctcgaggtttacctgttttccaacactccaaaatatttcccaatgctatttcagtagctaaaggctctccaccatgacatgtgaatctcaggtgatgaagaagacccattattacttggttgatacaagtgtcatcatacccggagctgcagtctcagagttggagtttaaagtcatacacgaggaccagccatttgtggtaaacgatctgaaggtaacatctatctctagcttataatcatcaaaactactatgctcagtaatgatcttggcgttgtcttatgcatgaattggatgtttttaactgtttcagatcaccccattacctgtatggcatggaagtaactaccgttcccttggtttccgctttggtaatgtctgctacataaggtaaacaaacacacacttccctctaccatttctgtaccagactttgttcatgaatatcttagtctttagttatcgtattgtaaaatatgcagcgatgtcagtgacataccggaagaaacctacccgctccttaaagactgtgatctcctaattatggtaatctt

SEQ ID NO: 147493 - DNA, 2094 bp, Arabidopsis thaliana landsberg
ggtgcaaagatccctgcagatggtgttgtggtgtggggttcaagttacgttaatgaaagtatggtgactggtgaatcagttcctgtatcaaaagaggttgattcaccagtaatcgggggtactattaatatgcatggtgctcttcacatgaaagctacaaaggtgggatctgatgcagttctgagccagattattagtttggtcgagacggcccaaatgtcaaaagctcctattcagaaatttgcggattatgtaagtatattagataaacatgtcaataagcgtgtcatccattggtgttattgcttgttcctttgtgatatagtcattaacagggacacaaacttaccctggcttgtccaattttcaggttgcaagtatttttgttccggtagtgattactttggcattgttcaccttaataggctggtaagatctagtaccttagctttaatttttctctgagaacgaaacacttgggattagtttgttcttatttcttgatacatatgattttgaaggtcaattggtggagctgttggagcttacccagacgaatggcttccggagaacgggactcactttgttttctcgcttatgttctcaatatccgttgtggtaattgcttgtccttgtgcacttggcttggcaacaccgactgctgttatggtggcaacaggagttggagcaaccaatggtgtattgatcaaaggaggtgatgcattagagaaagctcacaaagtgaagtatgtaatctttgacaaaacaggcaccttaactcaaggaaaagctactgtgacaaccacaaaggtcttctcagagatggaccgtggagaattccttacacttgttgcgtctgctgaggtaagataaatcttccttcctagctgcttggattgatagtgatgtataaactgttactaaagcttttcatattgtctcttaatttccttaggctagcagtgaacacccgttggcaaaagctatagttgcgtacgctcggcatttccacttctttgatgaatccactgaagatggcgaaacaaataacaaagatttgcaaaactctggatggttacttgatacctcggatttctctgctcttcccggaaaagggattcagtgcttagtcaatgagaagatgattctggttggggttttattccataatatattatcaacttcttgcttttggtcctgttctcgccaactgaaagaaagttttgttttatcctctttgatcaggtgggaaaccgtaaacttatgtcagaaaatgccataaacatcccagaccatgtcgagaaatttgtggaagatcttgaagaaagcggaaagacgggagtcattgtagcctataatgggaaattagttggtgtgatgggaatcgcggatcctctaaagcgagaagccgctttggttgtggaaggtctccttagaatgggtgttcgacccataatggttacaggtgataactggagaacagcaagagcagtcgccaaagaggttagaatctcatttcacaatctatgtgattaggtgtaggcattctttttttttttgcattctgttcggttatagtggttcgatttcgttaaaatatttacttctataagtgtgtaatcaatcttgataaacaattgttttagtagaatattgatggggtttatggtggcatgagtgcaggttggtatcgaagatgtgagagcagaagtaatgccagctggtaaagctgacgttatacgttcgctgcaaaaggacggaagcacagtagccatggtaggagacggaatcaatgactctcccgctctagccgctgcagatgtgggaatggcaattggtgcaggaacagatgtagcaatagaagcagcagattacgttctgatgagaaacaacttagaagacgttataacagccatcgatctctctcgaaaaaccttaacacgaatccgattaaattacgtcttcgcaatggcgtacaatgtagtgtcaatcccgatagcagcaggagtgtttttcccggttctgcgggtgcaattaccgccttgggcagccggagcatgtatggcactctcttcggttagtgttgtttgctaa

SEQ ID NO: 147494 - DNA, 2306 bp, Arabidopsis thaliana landsberg
atgagcggaagaatgtcctcaaacttgggtcagaatcgtgcagaaccatatccccaaaatcaagaaaaaactgaagaatggcctaaacacacaaacacagaatccttaatacacactagaacccaaaacgtaaaaaaacaaactttcatctgaaattcttcagggagaataatgtactagcaagagaaggcctttggacgcccctgactcggactgagatagtgaagcaaccgaacgatggaagactttattgaattgtggataaattctagccacaagatcatctgatttctccattttacagaacccatgcagcttcttcacctaatccatatacattcaaacaaaacgaaagcaatgtatcacttaataccagtctcaagccaattctcaataaatggacaaaagatgcgtactgattgtagtatagatggatcagaagcaggatccgtagaatcccgcgcgctgttgcttaggattctgaggtaaaaatcccagtctccttcttgatcactcatgttctcaatcaaaaagaagatcactagaaaaaattcatatgatatgatgatggatgaagaagtttcagcttcggcgactccagagtcccggagaaagaggattggaaagaagacgacgtcgtttattcaaagatctatatccttaaactacatgccatctcttcttgtccacatgtcgtttatagtagcataagacggcacacagtttatcaagcaaaccccctagacgggctatggattggctgcggcctttttatagcttgttgcagcgatacgacatcgtttggccagtacgacttcgttcggccggtacgacttgtcttcttcacgttttctaataggattaattaactacgtgtcgcttatagtagcataagacggcacgcattttattcagcaaacctccgtatatcgcaggctctctcactctttccgtcttctgatttctccctccaaaacaaacctcggaagagaaaattggagcgaaggagcgatagatatggcgtcggcgtcctcgtctgacggagttgccggaaggattcagaacgcttctttggttcttgtctccgataacagttccacgcttgctgtgagtattttcgttcaaaccaaattcactcttttttttttttgatgtaaatataggtttctgagaagttcctgaaatctttcctccgagatgttaacagataggagcttcggcttataatgggtttgactagttagaagtgaacaagggatttctaatttgggcaaaatttatagcctagaatctgctttatctcgtatctgtttttacttttatttgcaggatatccgcaaagctgtggcaatgatgaagaacattgcagttcaattggagaaagaaaatctaacggaccaggttggttattattttgtctgatatgagaggaagcgttttcagggataaacgcgcttgtagccgttttacattttttttttttgctacaatgtagagtagtttcattcatctccttgagtttttgtattggctaatcataagtgaccttatcttaaacttgtgggaactgcctagactttcttctaatgtgattgattcttggttaattgcattgctgtaaaacttgttatcacgtatctctttcattctgacattgtattattgtctgctcttgccaacactctttccttgatgtctgtctttgtttttcttaaatgctctttatatatgctcttcatttttatattttgggttccacaggttaaggaccttgaaaattctgtggctgagttattggatttgcatagtgattgtaatcaccgttcgacagcaattcaatccgttgcaaatcggtaccaacccgtggaacaagtactcactttccctctttcatgtgttatctaatttcttattcggttgcatacttttagatgtagcaaattgatttttactctaatgactgcagttaacggactttaaaaagttgcttgatgatgaattcacaaagctcaaggctacaccttcctcagtgccacaaaatgatcatttgatgcgccagttcagggaagcagtttgggtatgtttttaacttaaagttcttggcttgtatctaataggtctatagtccgatttcctttttaagttattgtcaatgttttgctgcagaatgttcatcatgcaggtgaaccaatgcctggtgacgatgatgaggacattgttatgaccagtactcagtgccctcttctaaacatgacatgtcccttgagcgggaagcctgtcactgaattagcagatccagttcgcag

SEQ ID NO: 147495 - DNA, 465 bp, Arabidopsis thaliana landsberg
tacggactcttccatctgttcacggtaattaaccggacagttcgatcaaacaaaggtttttgtgttatttggtttctgaactgagtgattgtttttcacacaggaacccaattctgaagatcccttgaaccatgatgctgcagcagttttgagggataacccaaagctctttgagaccaatgttcgcagggccatgaccggtggatatgtcggtcagacctttttcccgcgttgtatctaacaaagctctggtttgtcttcttcaaggaaaaagataagaaccaaaccctttgtccgccattgtatttcttctctttctcaaggaccctcgtttgtttgtttgatcttgtaaaattacattccgcgttaaagtaaccctttccttatatcgaaatcttgtcaacattaagttcgtgagaattcgataaaggagactaaaaggaattgtataacatgtttgatctt

SEQ ID NO: 147496 - DNA, 1749 bp, Arabidopsis thaliana landsberg
acaaaggcccacagaatttggatgcggcaaaaattgcagtagatggtcctgaaaaagttaatgctcaggatgctgagagcgagaataagcatgtggctacagaaacggaagcggaaaacactgattgcaatgaacaaggaagagttgttgttggtggatcggagttgactagttctccaaaggaaatcaagaatgtggaggtcgaaaaggcagctgaaaaagcatttccaatagaaacagccgtatcaaatgcaagaccaggaaaatctaagagtgcacaaatggctgaggattcagatacatgtctcttgaataagtcaccaacagcaaatgattcaaatggcagtgaatcagttattggagtgaagcttcaaaaggatttatgtgatgctgaactgaaaacagtagatggtgaaaccgaaaatctgcccaatggagacttaagcccaaagtcatcagtagctgcagatggagaaaagcaagatgcatgtgaggcacaaaaagagatgagcaagaagctctctgcttttgcaccgccgtataccccaacaaccattccaatatttggatcaattgcagttccaggattcaaagaccacggtggaatcctcccctctccattgaatatgccaccaatgcttcctattaaccatgtccgcagatcaactcctcatcagtctgtaacagctcgagttccttatgggcctagactctctggtggtggctacatccgatctggaaacagggttccgcgtaacaaaccaagcttccccaatagcaccgagtccaatggtgaggctaatcaattcaatggcccaagaataatgaacccccatgctgctgagttcataccgagtcaaccttgggtttctaatgggtatccagtgtcaccaaatggctatttagcatccccaaatggtgcagaaataacacagaatgggtaccctttgtcaccagtagcaggtggatatccgtgtaacatgtccgttacacagcctcaggatggacttgtttcagaggaattacctggtgctggaagctctgaggagaagagcggaagcgaagaagaaagcaacaacgacaacaatgctggagaggatgacgaagccgttggacaagaaactacagatacacctgaaaatggacattcgacagtaggtgaagtggaaaccacatcacatgagacttgtgatgagaaaaatggagaacgacaaggaggcaagtgctggggagattacagcgataatgaaatcgagcaaattgaagttacaagttgaagacgcaactgtctgttactgaagtattaacattgaggctaaaggaatgcggagacattttggctccattgatgaggttaaaggtaaacaatcatcatagtcgagaaaagcatttttacatgtgaatgttttgtgttgtagcgcaggaccaaggctcgtcactcctgctttaacaacttttctcctgctttcagtttttggtttcatagctgaaaactagatatattcaactccttaataaaagatttgtccctttgtttttctttcgatttactatggagtatagacatcaatagtaagatacagctcatggccaccaaaaaggagaaatccctgaatgttcattccctgtatttgatgtcttgagggttagattttgtaaaaatctttactgatgagaacatgatcaaaatgcaagaaaactatgggtctgtgctcaaacacagagagtaaatacattatgaggccatgt

SEQ ID NO: 147497 - DNA, 1543 bp, Arabidopsis thaliana landsberg
cttaaccatggaaaagtagagaagaagaagaaagagagaagtgagagaaagacgaagaagatgaagagcatattgctttttctgtccccagccatgtgagtttccactgacacattctctccatcttcacatttggtgtttttttcttttgcttgattctttctatcttcattttcagattttcaccgcctccgtaaccgagtttgaacgagttagtggatgagacttcatcgtcgtctagaactaggagtcgttctcctttctcgcaccgtagacctccgagtccttactcttcggcttcgtctacttcttcgtctcttataaataatcgtctattacctcgttcttcttccacacctacttctaccgtttacaattccggcggtgtaaccgggtcccgatctatgtcgattactcgcaccatttccgattccggtcccatcggcggctccgggacttatggagcccaatcgtacccatcggaggggctcattggcgagtctgggcagacgattacctctgagcgagatagcatctccgtcaccgttcgatttcgtccgatgaggtacggtagatctggaagcggaatatcagatccatttgatacaatttcacgattattcttctttagaagtttaatattgatgaaatgtgaattgatacttagtcaattttgaaaatctcccgtgttatttgtttgattgcagtgagagggagtatcaaagaggagatgagattgtttggtatcctgacgcagataagatggtcaggaatgaatacaatcccctcacagcttacgcatttggtattgagatcaatttattgccggagataatttcaatttactgttcattgattatagatttggtcgcctccgtttgttcaatgaatgttcttccatatttgttgatgccagataaagtttttggaccacagtcaacaactccagaagtatatgacgtagctgctaaacctgtagtcaaggctgctatggaaggtgttaacggtaaggcttatagctgtgttatcgattaaacaagagttgtgtttgtcattgaaatacctttagccaactcatttgctagtagcattacttgcagggaagtattctgactctgtgtttgcaatttgacaggaaccgtttttgcttatggtgttacaagcagtggaaagacacatacaatgcatgtaagtgttttggaaaaatacacgctatacaccatttcgttatacaacgtttactgtgatgtgaaagatatacgatatcatacacacactgggtgattatagttgctgataaatgtttgattgacatgcttgtgttgataaaaagtagagaagatcttgattaagattggccaaaatgatctcttcttaaatcatcacgtgatcatatgcatctaggatttccatcaaacaatcagagattcagctatacatgctgttaataattaaccattgcttcatttgcaatctgcatagggtgatcaagatttttctggaatcataccattagcaataaaagacgtgttcagtatcattc

SEQ ID NO: 147498 - DNA, 1155 bp, Arabidopsis thaliana landsberg
caggttacttaataccgaaaggatggtgtgtattggcattattcatatcggttcacatggatgaagacatttatgataatccctatcaattcgatccgtggagatgggacgtacgtcaccatttccttttagtataattattttgcttcagagttaacttcatgatcattagtttagcttcttcttatcaaatttcatctactaatacttgtcttaatttattatgtaacagagaattaatggatcggcaaacagcagtatttgcttcacaccctttggtggtgggcaaaggctatgtcctggtttagagctgtcgaagctcgaaatatccatctttcttcaccaccttgtaacccggtacaggtagaaacccatgatttaatattgaaaatgttttttcatcaactaagtataacttgtgttagtccatattgatatcttgagttggccaaggccatacataattcattccaataacgtatcaagggatactgtaatggactagataagtccaggtctgattttaacaggctggtcttaaatagactgatccatatgaaatggtctacaaaagtttaaggtcttttttggtctacagttcgcaaacatatactaccgaatttgagcctaaccatctctatgttgcgactttcaactgcattttgttatactttgtgattatatatatatgatactaattgttatgtactaatgtacatgtagttggacggctgaggaagacgagatagtgtcatttccgactgtgaagatgaagcggaggctcccgatccgagtggctactgtagatgatagtgcttctccgatctcacttgaagatcattaatagatcatttcaaagaacaaaactgtttgtgcaaagaggaagcagagaagtaaacaaatgatcttattaacaaatagtagagaagagaagcaaacaagattggtgggtaagacagaaagagccatacgtacagctagtgatggctcaaagatgagagattctaattataattttttttgtttgtcatgtcaaattataagcgttggttaggttgtccctttctcttttatttatcgtaccaaacgcaagttgagatatgattccatatatatggatgatagatatgtatattaatatataccttcttcttt

SEQ ID NO: 147499 - DNA, 1894 bp, Arabidopsis thaliana landsberg
atctcatcttcatctctttgtgaattcttttattgtttgtcgtgcaagtaacaaagatcaagatgatatcaagattttctcttcttctgttcttgttcttggtcatagttcctctatcaaaatcttcaatcttcaaaaccttcatcaaatcctctccttcctcagtcgtcttccctctctccggcaacgtcttccctctcgggtaagcacatcaatgttttctctatcttgttgataatacaaaaacaaaccaaaaaaatcattttttgtaactttttcctctgtttctgtagatactactcagtcttaatgcaaataggaagccctccaaaggcatttcaatttgatattgataccggaagcgatctcacttgggttcaatgtgatgctccttgcagtggttgcactttggtatgatttcttatctttgttttaagaatttaacttcattctcttcttcttatgatctcggttttgttgttttttgtagcctcctaatcttcagtacaagcctaaaggaaacattatcccgtgctcaaacccgatctgtacagctcttcactggcctaacaagcctcattgcccaaacccgcaagaacaatgtgactatgaagttaaatatgctgatcaaggttcatcaatgggtgcacttgttaccgatcagtttcctttaaaactcgtaaatggctcgttcatgcaacctcctgtagcattcgggtgagctaggaaatagacatgtgaatcctgagatgatgaaaatgttaaatttcttgaaagaaattttttgtgtgttgtcaggtgtggttatgatcagagttaccctagtgcacatcctccgcccgcgactgctggagttttgggacttggaagagggaaaatcggtctcttgacacagcttgtctccgcgggactaacaagaaatgtggttggacattgcttaagttctaaaggtggaggctttttgttctttggagacaatcttgttccttccattggtgtggcatggacaccattattatcacaagagtatactttcttctttcatatttgcctcgacccgctttagagagattatattgttgtcttatagtactgatgattcatctattcgtgttcagcaaccactacacgaccggaccagccaatcttctcttcaacggaaagccaacaggtttaaaaggacttaaactcatttttgacaccggaagctcttacacttacttcaacagcaaggcataccaaacaataattaacctggtaattcttcaagaaacacaaagacttaagaaaattgtatgaaacctaatgcatcgatctctttcgcgtgttaacagatcggaaatgatctgaaagtctcaccgttgaaggttgcgaaagaagataagaccttaccaatctgctggaaaggagctaagccctttaaatctgttcttgaggtcaagaactttttcaagaccataacaatcaacttcaccaatgggagaagaaacactcagctctatcttgcacccgaattatatctcattgtctctgtaagaatatcgacacacccaaaatctcattcatcactttcaaagaagtattctagtgaaatttttattgtcttgttcagaaaactggaaacgtatgcttgggactactaaatggaagtgaagtaggattacaaaactccaacgtaatcggaggtaacaaccaaacacaaacaacatcaacacttaaacgctaattaatgtttctgtctgaaactaattttttgtttcttttgtcttgttttgaagatatctctatgcaagggctaatgatgatctacgacaacgagaagcaacaactcggatgggtttcttcagattgcaataagcttccctaaacatgacaccatcacaattataataac

SEQ ID NO: 147500 - DNA, 3759 bp, Arabidopsis thaliana landsberg
attttacacaggagaaatgtgatactcaggaaaattcagggaaaagaggagacgtattgttccttccacaaaggccttatatggttctgggatctttgcgtcagcaattgctttatcctacctggagtgcaactgtggaggagacgacacctggtggcagtaatattgacggtactcagtttaaatttgtgtctagtaacaaccatttctttcaactccatttaagtttatgcaagcagattatagaacccaaaagcaaatcgactgaagaaaaaatgcgttgattttgttaggttcaccacctctgctgattagagaggacggaaatgaaaagccgacaacagatgatctgatgcggactctagagaaggtttgtcttggacatatagcggatcgctttggtggtcttgattcgatacacgagtggtccagtgttctctcacttggtgagcagcagcgccttgcctttgcacggttattgctgtctcagccaaagctggcgctcctggatgaatccaccagtgcgttggatgaagctaatgaggtacttgttggttctcctctcatctatcatttagaataatatcatgtacatgtagcgttgagccattaaaattcctcttgatgcccaggcgttcctgtaccagcaaatccagtcggctggcattacatatataagcattggccaccgccggactttaacgaaattccataacaagatcttacaaatctcaacggcagacccgaagagcaatgaacgtaactggcgaatagaggacgtggatgcccaagattctttgtacggtagattgaatcaaaaggaggtgccaagtgaaagctgatcaaaacctgattgattacataagagacagaagcagcaggtaaatctgcaaacgggtgtcatgaaacatataagaaacatgtttggtgtccattttgtatataatctaccagacttgacgttgactgaagatgcaagtaaatagagagattgatacagatacgagtgcaacgaagttctgattaaaaataacacgcgagatgagctaaaaattcaaaaccggctgagtatttatcataagcccaataaatctaacgatgggcccatttgagaaagcctgatagagtgagaaaatgtaacacgactgactcgactcagtcgctcaaagtcgaaaaagaaagaaggcgcaaggaggatggtgacgaaagaatccattgaagtgatagctcagagcattggactctccactctttctccggacgtctcagccgctcttgctcccgatgtcgagtatcgcgtccgagaggtcatgcaggtatatcatcaacttcaactttacttttgccctctaatctcctctttaacttgtcgtcgcaatctccaggaagctatcaaatgcatgcgtcatgctcgacgcaccactttaatggctcatgatgtcgattctgctcttcatttcaggaatttggaggtttcctcttcctctcttcttcttttatttcataccgttgaccctgattttgacttttttttgtatagcctacctctggctccaaaagtatgcggttcaagagagctcctgagaacagagatctatacttcttcgatgacaaagatgtcgagctcaagaatgtaagcttcattgattggccatgaatgaagaagatggtgaaatgttgtttattgttattaagcttcccttcatggtctcttgtgcaggttatcgaagctcctctaccaaatgcacctcctgatgcatctgttttctctcattggttggcaattgatggtattcaaccttccattccacagaattctcctctccaaggtatttcttttgtcttcttttgcatcacctactacttctccttctaatccctcttccatgacaatttgtagccatatctgaccttaaacgatcggaatataaggacgatggcttggctgctagacaggtgctttctaaggaccttcaggttattttactcccttctttttttgggtctttacctcgctctttgaatgctatataatccttgcttgctctcgatgcagatttactttgacaaagtcacggagtgggctttgactcaatctggctccaccctctttagacaagcactcgccagcttggaaattgatcctggactccacccattagttccctttttcacttctttcatcgctgaagaggtttgtctttgtaatccaacacttctagtcttgacttttattctaacttgaccacattttcactactttttttgtgcttgcaatttctccagattgtcaaaaacatggataattatccaatcttgttggctttgatgcgtcttgctagaagcctccttcataaccctcatgtacatattgagccatatgtaagttttgtgcgcacactttttttttgtttttttttgtttctcttctcccttctcctccttctgttgacttttaacttgttgtattctgttcagctgcatcagttgatgccgtctattatcacttgccttattgccaagcgcttaggaagaaggtcatctgataatcactgggacttgagaaacttcactgccagcacagttgcttcaacgtgcaaaaggttaatgttacattcttgctttgtgatttcatgcatcttatacaaccatataacttgcaatcacattagtgaactttttacaggtttggacacgtttatcacaatttgttgccacgtgtcacaagatcactgcttcatacctttttggacccaaccaaggcactcccacaacactatggggcaattcaagggatggtagcccttgggcttaatatggtacttcctcttgatgcttcttgattatcataacgaagagtagcactttaggttgtgcgtctagaatttttacataagaaagcataagtttaaaactaatagtagcatgatccgacatcctcgataaagttattaaacctgcaattgaaccttaggatatatatcctttggtcgtccgtaagtattttcttgctttatacctttgtctaggttcgctttcttgttctcccaaacctagggccgtatttgctgcttcttttacctgaaatgggacttgagaagcagaaggaagaagctaagaggcatggggcttggcttgtttatggagcgttgatggtgagtatgctttctagtttgatacagaaattagaaaacttgtttgctttcaatctcgtgttgcaaaacaggcaggagagcatataaactttaactttccataggtggcagctggtcgatgcctatatgaacggcttaaaacatctgagacactgctgtctcctccaactagctctgtctggaagacaaatggaaagctcaccagccccaggcaaagtataaaatctggtctcattctttttttttcttttggcgttctaaacacggagatacgcgttcttaaataatttttttcttcggccaaggtaaacgcaaagcaagcagtgacaacttaactcatcaaccaccactgaagaagatagcagtagggggaattatacaaatgagctccacacaaatgcagatgcgcggaaccacaacagtccctcaacagtcccacacagatgcagatgcacggcaccacaatagtccctcaacaattgctccgaagacttcagctgctgcaggcactgacgtcgacaactatctctttcctctttttgagtattttggtgagagcatgcttatgttcacccccacacatgagctcagtttcttcttgtaa

SEQ ID NO: 147501 - DNA, 435 bp, Arabidopsis thaliana landsberg
atggctctttcgttagatactggagtaccatggaatatgtgtcaacaagcagatgctcctgatcccatggtgagtttttaagacttcaagttcttggataggtagtgtgtcagatttgtggtggttagtctttgtgattgagacattctttctatttgtttgtgtttcttggtagatcaacacatgcaatggtttctactgtgaccagtttacacctaactcaaataataaaccaaagatgtggacagagaactggagtggatggtgagtctcttacttttttaccttacgaatttgtttgttatcaaggatggcatttgactcactttcttgtatattggtaggttcctcggttttggagatccttctccttacaggccagtcgaagatcttgcatttgcggtcgcgcggttttaccaacgaggtggaactttc

SEQ ID NO: 147502 - DNA, 1081 bp, Arabidopsis thaliana landsberg
ctaaacacaatccaaaagtatttttaagctttcacatacgagagaaaacttagaaaatgagggcaatcgcagcttggtttttcattttctgttaccttgttccctctgtttttgcgcagctccggcatgggttttacgacggtacatgccctcccgctgaatctatcgtgggtagagttgttttcaaccattgggaccgtaaccgaacggttactgcagcattgcttcgtatgcagtttcatgattgtgttgtcaaagttagtaacctagcttctccttgtgtgtttttatatgtatcatgtatgtatggtatatcgtaaactagctaatattttgaattcttgtgtagggttgtgatgcttccctcttgatcgacccaacaaccgaaagaccatcagagaaaagcgtcgggcgaaatgcaggggtgagaggtttcgagatcatagatgaagctaagaaagaactcgagcttgtttgcccgaaaacagtctcttgcgcagacattgtaactatagccaccagagactcgattgcattagcgggtggtccaaagttcaaagtacgaacaggaagacgcgatggattaagatcaaaccctagtaatgttaaattgctaggaccaacagtttccgtggctacatcaatcaaagcatttaaatctataggttttaatgtaagcaccatggttgcacttattggtggtggccacactgtcggtgttgcacattgtagtctttttcaggataggattaaggatcctaaaatggacagcaaactgagagctaagttaaagaagtcatgtcgtggcccgaacgacccatcagtgttcatggaccaaaatacgccatttagagtagacaatgaaatctatagacagatgatacagcaacgagcaatccttagaattgatgacaacttgattcgcgatggatcaaccaggtcgattgtgtcagattttgcatacaacaataaattattcaaagagagttttgccgaagcgatgcagaaaatgggtgaaataggagttcttacgggagattctggagagatcaggacaaactgcagagccttcaacaactga

SEQ ID NO: 147503 - DNA, 2387 bp, Arabidopsis thaliana landsberg
gaagaaaactctccgtctttttgtaacttccttttgcttcacctgtcttctcctcttgttctattttctttttccgattcaagcaaaatttttcaaggtaaatttactcttcttctcaagctgagtttttttttaatcattggtctcctccttcttcactctcgtacttctcttcttgaagtctctcttgatcgattcgattctacggtctctctcgatccgagggtttttgattgaacttttattggtctctttgataatgaagaaattattcaaccctaatgtcaaattacttcagacgatttcggaaacttgtttattcttatgggttgatgccaaagtacttaactttttgttattgtagactggtcaatttgaagaatgtcgcaatcaaccgtagatgtgccgccaaagggtgggtttagcttcgatctgtgtaagagaaatgatatgcttacacaaaagggtcttaaagctccgtcttttttgaagactggaactaccattgttgcctttgcctttcaaggtatggtttttattctctacatagttttttgtctatagattggatagagtaatagtttcatgggaactgttttgttcttagtcagctgagaactaagttttgtattgtggaagttaaaattagatctttttagaattggttagtcaagaagttgaggcctaagactgagtttgcaggcacagtgattagattgctttacttagtgtgattgtttacttgtatcctgttaaattctttggggtcgttattgacgagcactttcagtttcgcatgatacatctttttttaaggaatgaattttatctacaagtaggttttgcttagtgataatgtggtggttcttatcattagctctctgcctctccgtatagtatagattacagtatccagacgtgtaaagatgtttgtgttagttaatgattgtggaagctatataatgttgattttgatattcgagtttttttgtataggatggtgtgatactaggggcggatacccgagcaactgaggggccaattgttgctgataagaactgtgagaagattcactatatggcaccaaacatatattgctgtggtgcaggaactgcggctgatactgaagcagtcactggtatatatactttctaccttcagtggggcagattttgttttctctgtcaaagaaatcagaatctaactggcataatgcatcacttcatagaaattgatgcttagttatcttggtttctttcttattgtccagatatggtcagctcacagctgcggttgcatcgttaccagactggtcgagactctcgggtcattactgctttgacccttctcaaaaaacatcttttcaggtaaatttgttctttctcctctagaaactcgtcttaaagaaacatagattatttaactgcctaaaattcatttcagctaccaaggtcatgtctctgctgctcttgtactcggtggagttgatatcactggtccacatctgcatactgtaagttatacattcccgacagtatatacactgagaagagattttttgtctgtttgttgttattcatatcacatttgactgtttattttatacgcagatatacccacacggttcaactgacactcttccattcgctacaatgggttcgggttctcttgctgctatgtctgtgtttgaggcaaagtataaagaaggcctaactgtaagtaagccattcacctttcaatatccagagacgttattttcatctgtctgattattcttgtttacaaaatcctctagagggatgaaggaattaagctggtcgctgaatccatatgctcgggtatattcaatgacctgggtagtggtagcaacgtggacatctgcgtgatcacaaaggtttgtcttcaccctactttaacctgtacctttgattaatccacaaatctacctttggtcagcatgttagactcatagtttaacatctcatagacataacagtgaccaagtaaatcgccatcaaacctcacaaaacccaactcttagcattgccattagataaaagcaaaacaccctctccatttggtttagtgcaatcctagacctctgttctgcatgtacatattaagctgacccaagttattcaccaccagatcaaactcttttgcattacatgtgtatgttttgttgcttttgagcttattattggacacaatattggcaaacaggggaacaaggaatatctcaggaactacatggaaccaaacccaagaacgtatgtcagcagcaaaggctattccttcaccaagaaaactggtaagttactctcgaacacacaacaaatatacttgcttcgaaacaaatcgcctttagctggtcgaaatcctcagtt

SEQ ID NO: 147504 - DNA, 696 bp, Arabidopsis thaliana landsberg
gccaagaaggttgactgtgcctgcagttcatttgagaaacaagtcccagttgatgccatcttccagaaagatgtaatgattgatatcattggtgccaaaggaaaaggttatgaaggtgtggttacaagatggggagtgacccgtcttccaagaaagactcatcgtggtcttcgcaaggttgcttgtatcggtgcttggcatccagctagagtctcctacacggtggctagagctggacaaaacggttaccaccaccgtactgaaatgaacaagaaggtttaccggcttgggaaagttggccaggagactcactcagccatgaccgagtatgacaggtaataatactaacgatcttgaggtgtttcagtcatctgtgtagtaagcggacttgtcttggtgttcatatgctgttttctgttttcttttcaatagaaccgagaagcatatcacaccaatgggaggatttccccactatgggatagtgaaggaagattatttgatgatcaagggatgttgcgtggggcctaaagaaacgtgtggtgactttaagacagactttgcttaagcagacgtctaggcttgctatggaggagatcaagcttaagttcattgacgctgcttccacatgggggacacggtcgtttccagacttctcaagagaaggccaagttctatggtagaaccatcaaagcttag

SEQ ID NO: 147505 - DNA, 726 bp, Arabidopsis thaliana landsberg
ccacatttcatttgggccgggtgggcgaaacattccgggtgatcgtgtagacccaattttttcggtggaaagtgcaaaaaaaatgcaattggtggatgtcgtcgcggttcgaccccaagggatttggccggtaaaattattgggagttgtctttctcttgcactctctctagttccaaaccctagcaattcctctgttttcaccattttcggagattatcaccttctccccgattcgccgccttgtgattacatctacgtaaagagtttctggtagaaattttccctcttttagctgcagattggcatcagattccgttctggatgtgtcggtgatcgattttccgcgtcggtgatgatagctaacggattcgagaatatggataaagaacgagtcaggaaacgtcctcgtatgacctgggacgaggccccagctgaaccagaggttgctcctctttcttcttcttctttttttaattaatctttgacatttagaacttcgaattagggtttagaatgtggaggaaagaccgagcatttatgtttctttggtgagattttgatatgctgacaatgaatgaattttgacttttttgtgataggctaaaagggctgtgattaaaggacatggaagcgatgggaggattttgtcaccaccattaagggacgatgatcgtgatggtcattatgttttcagtttgagggacaatctcactcctagatgtga

SEQ ID NO: 147506 - DNA, 929 bp, Arabidopsis thaliana landsberg
cctgatacctttaactgctgtagccaatagacttgccgctcggtgtattctaccgcttctgctggcaggagttcttggtgcaccaagtaaacgcgaagaattaactatcttcttacgacaacttttagttgagagcaaaaccaaggaaaaccagtcatcgaagcacaacaacgaggttttggatgcagttcgcttcctttggtgcgttttctttagcttccactgtttattatggtttcctgaagctgcttcttcttaccgacgtactcctcaaacataacagcacatttgaggtacaccataacatgatattcggcattttgtgggaaatggtcgttgattccactgcagaactcaaaatcaacgctgctaagttgttgaagaccatcgtaagcttctcaacaacactacacactttcatttttcccccaattttttctaagaagctttgttatttacttgcgcaacaggttccatatatcgacgcaaaagttgcttccgccaatgttttaccagccttgatcactcttggctcggaccagaacctgaatgtgaagtacgcaagcatagatgcatttggatctgtagcacagcatttcaaagtcgacatggtaataatgcataataaactctggaattacgtaaggatcttttcttttatgcgctaattaaattgtatatgatgcagattgttgataaaatcctagtccagatggatgcttttatggaagatggatctcatgaggctataatcgcagtcattcgtgcactcttagttgctattcctcacacgacagaacggcttcgagattatcttttgtccaagattttacaactttcagcaagtccaagctcttcaacagacgtaaatcgtcgtcgagaaagagctaacgcattctgtgaagccattcgtgcactcgatgcaactg

SEQ ID NO: 147507 - DNA, 964 bp, Arabidopsis thaliana landsberg
atgggacccagggcccacccagagatgtttccctttaccaaggaaattaagtatgggaaacgggatgctcttaataatcagccatttgctagagatgaaacagcgttgccagtttcttctagacctacagatccgagattagaaggttctatgaggcacactggctccattactgcactcagggaattggtatgtatctccttagtgcggatactgttgattgatatggttgcttgcttacattcacatattgttttttctcatctttgattcatctgtaaccaaattccagtgtgcatcggagggtcttgagatggcttttcaatctcagcgtcagcttccatctgacatggtccacagagatgaattacatgctcaggttcgcacccctaaaagattagaacacagaagtgttaaatttttataaaaaaaaatctaagatagacaattttcagttaaaagagaaagattcatgattttctcttcagggccatcagtatatttcatatctattcaattggtttgaagtatctagagtgtagacccctcttgatactctttgtaatatatttcaggttgaaatagatgggcgtgttgtaggggaaggagttggatcgacatgggacgaagctagaatgcaggtaactcaactaaattcttgcctcgggtttattctgatcccatcttttcccttctctgacgttcttacctttaggctgctgagagagcactgtccagtgtgagatcaatgcttggtcaacctctgcataaacgacaaggatctccacggtttgttcttgactatatctatatgattatcaaaataaaaatgtcagttgatatattttaaaaaccggtttcttgttgatgtttagatcatttggtgggatgtcaaacaagcgattaaagccggactttcaacggtctctgcaacggatgccatcttcgggaagatactcttaaa

SEQ ID NO: 147508 - DNA, 3672 bp, Arabidopsis thaliana landsberg
aaccgggcacgagaaatagcgtcagattacaaagagcgaaaagaaggagggcttcttcttccaatttgtgatcggtgctgatcgatttctccatggataatctcagttttcacgatggtaacatcttcaatctcctccacacaaggtcccaggacccaagtcatgtacgtctccccccaatctttcttctccactgcgtcccattggaattcgttttttttccctcattgctagggtttttagctacagtgctcgagtttgatctatggaggtgtttaatttatagttgaatccttgaatcaacttttgtcaattcttgcttccaattgaatttttactctctctggcaatgtttgtcgactgttgtatgtgtacgaggtagatcaaagaatgcagtttcactcttccttggttcggagactttctcatgagcaagaattggaggttattactcaatctttgactatcttcattctgcttgttgctctttccttaagatgtttttgttgtgtgtggcagggacatcaaggctgtgttaatgctttagcgtggaactctaacggttcacttttgatatctggatcagatgatttaagggtatatgcaatttttttttgttgatttcaagtctttgtgtcagttagttgagcttgtttggtttgggaacaaacgtgtatcacttgtatctaattttggatgggattgttaaagaagtccatttaagcatctaatttctctcgcctggtgctgtatcgttgccttgtcttgacatttatatcttcttttaatttgtagatcaatatttggaattactccagtcggaagcttttgcattctatagatacagggcatactgccaacatcttctgtacaaagtttgtccctgaaacctctgacgagcttgtggtatctggtgctggagatgctgaggtatataaaactacaccttttgggttttgcattcatttggctttgcatggtattcaggtgacttttacttttcttttgaggtgtgtgcatatatttttcctatcgggtaggttaggctattcaatacatcccggttaagcggtagagcagaagatgacaatgctattattccatcagcattgtaccaatgtcacacacgaagagtgaaaaaactagctgtaagaccctcttaatcattatttgggtctatcattttgagctgtttgcttaacagatgtttttaccaccatgtaggtcgaacctggtaaccccaatgttgtatggagtgctagtgaagatgggactttaaggcagcatgatttccgggaatctacctcttgtcctcctgctggaaccgctcaccaagaatgccgcagtgttctggtgatatccaaactgtggttacattgttttcaattacgtttgtatttctctagtacttccatcttggctttaactttctcaaaaacagtattttgatacttgtctataatcagagtctttttgtggatgtttgaatatcatatgagccctatctggatactttgtagacgtatagttataggtgtggctcttatgaaaactttcttctgcaaatgaaagttgttgatagctctgaattttgcagcttgatctgcgcagtggtgccaaaagagcactagctgatcctccaaagcaaactctctccctgaagtcttgtgatataagtgccacaagaccgcacctacttcttgttggtggaaggtatttgcttccatgtttttggatcagagttctctccttatttcttaactaacttgctactctcttttttcatctttggcagtgatgcatttgctcgtttatacgatagaaggatgctcccaccgttggcatcaagtcggaaaaggatgcctccacctccgtgtgtcaattacttctgtcccatgcatctttctgaacgtgttagtttagcctgattgatattaagatactctactagttcttagttctgcattgctgttttcttggtcaaagtgtttcccaagctcactgtctgctacatcttaaattatttcaggggcgaacaaatttgcacctaacacatgttactttcagtcctaatggcgaagaagttttgctcagttacagtggggagcatgtctacctgatgaatgtaaataatggtatttgcagttgagttgtttgctgcttaaagcttaaattccgtgaatagttaatcgtgcagtatgaacttgaatttgttaagaaaaataattgaacttcatattgaaatattttgatttatgtcgctttgttttctttttttttttcctgttcatgcccctttcagttctgctaaagacattgtaatcctgcatgaaaaatttcgatggaacatttggaaagttattgatattctctgagatttcaaatggatatgctattatgtggcccttttaaaaattggattaaggatgatggatgtgttagcccaccagttttttgcttaccttttgttatttacatttgtactgccaatctgtacttcaccacttagtttagaaatatttttctttgctagttatcttgttttaggcaccttttcgcattgaaaatgtcagttttcctaacattttggtactttgacttaagctcaatatatgatgattcattcctttgtttgtgacttgtaggcactggaatcatgcaatacacaccaggagatgtagataacttgttttctttcagtaacaacctccacgatgtagaatctccacctcaggtttccaccactcctcaaaatggctttcacagaagtagcaatgctgcaacggttcgcacctccctctgtaattgttccatatggtgaccttgtcattccatattcttagtgcatctgacgccgttcttttcaggttaagaagtgtacggaattggtagaaattgctaaatggtctttagaagagggtacagatgttttctatgcaattgaggcagctaatgaagttctggatgctcattctaatgatattgagtctgcgctaaggcatgaatgcctttgtactcgtgccgcattgttactcaaggtcctttagaactggtgtctataactagcttgaatccctacattactcctctctaataaccacaatcagctgattcgtttatttttcagaggaagtggaagaatgatgctcatatggccgtaagagattgccataatgctcggagaattgatgcttcatcctttaaagctcattactacatgtctgaagcgctgcagcaagtaaattcatagctctgatcacagttaattttaagtttactatttgacatagagatggttctgcaataagcatttattttagtcacccttccatttcatatacatatgtgctttcacgcagttgggaaaatgtaaagaagctctagattttgcgactgctgcacaacagatgaacccatcagatgccgatatagtggcaaaagtggagagcattaaaagggatcttcaagcaggtttgtgccaactgatgtatgtcttttcctgcaggtttgcttagtaacagatgttatctactttcctgctgtttctgttttcctctatgagctaggatagaggttcaagatgtttctgcttagatgtttttgttttttgtttttttaggctcttcaatgagttataaccactcgtttctagtaatcaatgtggacacatga

SEQ ID NO: 147509 - DNA, 1504 bp, Arabidopsis thaliana landsberg
ctcgcagtacatattgaagcggtggacaaaagatgcaaaaagccggcatttttcaggagaacctcagcagttgcagactaggctgctgcggtataacgatttgtgcgaacgagcattaaagctgaatgaagaggcatccctctctcaagagagttacaatattgcattccttgctattgaaggagctataggaaactgtgctggtattaatacttccggcagaagtcttccagatgttgtaacgtcaccaactcaaggtctgatttctgtggaggaggacaaccatagcagaagtgcaggcaaaaccagcaagaaaaagaatccaactaagaaaagaaaagtaacttacttgtttacgatctctctgtgcagacagcttatggattttgttcgctttgcgcttttatgctttgcaaatttgatgataccaaatactaatttcaggtgaacccagagcaggatgttatgccagttgcagcgccagaaagcttgcaacagatggtctgtctttgttgacatgtcgtggcaagcctcttttaaacacaagtcgcctaagtatgtcatatctgaattttgtaattgcaggataagctgagcccaaggacggttggcattgaaagctattatggaacacagcagagcgtacaaggaatggtaattaagcacaacatacgttcatattattatctagatacgtatgtaatctgttttgatatgtgtttttacaggtccagctgaacttaatggggccaactcgcgataatttctatgggaatcaacaaacaatgcaaggattggtatgaaatcgaccatgacatgtgtataagtagcttctgctgttttctatttcattaactttggataaaaaaacaattccggctggttttctgtagcgacagttgaactcgatagcaccaagctacgacagttactacggtcctcagcaaggcatccatggacaggtacctacatacctattctcgatgctttcataagttttgtcaatcttgtaacaagactgccaataaagtaaaatcttactttgttctttctagggagtagatttcttcaggcctgccaatttttcttaagacatccgggtaactattgcagttgtaataaaagatctttctttttcctgtttgtatcaattggtcatcttagttcatggtgatttctgtgcaggatgatcctaatgtgaggactacgcagttgcatgagtacgcgtctagacactcgtaaacaaaactataagttaaccacgaatcaaatcttaagagtcgtcagtctgtggatgaaagattcaaatctcggagaacaaaagccaacgagcactaggacgcggttaggtttggaacagaacatgagccaaagctctgttttatcttctcaagtgttaaaaataggatgttgtattgtttcgcctttattatcagagattcgattctgttaatattgtttgtattagctctgatgatcatatgttgatcattgactgtcgatt

SEQ ID NO: 147510 - DNA, 1073 bp, Arabidopsis thaliana landsberg
agggaattaggggataagaaaagaaaactgtgtggatctgaaagtggaaatggagatggttcgatgagacctgaaggcgaaacatgttcgggtggtggtggaagcaaagcaacggaacagaagaacaaacctgagccaccaaaggattatattcatgtgagagcaagaagaggacaagctactgaccggcatagtttagcagagcgagtaattcttctgctaaaatcaccataaattttatcctcaaaaactgttccttttattagaatcacaatgttgtctttgacaggctagaagagaaaagatcagtgagaagatgacagctcttcaagatataattccaggatgtaataaggtacatgttcttttggtccctgcttgtgaatgatgttattatagcctaaaaaacattcaacaagatatttctgttgatcagataatcggaaaagcccttgtgctcgatgagattatcaattatattcagtcattgcagcggcaagttgaggtaaaagtcgttaacacctctctgttatatgttacaattatacatgcctaagcatggagtttggtctgcagtttctatcaatgaagctagaagttgttaactcgggtgcaagtactggtccgacaataggagtttttccttccggtgatgtaagtcccgaatctaaagggacatagaaggatcttatctttcttaatcaaagctactaaatctaaaagctcttggtgtgttgtatcagctcgggactttaccgattgacgttcatcgaacaatatacgagcaacaagaagctaatgaaacccgagtatctcaaccggagtggctccatatgcaggttgatgggaactttaaccgaaccacataaaaaagagtctttctctgattgatggatgtgttttgtaggcagtaaaaatgaatgcaaccctttattttttatcctatgcgtgtgtatcattttgctgttatatcataagatagaatatgagagtgaccagagagattaacactttataaaacactgttgtattgtcctattatataacttgtaacaattgattcagtaacatat

SEQ ID NO: 147511 - DNA, 738 bp, Arabidopsis thaliana landsberg
cctatcacgaagctctgtttcgctggaaagtctgagttccttgttgctgcatcccatattccaagacctgaactatctgtttggaatacatcaaagttatctttatcatggtcatatgggttacgcatagaaggtcagtattataatgcttctttgatttccccatgaaaactcttgctgtggtttacttagaaaatgcttgttctcgttctatagctgtcacctctgcagtggattcgtcagcatttgcagtcttggctgtgatcccaaaaacttttaaaacagatgaatctaaggagaacatcttccgtggtagagatggtgccattcttttgtttaacggatcagatcccaagccggtatctatatggactgtgatgaaggtatgacataagaaatagcccgttagtatttaaccttggagagacaggaaagaatccaacgagttaaacaatgtctaaattgcaggctaggggaggatcaatctcatttttagaaggagataagtctcagcttcgccttgcatatgtaaatggaagccatgaatatgttgtctttgatcccaatagtgatgagtcacatgagcgtagcgctgttgactactatggtcttgctggtctggaagagacaggtagttaaaacttataacatatttgaaagaacctttgttgattataccatgttactaatccgaaaagttttaaccttttaggagacgccgggtacactatccttata

SEQ ID NO: 147512 - DNA, 648 bp, Arabidopsis thaliana landsberg
tcgctgcgctgtttcaagggttttcgtttttatcttttcctccgaagaagaagataagaggttgaagaagaagaagatgccaggtccagttattgaggaagtgaatgaggaggctcttatggatgccattaaagagcagatgaagctccaggtattgtaatcttcttcttctctatttgttttttaagagaatcgatttttgttcgattttgatttggtttgtgttatggagcagaaggagaacgatgttgttgttgaggatgtgaaagatggagacgaagacgatgatgatgttgatgacgacgacgatgagattgctgatggtatttttactcttttactcgatttgattgttttcgtttggtggtttagggatgtttctggaatcatgttgtggatttgtgattgaatcaatctgtttcgagtctggattaggttttctaggttttgctatgtatgacatttgttagggttttgatgttgttattgttgttgttgttgttgtttatgtgaaggagctggtgagaatgaggcttccaagcaaagtagaagcgagaagaaaagccgaaaggcgaagctgaaactcggaatgaaacctgttactgatgttagcagagtgactatcaagagatcaaagaatgtaagtaa

SEQ ID NO: 147513 - DNA, 2203 bp, Arabidopsis thaliana landsberg
tacacgcatttctataaatatgcattgctttcttcacgacaggaaaagaaaagccaccatcagatttggttgaccttcttgtccaggcaaacgtgtatgacatggcattcgctgttgttttgaaattatggaggggctccgctttgaaaaggtatatttcttgctttttatcttgagaagtcagattccttgagtattatgtaggtttaagaatgactgctttttctcagggagctgaaaaagatatttgagaatatggcaattatatgttgccctgataaaggaactctgtggtcatcgtgagtgactgttcattagttgcttggtatttcattgattacgtgttgacttacctgacttataaaaaatatcattaatatatagctttatttatcttacaaaaatgatgtcaggcctaatcttatgttaacatctaacgatgaagaagttactcattcgcctgatagaagccctgctgatcagggctctaagttggctggtgattgggaaattcttgaggtttatctggtcagtaacttctgaatccttgtctggaaatttcgtttttctctatttcaattggaatctattttcttaatactctggattttgggagcattgaaaagtgtttggaatgtctttgtgagcagtattaatccagaaatctgtccttacttgctctgaatttaaatggttatatgatacaccaaaatggcatcctaattagaggcatatctttttatcaatagtatttttggtaactgaaaccagagcagcagcccctcttcttgtcaacgagacctgcatgcattgtcactatcctttactaggagtgtaattggttcgctcaagtgtgcctgaagatttgtaattggtgcttggagggtttggaaattttcctttactgggagtgaattgtaaccttagcttaggatatgtgctatgtgcttgagggcttgcaggtttttcattatttgttccttgaaatgatgtgtgtattgaatatctataaatgcagaagaggtacatagacatacacgctagactaccggtttctgttgcttcaacccttcttcaagcagattcttgtatcgaattgcctctctggctgattcaaatgttcaaggtaatatttttggatatatgttacatattcttagcggatcacttttttgtatgcaatatagatagttcaattcatttaggtagctttgaaatcttggcatgcaactttgaatatgggtttgcgacatctttgatctaaataattaacatgcgtgaacaatgttgcattagtaagccttttaatacactatcaatatatctatatgcagattctagagtagatttttgtgttgttgtatatcatgttagatcatttcagtgcagagatgtttgacacagcatgtctgcttaatgctgaagagattgtatctaatatctcaatggaaatattgttgttcgcttgttccttttcatttacaccatggaaagaagcaatcatttgtaaggttgttatcttctggtttcattcaagttgtattgaccaatttcttgtgccttggacaggatggtcagaaggaaaaagctttgggaatggctgggcacgatgcaagtcctgcttccttgtttcagttatatgttgattatgggcgtcttacagaggcaactaatttgctacttgagtacatggaatcatttgcttcatcggtgagttatgatcaatctggggagactgtttgtcagattataagcatctcgccacaggatacgttgttatccatgttaggatttgtcgtttcgctagggttttacagcttatcatggtcaacttagagaacgtttaagatgcaagaatctcacgcaaaacagtaacacaaaaaaaggttgcagattacaccgttaaaaaacattagactaagcatgagtttgcatttgcatcgacattttcttgttaatagactgtgatgagcatgattcatatgttaggactgaattaaccttggtttttctctcttgttaaaaacagaaaccagcagaggtattgaagaggaaaaaggtatccggagtttggtttccgtacacaacagtagaaagactatggtgggagctagagaaaacaatgaactcaggacgaatggtggagcaatgccataagctgaaggaacaacttcatcatgcattactcaatcacttaaaactg

SEQ ID NO: 147514 - DNA, 385 bp, Arabidopsis thaliana landsberg
ccgtgtttcctcttctctgcaactcaccggttcgccggaaaactctacgccgtcgccggattttgcaccaacgaaaacttctttaaactactttcttcattattcttctgctgagtttcaaaaactcagccatgggtaattgtatcgcctgcgtcaagtttgacccagacaactcaaaaccaaaccagaagaagaaacctccacggggacggcaacgaaacccatacgacgatcccgatggtttaagaactcacgcaccgttacgtgtgattcctatgagccatcaatctcagatcagcgacaagtacatcttaggacgagactcggtcgcggcgaattcggaatcacgtatctttgtacagatagagagactcgtggggtacga

SEQ ID NO: 147515 - DNA, 414 bp, Arabidopsis thaliana landsberg
ctccgtgcaggaagagcatgactgctgcaattcgtgtgaggatgttcgtgaagcatatagaaagaaaggttggggggttactaatccagatttgattgaccaggtaaattgctaagaaaaggttcttcgccttttaaattcctggcatcactgcttcaatgcgatagtagcaagttttgtttcatttctttcttcttgtttctttttcttattctttgttagagtctccaaggcttgtgtgcgttttgtttagttagtatgcacttgggaggctcttaactgaactatgcttcaaagagtttccatcttccagctgcgagctgaaatacttttcacttacccgtttgcgattcagtgtaaacgagaaggttaactacaaagagtaaaggatgaagaaggtgaagggtgtaatat

SEQ ID NO: 147516 - DNA, 1766 bp, Arabidopsis thaliana landsberg
gatcttctccagagagccatagatcgaaagaaatggcatctcctgtttcttcacaaaagtttggctctttgtctgcattggacactaggccaggttctgtctctaaaagactggtaggtacctgatgtcctgatctatcttgaatgtctatcttcttctctgttgtttgtgtaatgtttgctttttccgttatgttgaacagctggatgacctagaagagggggaaatagcagcatcaggggattctcacatagatctccaacgatcaggaagttgggcccatgaccgtgatgaaggggatgaagaacaggttctgcaacctacgataaaacggaaacggagtattcgtctaagaccccgtcagacggcagaaagagttgacggtagtgagatgcctgcagctcagccattgcaagtggatcgtagctaccgatcaaagttaaggacagttgttgactcgcatagttcaagacaagatcagagtgattcgtcctcgagactaaggagtgtacctgcaaagaaggtagctagtacttccaaactccatgtctcatcaccaaaatctggtagattgaatgctacacagcttaccgtggaggataacgctgaagcttccagagaaacatgggatggaactagtcctattagctcttcaaatgctggtgcaagaatgtcccacatcatacagaaacgggtatgttctgttaaatggaatttacttcattgtaacattcggttgatattttttggtgcatctattttgtttcgttagtctgaactattttggtcctggactttgcagtgcaaaatcgtgattagcaagctccagaggagaatcgacaaggaaggtcagcagattgtacctatgctgacaaatttgtggaagagaattcagaatggttatgcagctggaggtgtaaataaccttttggaactacgagagatagaccaccgggtagaaagactagagtatgcaggagttatggaactcgcatctgacgtgcagttaatgctaaggggagcaatgcaattctatgggttttcacatgaggtttgatttttgcattgtaaataaaaatgaattccttttgctgtttgattgaaaagccaattggatttaaaggtgatcaaaattttcgcaggtgagatctgaagcaaagaaggttcacaatctgttctttgatctattaaagatgtctttcccagacacagatttccgggaagcaaggaatgctctttccttttctggctcagccccaactttggtgtctacaccaaccccaagaggagcaggaattagccaaggcaagaggcaaaagttagtaaacgagccggaaaccgagccaagctctcctcagagatctcaacaacgtgagaactcaaggatcagagtacagataccgcagaaagaaacaaagcttggggggacaacaagccacactgatgaatccccaatattagctcatccaggggaattagtaatctgcaagaaaaagaggaaagaccgagagaagtctggtccgaaaacccgaactggtggctccagcagcccagtttcaccacctccagcaatgattggtcgtggtcttagaagtcctgtgtctggtggagttccaagggaaacaaggctagcacaacagcagcggtggccaaaccaacccactcatccaaacaacagcggtgcggtcggtgattctgtgggatgggcaaatccggtgaagaggttaaggacagattctggtaaaagacggcctagccatttatag

SEQ ID NO: 147517 - DNA, 2102 bp, Arabidopsis thaliana landsberg
caaaggagaaattaaaaaaccagagagattaaaatggaagacgatgaagcgacgaaacagcgaggaatacttgaagaagaagaagaaaattttactggaagaagagaagaaagtgaaaacgagtttccctcacatcatcctcctcctccgcctgatgaggtaaattttgagcttaatttgctcactcttcgttgttgttgaggtagtttcattgtaggaaattgagcgtcaatggtactttgtgcaattaggggtttttagttggctatttaagagtagtttttagatttaaagttgtgatttttatttgtgtagagagtgatgtttcttattttctgtgttgtgcagttgtttgacatttcgactacagttgatcctagctatcttatttcactgataaggaaactccttccaattgattcgggaagtgacgaacgacataatgatcatatgattacggataatgtggttcaaggtgtagtagctatatctggaaatggggttgttgagacttccaatggtgatccagagagcatggacattggagataatcatgatgaatccacttatgaggtgggggagacggttagttcatgtccagcgccgggaatgcaagacgggtcatcggcatgggaagatcatggttgtgttttgtgggatcttgccgccagtagaactcatgctgagctaatggtaaatggatttatactttgaagtaatgcctttatatattctttactctggattttgaattgccaagtagtaacgttggtttaaagttgagtttagaccaataggaaatttggggcagagttgttgaaaaagaactaattggtttccatgtagataaaagagcagcttggttccgtatagtggttttggaaatgtactacagtgctctatctattgaatccatgtagtggagttgagacctgaagttgtaatgctttggctttgcaggtacagaacctaattttagaagtgcttcacgcaaaccttatggtttcaaaatctccccgtattcgagtaagtaactcagtgtatgtatgataagtctaagtcatttctaactattgttgtcttcttgaattgactttaatttttacatttctttttcgttttggggcttgctaggaaatctgtctcgggattattgggaaccttgcttgccatgaaggtctgttgaaacatatagagtctacagccggaatcgtcaatacacttgtggggcagttgtttcttgatgatacccaatgcctaagtgaagtttgcaggtaaaacaataaatttgttacctcaaatgtagattcatgcttgattagttggctgggttatctaactatccgacatgtatctccaataggatactcaccacaggactctctggcgctgggtgtacttcctgggcccattgtttggagtctgatgatatacttcgccatattttgtggattgcggaaaataccttgaatcctcatcttattgaaaaggtaacttctgaaatttgttcttgtaacttagtcattcttgcactggacgacttgattgttgaaaggttgatcgaagtggtgaattttatttaatgaactctgagttaatgaattttctgaaattctctactttatgcctattcatgtccctccaccatttcctgtaagttttagtttatcatggtttttcttaatttgctaattcatttctattttaccatagagtgtagggctattgttaggtatcatagaaggtcaacctgaggttgagcagctattgattcctccactaatgaatctgggtttgacgagtctcttgatcaatcttctttcatttgaaatgagcaagttgactaaagaaagaattccagaaaggtatggaagaacagaaactcatcttaaagatcatcaagtgttagtgaatggcatttctattcttgcaaaaaaaaacaagtgttatgctttactatgtagtatgtacaatgaacccttgtgtatgttttcaggtaccccgtccttgaaattattctccgagctattgaagccctttctgcttcagatagctattctaaagagatttgctctagcaaagactttctcattagtctgtga

SEQ ID NO: 147518 - DNA, 1395 bp, Arabidopsis thaliana landsberg
agaaagagagaaatcttctgagcgaaattctgacaaaagagatgatggaatgggataatcagctacaacccaataaccatcactcttctaatcttcaagggatcgacgttaatggcggctccggcgccggaggaggaatgtacgtgaaggtgatgaccgatgagcagtatgaaactctcaggaaacagattgctatttacggcaccatttgtgagcgtcttgttgagatgcataaaactctcactgctcaacaagatcttgcaggtttctatcctttcttctatcatttagtttcttcttctctgttcatctaaagataaaaaaaggactccttttgaaatttttaaaaaaattcagaatttttgtgtggtttaattgattttttagtgattcttcttcactttggtgtatgggtaattgaaaattctctgccttttaagcatttgttggcttaaatctgattcaaagaccaatccttttcgtggatttttgagctaagaataaggaaaataatggttcttgaggaattctagaatcactcctttgaatctttcaattgagcttcgagaatttcccaccaaaataggtgtttttagcttgatgatgtgttcttgagatataaagtttcagtttttttatttagtttaacttttaacaactctgctcatttgtctgttgttggtaacaggagggagaatgggaggactatatgcagacccaatgatgtcatctttaggtcataagatgacagctagacagaggtggactcctacgccagtccagcttcagattctggaacgtatattcgatcaaggcacgggaacaccgagcaagcagaagatcaaagacataacagaagagctgagccaacacggccagattgctgaacaaaatgtctataactggttccagaaccgacgtgctcgatccaagaggaagcagcatggtggaggttcttctggaaataataatggtgagtctgaggtagagactgaagttgaagcattgaatgagaagagagtagtgaggccagagagtcttcttggtcttccagatggaaatagcaacaataatgggttagggacaacaacagcaacaactactgctcctaggcctgaagatctttgctttcagagccctgagattagctcagaccttcacttgctagatgttctatcaaacccaagtaagtaacaaagatacctttttagttcacacgtaactgaaaaaaacagagacattggctttgaagaaatagtcaagtaagttgtgtctgtctcagataatttcttgtgatttgtgtttgtaggggatgagcatcttgttggaaagatgggactggcggaaagttacaacctttatgatcatgttgaagattatggcatgtcaggctga

SEQ ID NO: 147519 - DNA, 2653 bp, Arabidopsis thaliana landsberg
ttttttttctcttccttcattgtttcgctgttcctgcgattctgaaactcctcaagctttccattcagaatcgtagcaatggcttttcctctttgattttgtttttgatccgtctctctctctctctcattgcgtttaaggggtcgcttttttctcttcatcctcgccgccggcttatggccaactcgccaccaccttcgtcgcgaaatcctccgaagttggtggattgttggtcgtttccgtttcttctctctatggttcctactccctcataatttaaggatctgtatcggaataaacgaaacgatctccggtttcggatttgaatattttgggggaaattaaaagaatggggaaaggttggttcatggtagagaaagctagaagatgcttaaggacggtgttcttcatggttgcgatgttggtctcgctgttagtttcgtctttgcctgtgcttgtagccatcggcgacgttttggttccgacctttttgctttcaagctttacctgtttgacgtgttacggcttcaaggagcatctgagtcgatacgctttcaagagctctttgactgatattcctctcgtctccctcgtcagatctttccttgtcatctgtaagaactaagaaccatcctcctccttcttttctctctgagttttgctttttctcgatatgattgtattcttctgttcatgaacaggtgtctactctctatccgatgctcctgcactttcgcatggcccttaccttggaactgtatcgctgtgttctgttgtttctgttgttcttctatcagtaaaagcttgcgtttttactgcaaattctcaacttaacgaccaagcctcgtcctctccgtcaaggcaaagactccatctgaaaaagtcttgggggatgccagttttgttcctttcatctgtggtttttgctcttggtcatatggttgttgcttatagaacaagttgcagagctaggaggaaactcttgtatcacagagttgaccctgaagctgtgagtttattattatcatcatgctcttcttcttctctttttgctccaaagctttgatctttgtttaacttattgattgtgttgcaggttctttcttgcaaaagtgtcttctctggttaccagaaagtcccacgttctccaattcctttggtaggaaaggcctccaaggttgatggcgaggcaagacgaaagctgcatccttcagtatccaacgatgacggagagctacctgcgagattgcttgctgatcttgacagcttattcattacagtcagagggctcactgtgcattacaagaatttgcacacctgcttctcctcgccactctatctcctcctcagttgaagccaactctatgcttaatatgccagaggcgatggtgggaaggttgaagcttgacaggaatatattgagcatggtcacgagaaacaagctcaaccatcaccaccataggagctacagcagtctgtttaacaattcttcttccttgcacgaccctctccttgatggtcttcctacttctcctcgtcttttcaaagatattcaggaagaatcgtgccgagaggatggcatcaatgtgtccaattttggtgccacggaacagcaagatgttggtggaaacggccaatttggtgtagtgttggtccatggatttggcggaggagtgttttcttggagacatgtgatgagttctcttgcccatcaacttggctgtgttgtcactgcatttgataggcctggttggggattaaccgccagacctcataaaaaggatttggaagaaagagagatgccaaacccttacactctggataatcaggtgaagttctgttcaattccggactatgtttattacttatgagagctttttgtctttgctcttagaaagaaatgttaaaactcaaggatctgttgatgctttcaggtagacatgcttcttgccttttgccacgaaatgggatttgcttctgtagtcttggttggccatgatgatggaggtttgcttgctctcaaggctgcacaaagattgctagaaacaaaagatcccatcaaagtcaaaggagtggttttgcttaatgtaagcttgacgagggaagtagtgccagcttttgcaagaatacttctgcacacatcactaggaaagaaacaccttgttcgtccgcttttacgcactgaaatagctcaggtggtgaatcgcagagcttggtatgatcctgccaagatgacaaccgatgtcttaaggctatacaaggcaccacttcatgtggaaggctgggatgaggcacttcacgagataggcagactctcatccgagatggtgcttccaactcaaaatgcattgtcacttctcaaggcagtggaaaacttaccagtattagtcgttgctggagccgaagacgcacttgttcccctcaagtcctcccaagtcatggcttcaaaactcgaaaactctgtaagtcctccctctctatatctaatcaaacacctaaactctgttgatacgtaactaacattatacatgtcaacaaacagaggctagtagcaatctcaggatgcggacatctgccacatgaggagtgtcccaaggcacttcttgcagccatgtgcccattcataagcagacttgtatttagtgaggactga

SEQ ID NO: 147520 - DNA, 2926 bp, Arabidopsis thaliana landsberg
gtggcagaagcagcatcgttgagaacgaagaagcttgaaaaagttgcgagctcagagaatctggaagtagcaaaatttggcggctttaactcagcaatttgttctgtacatggtattttgaggtgatttggcttcgacacttttctcaacaactttattggtttctggtcactgccagattaatccctctctatctgctgttcctcatcacaagactcgtaattgcgcaacctttttgaatttaagttgtttcttaattcgatttcgaccttctctgagcttagatattcacttctagttactgtttaaattgtttgtataatttgggtactactagtagtgggctttcgagtttagaaaggtttcacattgggagttatagttagctgtgtgtagatatccgataatatctgagtcacatgattcaaatctgagtttaactttctcttgtataattcactctactgaattgtgttcaaagtttcgatttttttatatcttctgttttgtaattccgagattgtaaatgattacttgcagaagagagcattcagctcacagttacgctctgcctatccagcttctaaatctactcactttggtcgagtcatggcttcttctggatctgaggcaaaagctaattacgcacccatatctaccaatgaacctgttgtgtctgttgattggctccactctaatcttggagatgctgatataaaggtaacctgacgttcttgctgtgtttattttcgtctcagaatgcttatagtttgcacttgttgagattgtagcctttttctgccatgattcttatgtaacttgtttgtttcatggtcaggttttggatgcctcatggtacatggcacatgagcaaagaaatccaatccaagagtatcaagtgagaagatttacacttttgtaaataactacgtaaataagctataagcctttgttctgaatgagcgctatgaaacttttcatcagggtcactacacgactgaatgttgattgacttgtatgttgtcctcgtctacaggttgctcatattccaggtgctctcttctttgatttgaatggaatagcagatcgaaaaacaaatgtgagaatcactgtcttttttcttgagaagatgttattgtgttgtttatttctaacttattgactttacagtttacactgccatcgcttatatgtataaatgaaatattatcagtaactattcttcattgcagtcatttgaacatattgttgtttctttgacgcaaaaatctggactcttttctgttcagagattcccattaatagctttggcaagccttctggctgtgagcttctatgtgtctgtatgcgcaacaaccaaaaagtattgtatattatttgaattacatgtgcagttacgacacatgctaccatctgaggaagcttttgctgctggttgttctgctcttggaatcgagaacaacgatggagtggttgtgtatgatggaatggggctctttagtgcagctcgtgtatggtggtgagttatgaatctcatgtccattagcctttttatcattcctcaatatgttttctctggtattatcaaatcgatgagtcctccttttgttaaaacaggatgtttagagtctttggacatgacaaagtatgggtacttgatggaggcttgccgaaatggcgtgcttcaggctatgacgttgaatccagtgtttcaaatgatgccattttgaaagccagtgcagcaactgaggctatagagaagatctatcaaggacaaacagtaagttgattcattcatcgaaaagtttttgccaatctgatgtatctgaaaattgcatatttagttggtttacctgctacatatggtttattcacatctttgccatttgcacagattagcccaataacttttcagacgaagttccggccacatcttgtattggcacttgatcaggttaccgtttcttaaatgaagtttatacatagttgctagtaaactaggggagctaactggataattgacaggtgaaggaaacatcgaggataagacttatcagcacatcgatgcgcgttcaaaggctaggtatcatgccaaaattattgcttgttctggattgtaatttcactataatatgctaatggttttaagttgattccgctcataggatctgatatagaatttactctgtttcacagatttgacggtattgctccagaaccttggaagggtttaccgagtggtcatatacccggtagcaagtgtgtcccttttcccctagtaagccaccgtctaacttgaagggcttaccgttatatctgctctttgaaaccagatatatgataacatattcttatgtagatgtttgattcctctcaaacactgttaccagcagaggagctgaagaagcagtttgaacaggaaggtaaaacaaaatgaagtctcaagtagttgttttatgcaattacttatccgtttatctgcagacatatctctggacagtccgattgcggcctcatgtggaaccggtgtaacagcttgtattttggcattggtaactaaatgatgatctagaattcattcatttactgtgatcatatgataaaaactaaagactgattcctctttattttactggtcagggactttatcgtctgggaaaaactaatgtggcaatctatgatgggtcttggactgaatgggcaactgcaccaaacttgcccatagtgggttcttcttcataagaaagtccaagaaaaagctacaagatcacaagccagtggatatatatttataagcttagcttggttcaatccatttctgtgttaaactttaacaaattgctgggagggttgtattagtattatacatcagtattcaggattcttgagtttggtctcatctttgtggagattgattaaaagtctt

SEQ ID NO: 147521 - DNA, 392 bp, Arabidopsis thaliana landsberg
ttttgattcccaaaacaaaaaactttcttcaattattctattcatcttctcatggcggctctctccaccaccttctactaccacccactctgcactaaccaccgtacaaagagacaagcctcaagcagacacggagttagatctatgagagtgatgtcttgtcggaagcagaaattaccagaagagaatgaaggagtgatccagagaacattgagaaggatgatttcagaggctgggaagattgggaagaatctgaagccagagaagaagaaaggagacgtcaaggacctgatgcttatgagactctcttttgctcaatatgtttatatccctgaactattggtgtgtgcttacttctcctggcaacatctcagcttccccaaatcttcatg

SEQ ID NO: 147522 - DNA, 1057 bp, Arabidopsis thaliana landsberg
taacaaccaccgaaagaatttaatcaaaattgaatgaagctttcttcctctaaactctttggtcaattccttcttctttctattcgattgtgataagatctttctagagatctaatcagaaccttgtgccgcggatttggagaaacatcatcatcatcgtcatagaaatcctgctctttcttcgattctgtaagagttcttcgagcagactctagattcgatttgtttttttccttttcgggtttgtttcaaatcaatctcaatttcagggtaaccaaagtttgagcttattcattttgattctgcccggatctctatacatgtcaattacagtctttttacattttcttgatttggaaaccttttcgggatttaattgattagcttaagattacaagtgatgaaaaaaaagacagagactttagcaaatgttttctctcatctcttaattgctgtcttaattacaatcttcttgtttcagttactgttttgtaagacattgacattataatctacttgtttggagattggaattatgagaagagaatctttctgatgccaaatgtcattgaataatcatttgctaatgtttcttttaccatatgattcatgatctctttttcgttttatgttgcaccgactaagctttgaaatctgcttgttccttgaaaatggaactacaagatgctatgaatgatgagaatgagaaagcccctgaggcttcggtggttcagaatgatgaagtttccgggaacaatggggatgtagtggttgaagctgaggaaaaggatgggaatgaggttgtagaacccgttgattcaggaaaaagtaaggcagatgacgagtttgttgaaagtctgttggataccaatcaggatttggctaccttcaaaataccggtagaggaaaatgatacggaaaatgtgactgttgaagaaccttctcttcctgcctctgttgaagcaacttcttttgggatgaaaaagccttcaggtttaccagccaatactaatattgttaagaaaggtaagacgctggtaaaaggaaaattataaag

SEQ ID NO: 147523 - DNA, 1052 bp, Arabidopsis thaliana landsberg
tcatgggctcgttctctaagcgtagcatcatccaccacttcagacccaactcgccggtccgagtttgactcagactggagtttctcaccggaaagacttacttttcccaagccattaagtcaacgttggatcggtggacttgttcctgagaatgatctaaaggtgtttactttcaaagagctgaaaatagctactaaaggtttcaatagaggtcttttgattggcgaaggagggtttggttgcgtttatagaggtgttgttgatgtttcagactctaatggttttgattcgaagattaatgttgctgttaaacagcttaatcgtcaaggtttacaggcatgactctaatctttttttgtttactctgttctgctttcaattagtctcgaaaatgtttcaactttgagccagtttggttcaagaaactttactttgtggtttgtgattgatctgtcgaagtgggtctgttgttatgtgtgtgtatgactctgttaaagtttcaagtttagtgagctactaccaaatttgaacttaaaaggagaaactttactttatggtttgtgattgaattttgaattatgtgttgtgattggtttgtgtgtgtggctttgttctagtgttcaggggcataaggaatggatcaatgaggtgaattttctaggagtagtgaatcatccaaatcttgtgaagttagttgggtattgtgctgatgatgatgaaagagggatgcaaaggcttctagtctatgaacttatgtgtaataagagcttggaggatcatctcgtaggccgagttgtgtcggtatctctaccgtggatgatgaggttgaagattgcgcaagatgctgctcaaggcttagcttatcttcatgaagaaatggattttcaggttaagcatttcattgccatttatatgatttaagagtgttttgtgttttggttttgaatttgcttctgttgatcttttagttgatatttcgagatttcaagtcttcaaacatcttgcttgatgagaaattcggtgcaaaaactatcggattttggattagctag

SEQ ID NO: 147524 - DNA, 806 bp, Arabidopsis thaliana landsberg
  unsure (1)..(806): unsure at all n locations
gatgtgatttcaaacaaacctttaccagctcttctacagcacggagagattcgtcggagatagcaaacatggagaagaaacgcgaaggagtaatcgaaggaatgagtcggatcgtatcagatccttactacttcctccatttcatggcctttttctcttacctcccgattcgtagctccgccgcaccgtacacttctcatcgactcttcgacagagaaatccaagcatttctagcgtttcttatgttttccgccattaaggtttgaattttgcttaaatctctaacttcattgcttcctgtttcaccgatttcgtttttgtagatggtgagggaggaaacatgggaagctttcgttgctgatagtttactctatgctaaggtaactctagctgatttcagattctttgtcagtcacttttatgattcatgtgaaatctactgattacacattttctttgcctagatctttcttattgcggtttcgttgattatggattatcgagtggcggtctggtttagtatcatattttcaggtcagctcaatttctatatcttgattaaatatatctgaaaatatatgggagatgcagatttgaatgttgattgatttgaatgtttccttttgcagttatatatctattagctcaacaaccagcatttagtaaactaggtatgggaagattcttcaagttcttgctttaagttgtgtttttgtaaaatgcttaaacgttttgcaggaactgcgaagaagctaacacctatgcagttggaggatttgttatcagatggtaacacaacnaaatac

SEQ ID NO: 147525 - DNA, 1352 bp, Arabidopsis thaliana landsberg
  unsure (1)..(1352): unsure at all n locations
atggatcctgaaggtttcacgagtggcttattccggtggaacccaacgagagcattggttcaagcaccacctccggttccacctccgctgcagcaacagccggtgacaccgcagacggctgcttttgggatgcgacttggtggtttagagggactattcggtccatacggtatacgtttctacacggcggcgaagatagcggagttaggttttacggcgagcacgcttgtgggtatgaaggacgaggagcttgaagagatgatgaatagtctctctcatatctttcgttgggagcttcttgttggtgaacggtacggtnnnnnnnnnnnnnnnnnnnnnnaacggagacgattgcaagaagaggaggaagaggaatcttctagacgccgtcatttgctactctccgccgctggtgattccggtactcatcacgctcttgatgctctctcccaagaaggtacaataattatgaatacatatagaaatatcaaatatcgcacgttttataaatatgtgtatatattgttctcaacatttctatgcccgactttcaagaaaaagtatgtatatgttcacgtgactaatatagataactaatttatgaatcttaccatatgtatagtagttgctacataattttatgtttaagctttttttttggttaaatatattggttaagcttttgttacataatacaagataatatatgtcatatttaatttatatgttggatatatttacttgtatgatattgatttagagctactgtgtgcatagagtatgcagtcatagtctgatatttattaaatagacctagtgcaagaagtacgaggattaatgtcatgcacaggtattcaatgagtatctacgcctacgcttgaatgattacctgtggttgtgacaatttatatgtagatgattggacagggttatctgaggaaccggtgcagcaacaagaccagactgatgcggcggggaataacggcggaggaggaagtggttactgggacgcaggtcaaggaaagatgaagaagcaacagcagcagagacggagaaagaaaccaatgctgacgtcagtggaaaccgacgaagacgtcaacgaaggtgaggatgacgacgggatggataacggcaacggaggtagtggtttggggacagagagacagagggagcatccgtttatcgtaacggagcctggggaagtggcacgtggcaaaaagaacggcttagattatctgttccacttgtacgaacaatgccgtgagttccttcttcaggtccagacaattgctaaagaccgtggcgaaaaatgccccaccaaggtatcttttgatttatcttctaagaactaa

SEQ ID NO: 147526 - DNA, 371 bp, Arabidopsis thaliana landsberg
atttacgcgcatgtgtatcactgtcaaagttttacctgcatacgccaaaggagatcggcacaagccttgtattgtgacctattgtttaaaaattatgtcgagcctgatcaacctcagagagttccgctggagagcctgcgttggcatcaaactcccatatctgccttcccaagaagttgttggtggtgcacaagtgagggtcatctcctgccttagctccgatcctcagcctccacattttgtaataactctcctagaaagaacaaacatattttgtgttaataatgtctatttccttgcagttatgtataccaggttatattccctaccacacacggggagagaaatttgattgttaaaaatacttcatt

SEQ ID NO: 147527 - DNA, 2448 bp, Arabidopsis thaliana landsberg
atgcattgcttgattcacgttccagaactaatgaatgttaaagggattagtagattcgaaagcatgtgtaggtcgagtataagagacgaattgattaataacaaggcatggctaacgtttttgagtaaaattcaatcatatcgcatcttagaactaccaacttggacattgattttatttgctctacatgatgctttggttctgagtccccaccttcaaacctctccttcaactatgtcttcttatttgcttgagggcaagcagagattaagtttgggggaattgatatgtctatcatttgcatgttttcagtgtccattcatcatcgttttgagtctagtttcagatcattcatcactgttttatatcatttcacatcattattgcatactttgcatgattaggatagttttgcatacatattgcatttctgagttgttttcaggtaatttggagctgtttgcgagcaatttggaagaaacgagcctgaaccagaagacatactcgaccaccaggtcgcgtgcatccagcaccatactcgaccccctggtcgagtgactttggagccattcttcccatctgctcgacccccaggtcgagtaacttcagctcaggccactcgatgacgccacttgaccccctggtcgagtatcacttcgccacaccacctgaccacactcggccgttcactctaccactttactcgaccccctggtcgagtatcgtcactcaccatcaacatcatcactcgactggacactcgatcacatcttcatagtctactcaaatccgcactcaaccagacaagctgagcacaaggaagagaagaggagaagacgaagtgtttggaagcggcctggacctccatcgcatcacgaagcccatctcggcccattattactctatgggccaggcgattaggttattggcccgtctactatcattttatttctttttgtataaatagatgtcttagggttctttcctgggacatctagtcgacattgagtttttgcttcagttttattttctgttttactctgttgcgccgcttttgcttctgcaacctataattcgagatttttccaagttattcagattctgcatttgatttcatctgtcatcctgtttctctactctttatctctttacttatgcaatattatcatttatctacgtttatgtctttgagcatgtcgtctgagtagtgacttagaattcttagggatgggatagagtacctgtggaattcgcagtctatagaatggttaagatttagaattgattgaatccctttaggactagttgcgtttactgcttatttctttctgatcaactggaattcgatcccaagcattcctgagatatgcgtctctatcccaagggattggccgtttagagcgtttattgactttatcaggctgttcttattgcctgcatagttagattctggtaatgggaattagtttgggctagctttgcttgaggatttctattcacgggagtgaattgatctgttgttgaacctgttgtctagggatagcttgattgcgcttgttaaccattcgaatagcctaggataccactctactcgattaccccatccttaggaatttctcgtctatcttatttctctgttttatcgttatcgcttaatcgttctcattgcctgtttcttagtttttacaatcactcgaccatcttactcgaccacaccaagtgtctggcaacagactgtgcagtcgagtaagattgtcttgtttcctgtctgttactcgacctgttactcgaccacatcctccttctggcatcagcctgttgtggtcgagtggttttagtaattctgctattgcttctgttttctgcatgttcgcttaggactgttagaaaccccaaaactgttattgcttggcttgacttagtgacttctgatcacatctcatctgtttgcatcacacccatttggattgacactaaaatactacaatgacatgattggtgttttaggataattgcataaaaacctattatcaatttggcgcagttgccaattgggtgaaagtttgctatatttgagatctcagaattgcttagatcaagttctttttcaattttcaatctggttgctaactgtgtgtttttcttgttgtcttcttgatccaggtacaccgctgctatattcaaactcgatcaacagctaaccagaacctccttttcagcgataacatcgaccgcctagttcgtgaactcagagaaaggagaaacacagtcaaccttatacctcagcaaccactcgaaatggctgacgaacaaaatcaacagaatggccctgcaaacattggtgatggagatgcaccacaggaccaccgtcagaggaaaggaattgtacctcctgctatccagaacaacaatttcgagattaagagtggtctcatcttgatgatttag

SEQ ID NO: 147528 - DNA, 960 bp, Arabidopsis thaliana landsberg
ctaaacaaaatcgtaaataaactgagaaaaagcctccgtctcctcctctctctctattcatcagcctcaacctctctttcgtcgtcgactcagtttccgatttagggttacccaatcttcgccatgtatcgcacggcagcttcacgagccagggctcttaaggtacatccttattcctttttacaattttacccttttatcctgttcctggaagattctggaacgatttggtccgattcagtgaattaacagatctggattcaaattctttcgtttgtagttacttctataggttacaatgatctcttctctgattggttaaagtcaatccattggtttagattataactcatctgattttcgatttaagagaaatgatttcgattatgattcttcttattgtcctttgattgataccatagaaatgattggtttcttattatgtgatgtattgtgattgtgtgttatatagggagttcttactcgtagtttgagaccagcgcgttatgctagttctagtgctgttgcggagacgagttcgtcaacgccggcttacttgagctggttgagtggtgggtctcgtgctgcgcttacttcattggatatgcctctacaaggtgtttctcttcctccgccgcttgctgataaagtcgagccgagcaaacttcagatcactactcttccaaatggtcttaagatagcctcagagacgactccggtaaatagaagaacgaattttaatgtctgatttcactcctgaaaatgtgaactgaagaaagttaatgttgtgtgcagaatccggcagcttcgattggtttatatgttgattgccggtctatttatgaggcgccttatttccatggagctacacatttgcttgaaagaatggctttcaagagcacgttgaacagaactcattttcgtcttgtgagggaaattgaggctattggaggcaacaca

SEQ ID NO: 147529 - DNA, 1666 bp, Arabidopsis thaliana landsberg
atgagagctttaggagaagatactctaagcaggagcatcaccgttcctctgatacatccagagggattgcaagaggttcaaaaggtgatgaattggagcttgttgttgaagaaaggagagttcagagaatagccaaagatgtaagatggagtaagagtgatgaatctttagtgcctgtgtcagaagatgagagtttcaggagagggaatccgaagcaggagatggtgaggtatcagcgtgtctctgatacatcgagagggattgagagaggttccaaaggagatggattggatcttcttgctgaagaaaggcggattgagagattagccaatgagaggcatgagataagaagtagcaaattgagtggaaccaggagaattggtgctaagagaaatgatgatgatgatgatagcttgtttgccatggaaactcctgcctttaggttttctgatgagtccagtgacatagtggacaagccagctacttcacgagtcgaaatggaagacagaatcgagaagttagcaaaagtgtatgtgtttatgctattaactagatttggttcatgttcttagattacatagaagacaaatattaggaggtaaatcatgaattttgatttgaattatgtgctaattcagatgaaattagggagtgagattaatacatttcttatgcaattattatcatactcagctgaatttatgttaaggaagtttatttcgctaggttgaatggtgcagacatcaatatgcctgagtggcagttttccaaggcgatcaggagtgcaaaaatcagatatacggattacacagtaatgagactgatccactttctagggaaactaggaaactggagacgagttcttcaagtcattgagtggcttcaaaggcaagaccgttacaaatctaacaagataaggtaaatattttactgactactctaaaagtgagctatggatatattgcattgggagccaggttgatttcacttacagaagtccagaatctctttttttaaacgtaatgctgacaaaaaaattaccattttggatccagaatcatctatacaactgcactaaatgttcttggtaaatcaaggaggcctgtggaagctctcaatgtattccacgctatgctggtaaaacccttgtgccatgcttgtatatgttcttgttgctttgatataaattataaaattaagttaatctttttgttttcttcgccagttacaaatttcatcatatccggatatggtagcataccgttcaattgcagtcacacttggacaagctgggcatatcaaggaactcttctatgtgattgacacaatgaggtctccacctaaaaagaagttcaagccaacaacacttgaaaaatgggatccccggcttgaaccagatgttgttgtttacaatgcggtcagtagtttataattatctcattcttatgaatatatatagcttacacttattctcggatacttatgtatagtcactcgcctgatgccaatgctggacatctaaccacaggtgctcaacgcatgtgttcaacgaaagcaatgggaaggagcattctgggtattgcaacagttgaagcaacgagggcaaaaaccttctcctgtaacctatggcctcgtcatggaggagaaatatctcttcttatcataa

SEQ ID NO: 147530 - DNA, 1588 bp, Arabidopsis thaliana landsberg
atgcagggagacgttttggctgttcatcgagatgatatattaggatacccgaagaagaccgatgttgaagattttagggatggagatgaaaatggatggacaacttcgagtaggaggaatacgttggacatggttaaggaaggtatgttgttgaatgcagaggagttgactacatcttgcgaggagaaggtatcgataagtagagacgaattgggtaccttgaggagtgaagcacagattatggtggaaagagatggtgtgaggagtcctgtaactagtaagtggggggggggtgatgaacaaattacatcttggaaaaataaaaatggacatgagtcttttaagcagtatgaacaagctgtgttggagagagatgaaaaggtactcgattttgtgtcaagggataatgaagaatctgcttcaggttcaccagagagggatgacattactcttagtaaagagattaaagaactggatacacaagtggtaaatggtcatctgaaggtaggtggaaccgaagaagatacagcagcatgtgatagatgtgaaaatagggatgagaacagattgttggaaaagaacagtgaagataatgaactgcagagtccaagatgcgagacacaagttaataatacaagtattagaaagatggaaatgagagaagttataggagagcaagactcttcgccatgtactgcggatgcagttaaagcagctggagagacatatcaaaacgtatactttaatggaccagtcttaccgcagtcacctacacaaggacataggcgcacccaaagtgagatagggactcctggacacagacgcacaaacagtttccagagattgaaaacacagatgcaaaaggcttggcgtggtgtcagcaatctgcgtgaggataaccggcccactttcaatcctgaggtcttagcaaaccaaaaaagacagtggtaccagctccactcttcaaaagctctggtattcaatctctctagaatgtctacgtttttggctacgtagttcttcttccccgttaactgtctgaaagttctggtcttgcatggcatattagctgactaatgttttccatttgataaatactctaggatcaaacaaaattgaaggagccagcgtcactgttcgaacattttatcatcgtggggcttcatccggaaacgaatttgaggccagtggaagaagctttccgtagaagaaagaaatgggagatggagatgtcaaggtatgaagtggcagactacagaatactccgtcaccgtgggcctcaatttcctatattggagccacaggtttgtgctaccttgtttttttctttgagtatacatagttttgagcatgcttagagatgtaacgtgagacacgtattctgtttcctattcatcgttttttttctttcttgtgcatactttatttgccactcttttatttcttttgaatacattcttgcttgcctgttctgcttcatggcagattgagttgctttctttcttctctttatcaacttttcttccatgcacagattctttttaaataccctcccggaaagaaggtagcaatgcgtccaaaggatcta

SEQ ID NO: 147531 - DNA, 685 bp, Arabidopsis thaliana landsberg
tctaagctctctacctatgggaagcgccgtactgaaaaggtatcacatatcagtctatatttatttcgctgtttgtgtgatgatgtgattcttgccatgataaaggttcttattaacatgatcaggtttgctgatgtatcatcgattcacctaaaaatgccaaatattcattttctaccagtaaatctttcaacgaaggaaaacccttcaatggtgaaggtaagaacctctatgtgatgttgtctttatgatgaaaccacaaaacgtaaacgaaaatgataagtagataagtagcagcagtaatacatagttataaacttaaaatcagacaacaaaaaagccgcataaaagctaataatttcagggtatgaatcgtttccaatgacttgcatttgcagtttaaagatgatgtgtacctgccaaccgatgaacctcatggatctatagaagcaactctaagccgtataacctcgaaactatgaggttttaagacaatacatcatacatggaaatatcaaacacaatttcacaggttctgcaacttttggcgtttgcctcgtttatgaaataacaatttaaatgaagtgtgtaaggtcaacttttggcttttgttgcaagaataatactgtaactgcaaacagtttcacataaaaatgtagcttacatatattatcactgattcgca

SEQ ID NO: 147532 - DNA, 528 bp, Arabidopsis thaliana landsberg
taattataaacccctagtttgatgatgtatgataaaaatgagtttcacaaattacagggattcatcactatacaaaattaacaaatgcaactctatttcaatacacaactttattattactcaacagaacagttccttaagaatcaaacactatatgaatctcatatgtaagaaaccttcttacaaaagccaaaaccttaatataagaaagcaatgataaagatttagctatacgttgaatgtatgtgtgtgcttaaatattcaaaatcaaagaagaagaagacattactctgatcttacattagttcttacgaactctgtccctggctaggtttctgatgccgttcgctttggctttgacgcttactcgcatacgttatagctctatacatatccgaacatgaatacgcaacctcggacattgcctgaaaaagctcggggaggcgagttcgaagactagccagtgacttctctctaacttgatggctttgtctatggtaagcttcttcttcttcttccaacctcttc

SEQ ID NO: 147533 - DNA, 207 bp, Arabidopsis thaliana landsberg
gtgaaattggagaaacgaaccagtgataaggacatgagaaccacagtgtttgcagtagtatacgaagagatcagagtcgggtccatccggcgcggcgtcctcgctcgagtacgtgtgtgtcgttctcttcggcatctctcttcttcttcttcaaagttcgtcaatccaataaatttgtcggaaactcagctctcaactttgcgttaa

SEQ ID NO: 147534 - DNA, 1698 bp, Arabidopsis thaliana landsberg
atgtttgcaggcaaaaacgaagttacaccgtatcttgttagtcgcttttacagatcccctgaaattagtaagtatcatattttgggttgtaaagaggacttttcattggtgaagaatatgtgactgaagcttctattctttccattgcagttctggggctcacctatgaccatccgttggatatatggtctgttggctgctgtctgtatgagctttatagtggaaaagttcttttccctggcgccacaaacaatgatatgttacgccttcatatggaactgaaaggtcccttccctaaaaagatgcttcgcaaggttagcattaaactagattgggtgttgtgaatgtcacctgatcactgatcaaaatgtcttccaaatgataactttccttaggcaaatccatatgtatggtggagatatagttgtatgtttaagagaagcagtttttaatgcatgttctaatgtttctgttatttggtttaacagggagcatttattgatcagcactttgatcatgacttgaacttttatgctacagaggaagacaccgttagtggaaaggtaaaaaaactagtccgtctatttctcaggcacttcgtagtttgaaaaccaattgatggtgagtaaattagttacttttccttttcagctgataaaaagaatgatcgtcaacgtgaagccgaaagattttggttccatcattaaaggttaccctggtgaggatcccaagatcttagctcatttcagggatctcttgtacaaaatgttcatccttgatcccgaaaggagactgattgtgtcacaggcattagctcacccattcatcactggcaagtgaaaccacattgccattttccctctctgttatatcaggaaatgctgttgtcctagatatctgtacattaaatatcttaattaccattgaaggatctaatctttgaattttctctaccttccctctgctgcctgagagagctttggttacaatgtcgacatgggtggagttctcattaccgacgattctcaggggactttactggttctctattgtaagacaatggcgctttctttctttatactgctgtgtaatcatttgcgactttactcattgtagaagtctatgtttttaaacttttcatcttaataagcagagggtcattctgaataatttttctttaatcgtatggaagctctctgaatatcatttgtggatagtgagatgctttattatctcttctggtctctcaagggcctgatgttgtttttctccaggacatcgaccaatgcttaaagacactccttaacatctttcaatgctttaatggcacacaggagaaggtacaatggttgtttattgggagttatgtgaaagcaaaacgataatttctgtgaaccttttgcatctttatttgtctattgtttaaaattggatgaatttgtctactttagtatgttttagagtttgtccgtggttcttatctgcgttagggcatatatagtttcttttgtgattgattgagttttgcctgaaatagttagtcatccttatagtaattcttttacatttgtttttctttctatagtttccactagtgaattcttttgtttctatagtatctgataaatggtattactgtgattccggaggttttgcttggaccccagacagagctgctgcacaaggaaaacatacaag

SEQ ID NO: 147535 - DNA, 3129 bp, Arabidopsis thaliana landsberg
gatcatatgatttttcagtgaagaagagtcgatgaaattatcttcggagagagaagtaacaaaatcattttcatatcccaacacatttgcttttaaactccaagataaaaagggacgaatgcatagatttatgtgtggtacgttaaatcataactcttgagaaacaggacacctattatgccaatgctgcttagtccattaaccttttgtttttacttttcaataacagaaacacagagtttgacaactctgataacagcaatcctacaaagaatgggggatgacattgagcctgataacttgcctcagataatggtacatatttattcgaaaacttattaaatgagaagataggaaaactctgccccttttgttgacatattttgtgttgtagaagtaaaaagatgaagacaatgacaaagtcgttttagcttcagataatgatcttggagctgctgtagaacatgcaaaatcaataggctggaaggtataataacttgtacatccatacttatcgtcaattagtgtaaagaactaggatgaaataataccttaaatccgcggttcggtttcgttttggttaatgtggatttggtgtaaagaagagtgtatttgggttggggattccaaatggtgcagggtttaaaattgcatttggactacacagaagaaagagggcacaggagaggtctaagttcagaggatatggactacgaccagtcaaactcatgggcagcagcttacaaaacggttgcagccggggctgctcttgctgctggacttggagttttggtgtaccttaagcgcaactcaaactaacagattcattttggggagatacaaaagtgaatgcttttgcaaaccaatttttaaacctaagcttgtgaagtgtatacctcttcattgattcgtgtttgttgttttttttaatcttgttgtttatttgtttttcaaccttacacatgaattgtatataaataagtaaacattttatttgtatttacggtgttgtccaaacttttctttgaaactgaaaattacaaaataagtaatcatatgaatcaacgaaaaaaaaaaagaaatagaaagttttgagagcgtttgactatgatgactttgtggcgtcacaaactagagctcctagtcaacgaccgatggctagttttcgtctgcgccatgtggatccaatccgtcgccggcgttggctatctattcggcggctctatgtctccggcaatcaagacttcccttggctacaatcagaaacagatcgctcttctcggcgtagctaaaaacctcggtgacgccatcggattcgtctccggtgctttatctgaagtctcaccttcctgggtggttctactcgtcggtgcaactcagaaccttttcggctacggtgttggttggctcgtcgtcactggccaattgcctaatttgcctctctggatggtgagatgaattttacaaatcaaaattgcttacacatttgcgatttcgttagtaattgtgctttgcttttgattttttgtacgattctctaattttggcttgaacttccagatattcaaaaaaaaaaaaaaaagatgttaaagcttacatatgagtgtgatcctgcttgattctggtttatttgttcatgtagttgtttgttgctatattcgtgggaacaaatggggaaacatactacaatacagcgtcgcttgtgtcatgcattcataacttcccagaaagccgaggtcctgtggtgggaatcctgaaagggttttctggcttgagtggagcaatcttgactcaggtttatttgatgttcaacccttctcatgattcttcggttattctcatggttgctcttggaccaccagtcgtggttcttgctctactatttattgttagacccgtggaaagaagttgcagaacgaacttgcgatctgatgatttaagattcctggctatttacggtttctgtgttgtccttgcggtatatttactaggattgttggtacttcagagtgtttttgatatgactcaaacgattatcacaacctctggagccatccttgtcattttcatggttgttccagttcttgtccctttttcatcggttttcatctcgggtaataatgtcacctcagtgaagcctgaagaaggaacttccaatgtggatcagcatgaggctagaactttaattgagagaagtgacataccgccggaaaagaaaagagcgccttgtataggagaagatttcaccttgttacaagctttgggacaagctgacttctggcttatatttatgtctctggttctaggtgtaggttcgggaatcacggttatagacaatcttggtcagatttgttattccctcgggtacagcaacaccaaaatatttgtctcactgatcagcatctccaattttctcggccgtgttgctggtggctacttctctgagctaatcataaggtacaaaacccttaaccatttcactttcgcttttaagaagcatctgtgttttttactgacagattcatctctttctgcctcttcaaaaggaaactctcacttccaagaacattggcaatgtctgtggttcaggcgataatgtctttggggctcatctactatgccatagattggccagggaagatctacgtagtgaccattgtgataggaatgggttatggcgctcattgggcgattgctcctgcttcagtctctgacatttttggcctgaagagcttcggttctctttacaatttccagattacagctttgcctattgggtcgtttgtgttctcaggtgtgatcgctagtaacatctatgactactacgccagaaagcaagccggacccaccacagagactgagtcgctcgtctgcacgggctcggtgtgttattcagtcacgtgcggtctcatgtccatgttgtgtctaatggctatggttttgagtttgagtgtggtttataggacgaggaagttttacttgaggcttcatcaccgagtctcaaagacttgaagatagtgtaattgtgtaagcaattttcatttggtctttggaagatatatgtaagcaattttgaattccatactcaaaatctttaattggtgttcacaagtatttaaatgtaacatt

SEQ ID NO: 147536 - DNA, 1276 bp, Arabidopsis thaliana landsberg
caagtgctgctgttcttccagggggtggttgatgaatgctgagttaaaatgtttctcggagaatctctttgaaatccaggctttgaggaagtgttttgtttcagggtttgcagctattttgcttctctctcaggcaggccaggtatgttggagccgacattgctataagcatgttcgattgcaaccacaagcggtctgaaatttctgagtttcttctggcagggtatagcgttggatctctcatctggttatcagaacatttgccaactagggagtgctgctgctgtgggagaaaacaagctgactcttccatctgatggtgactcggaatcaatgatgatgatgatgatgagaggcatgactgctaagaactttgaccctgttaggtactctggaagatggtttgaagtagcttctcttaagcgtggatttgcaggtcaaggccaagaagactgtcattgcactcaggtaattgtttcttcaagtccacaaattgtgaaaacacatcctctgctaacatagtgtgagaacctttcaactgttgcagggagtatacacgtttgatatgaaggaatcagccattagagtagatacattttgtgttcatggcagccctgatggatatataacaggaatcagagggaaagttcaatgcgtgggagcggaagacctcgagaaaagcgagactgacttagaaaagcaagagatgattaaagagaagtgtttcctacgatttcccaccattccttttatccccaagttgccttatgatgtcatagccacagactacgacaactacgcacttgtttctggagccaaagacaagggctttgttcaggtgattctaagagaaagaactcatgagtttgagaaatatctcttgcactgatctcttatataaacctaatgtgtttgatatgttaggtatactcaaggacgccaaatccaggacctgagttcatcgcaaagtacaagaactacttggcacaatttggctatgacccggaaaaaataaaggatacaccacaggactgtgaagtgactgatgctgagctagcagccatgatgtccatgccaggtatggagcaaacactgaccaaccagtttccagatcttggattaagaaagtcagtccagtttgatcccttcacaagtgtgtttgaaaccttgaagaaacttgtaccgctctatttcaaatagagcaagcttctttgctcaaattcttatgtagactataatcactgtccatatatacatatcttccagaatcaaaaca

SEQ ID NO: 147537 - DNA, 1310 bp, Arabidopsis thaliana landsberg
atggccgaaagggatcctgttgcagcagcggcacaaaagtacaaaccaattcaatctgctgtccctggaaccaccttaggtccaattcagatcaacgctttcctcggaggagaggtataaacttaaaccaagatcagattctagaactttccaaaaattgcaatagtagacattttgctaaaagaatacattattaccacagaagttgtatgacacaccgggtgtgcacctacaccacaggcaagcagctgtcgttcattcagatgatttacccgcccttgctcctcaaaatcgtctcagaggccaatctttcgatgtaagtctgctttattacggccaggtaaagattattttaccgtaacaccagtgtgatgatcttcctgtgctttttgttccttacagatttcaactttgccaactcaatcgtcaagtagtcccaagggtgagagcttaaacggttatacatttttctggggaggtctcgttaggattgacatcttgaaggtaataactattattactagaattatgtttcagtttcacagtggatatcagaattttttaacatacttgacatattgcaggctctaccggaaacatgtttcacattctatggaccaaaagctcttgagattcatgcagtaccaaccaaaacagcgactgccttttacgaggcaagttccgttccccatcattttcaacttcgttacttatttaaggacaagttaaatcttcttattaccatttacttgatactcatttgttctgcagaaagaactgggtgtgcttctaacacctccatcagggaaaaatcagatgcaggagtggaaagggttacaatctcaccggttacttcaaatcgaaatcaacgatgcaaaaaggtgaaatatatatcttccattcccatctatgtttagtaaaacaaatgatcctcacctaacgttaacacacctcttgatcagaccggctagtgatgtggcaatatcagggttaggatggatttcaattgaaccaatccgcaaaacacgaggaactgaaccgagagatctcaatgaagcagagcatgagatacatatttgtgtcagtgtgccaaaaccagttgaagtttttcttcgaccaacattgccaattggtacttcaggtactgaatggtatcagtatcgtgagttaaccgataaggaagaagaagtaagacccaaatggtacttttgaattttttttgtttagatgcaaaaatatcggcttagtatcacaaaccagagttatatgtaacaaaatagtaaattgtttgtaatgaaatctacttaagt

SEQ ID NO: 147538 - DNA, 572 bp, Arabidopsis thaliana landsberg
ggtcccttacattcaaatacttctggctttaatgcgactatcaatgtcttaactcgtgcttttgatattgctagaactcagacacaggtatcatgacgctctaacgtttttgttcttgttacaagagtatatctgctcgataaatttgagtcatgtggacctgataatatgttttactttccccttttttgaattttataggttgaacagccattgtgcttagaatgcatgagggtattgtctgataaacttgaaaaagaagtcgaggatgtgacgagggacgtggaagcatacgaagcatgcgttcagaggttagaaggagagacgcaagatgttcttagtgaagctgattttctcaaggaaaagaagaaggtatatttcagcttttaccatattgtttgactctaaagatgatgaatttcatataatcttaagttagaagttggttgttgtttcctgctctacttagattgaggaagaagaaagaaaacttgttgcagctatagaagaaacagagaaacaaaatgctgaagtaaaccatcaactgaaggagctagaattcaagggaaatc

SEQ ID NO: 147539 - DNA, 1977 bp, Arabidopsis thaliana landsberg
aatttctatctctctcttttttcctggttaattccaatttggatttgtaatttctctgaatttgattcctttatttcctttccgggatcgaaaattctaaatttccctttttttgttctgggttttcagggttctccggattgcgatcttggtaactagatattgaatttagggtgccaatcaaatcgcagctgctaggttttctttgattcctctgttgttgttgtcttcaattaggaattgttgctttcaaagatttagtcttaagatatagagatatttgcagggggggatattaggcagagaagaaaatgggggttatgtccagacgggttttgcccgcctgtggtaacctctgtttcttctgtccttctttgagggcaaggtctaggcatcccgttaaacgctacaagaaaatgctcgctgaaatcttccctcgtaatcaggtcttttttccttacccactctttgattggagaacttctttattttcaatttttttttgtgtgtactagttaagatctctctaattgtaagtggggaaatgtaagtggaatggattcccaatgaaactaaaatgaggtttgctacacggaatgatacaagtttcaacatttttctatgttgtgatttggcaggaagctgagcctaatgatagaaaaatcggcaagctgtgtgagtatgcgtctaggaatcctttacgaattccaaaggttgttgcatttttttttctgttattcccttttcagttttcttagcatacttctctcaattttattctcatgtgtttcagttttccattatgacagattacagagtaccttgagcaaaaatgttacaaagaattgcgaaatggaaatattggttcagtgaaagtcgtcttatgcatttataagaaactgctttcatcatgtaaggagcagatgtaagtcaactggttacttagaatcagtatatcatatttcgcttttgttaaattagatcttcagaaataatgcttacttttttctttcttgttgctcgatcatttactttcgaattcctgtatgttttataggtttctttccaggttccttatttacgttttactgagactgtctatttttcttgtaggcctcttttttcgtgtagtttgctaagcattgtcagaactcttttggagcaaacaaaagaggaagaagttcagatcttgggttgcaatactcttgtcgactttataagtttacaggtacattttagcatttttttgagacatggttttgcaagctacttttcctgctaccactacatatggtaacacatctgtttacatacagactgtgaattcgcacatgttcaacttagaaggtctaatccctaaactttgtcaacttgctcaagaaatgggtgatgatgaaagatcactccaattacggtcagcaggaatgcaggctttggcattcatggtaatgctttatccatttactttctcttttgtttgactgacagaaaacatgccctttagctgtatacattcctcacacgaaacatatcctattgcatgccctttagatgtgcaacatgttacgggttatgtgctcttcctattgtagatagccagaacttctgctttgaattatctatgttagtggaatgggttatatttactcgaacttaataattttgacctgcaaactgttaacggacacttttattaatgagttttttttcttgttcaagaaaacattttaagcatggtagtccttattcagctagtatagaatttatggtcaacctgtttagttttactagttagttccatttcagttcaaagggaattctgttgttagtttctctttagttgaaatcctattttatttcgaccttcgtcttatgtggtgcaaagtccacaactgtttctgcttggaacttttgctactaatcaatagttaataccaggtatctttcattggtgagcattcccaactatcaatggac

SEQ ID NO: 147540 - DNA, 1839 bp, Arabidopsis thaliana landsberg
ggtttaaagaggcatgtctatctgatactgccaaggaaaatgcttctgttgtcgattcgtctttgactgattggaaacaagatttaggaaactctgatgatccaggtaaactttgaagcatgttttgttattcgcttttttttacatggagatttgcgttttattttgtctgtctcttgttgtaattttttcagagagtacaagttacagaagcaaggaagaccataaactgtcaaaggtggatgttgatcgatgtaactttcctgatcaacttgaaagtgcaaaggcgaataagaatagtaaaccagggtatcgaacgagatatttcatcatcaaaagtctgaattacgataatattcaagtttcagttgagaaaggtatttgggctactcaagttatgaatgagccaatattggaaggcgcttttcatgtaagaacctctcctttttagtttgcaccgctctataatcttatatttagtgtcagcctgtctggtatactgaagttatagtctttgtgtagaaatctggtcgagtgattttaatcttcagcgtgaacatgagcggattcttccaagggtatgcagagatgttgtctcctgtgggttggaggcgagaccagatatggagtcagggaggtggtaaaaacaatccctggggacgtagttttaaagtgaaatggttgcggttgagtgaattgccttttcataaaacacttcatctcaagaatcctttgaatgattacaagcctgtcaagattagccgagattgccaggtatacctaaagtttcttctatttgcttcatttcctagaatttttgcgtttgttgtcttaaatccatataatggctctggctagaatagcttaagctctatgaaaatgactcgatttgaagttcttttaatgtgcgcatgctctaggaattacctgaagatatcggtgaaacactttgtgaactccctgatgcatatagctgtgatgacgggttgctgaataggtatctccttgaagtctaagtggggctttgggttcttagatctgcttgctcttgattctattctctcacagctcttctagggatgattattcaacaaaaaagtcccgcgcagaacctccatcttcttccggagacgatgagtacaataacaatctttggggccatacaccaatgccttaccctcctgcggtctacccaaaccaggatgacctcagtagatttcatcttgcacagcagagaggatatggagtttcccccgaatatctgcatacatcaccaggtgcatctaactctcgcacggagcaagacaagtctttacgattcaactcatggtgtttgcctttggaaagccctctcgcgaattctctaaccgatgatgattttcttgaaatggtagtggcatatctgcttgtaacttatgctgcgaatttcatcccattacgacctcttgttctcgaattagatattttttgtaagtcatgttgtttagttgaatcaagaatagtcatgacacactactggaaatcttggtgaaaacatttgtagtatttttcaaactctgagctatttcagtgtgctctttctgatccataacacttacatatctcagtgtctggctgagttttgcattgatgttacagggacttctttctgtttcttgagaagcatcatgagatcaggttatgttgttgttgtatgtttgacacagtcttgcgattgtgtttttttgttgttttttgcagtcttatgaagagtacgttgaaacccatggcaaatgcatgaagcagcttggtcttcctgtcagtatgttttatccatcactgtttacattatgttttgcg

SEQ ID NO: 147541 - DNA, 1465 bp, Arabidopsis thaliana landsberg
ctttatcaccaccaaaaaccaaaattacactgccaaaaaaaaaacatcaaaacgatgccgtcggtagcggagacctcagcgaattcagctccggcaactcctccgccaccatcaccgaatttctggggaaccatgccggaggaagagtactacacttcacaaggagtacgtaacagcaaatcatacttcgaaacaccaaacggaaagctcttcactcagagcttcttaccattagatggtgaaatcaaaggcactgtgtacatgtctcatggatacggatccgatacaagctggatgtttcagaagatctgtatgagtttctctacttggggttacgctgttttcgccgccgatcttctcggtcacggccgttccgatggtatccgctgctacatgggttcgtttacttcgttcctctgttttgataagataaagtttccatctttgtgtaattgataagataatttacgatctttaggtgattaaagattggatttttatggttattaggtgatatggagaaagttgcagcaacatcattggctttcttcaagcatgttcgttgtagtgaaccgtataaggatcttccggcttttctatttggtgaatcgatgggaggtctcgtgacgcttttgatgtattttcaatccgaacctgatacttggaccggtttgatgttttcggctcctctctttgttatccctgaggatatgaaacccagcaaggctcatctttttgcttatggtctcctctttggtttggctgatacttgggctgcaatgccggataataagatggttgggaaggctatcaaggaccctgcaaagcttaagatcatcgcttctaacccgcaaaggtactatcaaacttcttggtagcaaacactctgtgatataatctagggagttatggatgttgcaagtctctcatcaactgtaaagcttgagactttactttggaagctataaatgtctggattttgcattatagatatacagggaagcctagagtgggaacaatgagagagttactgaggaagactcaatacgttcaggagaattttgggcgagtaactattccggtgtttactgcgcacgggacagcggatggagtaacatgtccgacatcgtcgaagctactatacgaaaaggcatcaagtgctgataaaactttgaagatctatgaagggatgtatcactcgctgattcaaggagagcctgacgagaatgctgagatcgtgttgaaggatatgagagagtggatcgatgaaagggttaagaggtatggatctaaaaccgcttgaagaaagctacgtacatttgtgttacaagaacttgaagagaaatatatattgatggtatgatctgtatcgtcgagttgacttgttttgttgtctgttgtaatccaagaacatgaattttctgatgtaagaacttataatatcatggattacagaaatcctttt

SEQ ID NO: 147542 - DNA, 2010 bp, Arabidopsis thaliana landsberg
tgaatgattggcttctcaaagacatagcttccgccttagaaagcatttctaacagaatttctgggaaagaaaatggggcatctaatgcctctgatcagaatgctgcaatggctgattctagtgtagctcttaataaagtttcatctaacgacagaggtccatgtattattgagggagtctctaagacctcacttttcaagcaggcttctgatcttaagggtagatcagtgaaggtccgtattgaacaactaatttgcattttaaacagcaatccctcatttagtttcgtttactcatgtatgcacgtcaattgcatgttttgtgtattctgcaggttgccaattgccatgattctgttatttatctgttagcgccattgagatatgcaactgtgtatgggtgttctgattctactatcgttctgggagctgctggcaaggtacggcaaatatactcctttctgttttagtctttgttagcgaggttcaggttagaatgcagtgataatattttatgttctttgcaggcagtaaaagttgagcattgtgagagagttcatgtgattgtagctaccaaacgaatttgcatcgccaattgccgtgaatgtgtgttctttttgggagtcaatcagcgacctcttatagttggtgataaccacaaactacaggtgatatgtctatttaagattgagctgcatacataactcttctttcccgccctgatattcagctgaaattaataaatagactacagtttttcttttaactctaggctaaatctttcctgtgttaatatcctggtatagtcatgatcgtattaatggttcctggtgtttggaaaattgagcatgctgttaaagtcacttcttcaactgagttaagtggaaacatcttctgatgtgttgtctataactgttggcatcaatgtgactgttatctgttccaggttgctccatataatacattttactcacacttggaggagcacatacaccaggtcggaattcagccaactatcaacaaatggaacgaatccttggcgctcggcgcaattgatccgcatgactcactatcacatccgactggtgcctctgataaacaagctgaaccggcttcttgtgtggaccctgaccagatcactacctttttggttagattcccctttttgttagtttaattttcctctagtaactagtgatattggttattaagattgtgttcgtgggttaatttctcacatcaatgtctctggttcagatcccaaactggtttgcgggtgaggcgattggttccacgaaagacaatccatttccattgccagatgcatataaggcagtgcagcagacaaacgtatgttttttatttgctttccgcataaaattgctcgtttctttttcatccatacttcagcatctgatcccttaactgtgttttggttttgagcagcttaagaacttagaggaaacaagacaatccttgagagaaacacctctcgaagaaaaccgaaaacgagaactcactacagcgttccacatgtatttcaaagactggctatacggtaatcaaataaaatccccattctagttcatttactcctttggccagccaatgatctatatgtatctctttcttttggtgacagcgacgggaaatattcggcaactttactgcctacaaggcgattaagaccaatggcgattgaaaatgtcagagtcactgtagagttctcttgatccgttccttctcagagatttgctagcacgtttgacatcagaatttaactgcacagcacgctctctaactcctaaagctctgtttttttgtgtgtaggtttctctctgcttttatcgtatttattagtcttaaatatccacgtttttgtccttgaaaaacattaagccatcttgtcttgttgttgatttctttcaattgttataacaacttttctcaataccatatatataaatcttttagtaactaatacttgaaaattttaaatattttgaatttt

SEQ ID NO: 147543 - DNA, 1927 bp, Arabidopsis thaliana landsberg
tgcagagttgtcagagtgtatttaaaaaaaaaaaaaaaagcacgttaggaggagtatcctttagactagagtaagggagtgggtgctttaaagaagcagagaagcgggagaagagtgtgcagcagcaacagccaacagaagaaaatggcaaaagagaaagatctggagaagcaaatcggcggttgcatggccggcttcttcaacatcttcgatcgccccagtctcctctctcctaataagcgtctctcttcctctccggtaacttgtctatctctctttccctcttctcctgttcctagagggatgcaatagaattgacttaccaacaaaacaacaatgtctgtgtttctccagagcgctgaatctgaatctgcctcgggtaggacgaatcagcagagtgtgtactctacccctgagctacgctctcctgcgccggctcaacaaggatcttcttcttcttcttcctctaggccttggaggttctctaaagaagctccgaggctctccctcgatagcagagccgtcgtggatgccaagggctgcctcaaacacagacagatccgagccgatgcggttgaggctgagaaccagcgcggctcacccagtgtgatcgcacggctcatgggattggagccatttccccaacagcctctccagagatctgcatccgagtccagggtcaccagagactacctatttgactttcacgatgacaagggagcagctcaagatccggctccaattaggaacgcccgagcccacccaacctcagtagtacgccgaaagagtttctttgattccggtgatttcttcccgagagtttccaaaatgagtggatttgacgctcccccgaccgatctggaaaccctcaagcagcttctcgaagctcttaggctcaaaggactcttgcactcgtcttcacacaaacatcagagcaggaatctcgtcttcgaccaccattctccgatcaaaccagtgaggcgggatcgcatttccccgagcgtcaataggaggagaccaagaccaacgctcaaggaacagaggagagtctcttcactcccttggcggagaccagaacctctccagacgaggattgaagaccagagtagcactctagctgaggaagaggtacctcattcattactcgacattttatctatcaaaaaggcagctaatgaaatacaaattctgtaagcagatgtggaaagtggatgtgtataacagacaaggcaaaaccttattggagagatgcgacaagctgctccacagcattgctgaaatggccgctgctgaggccggagactcacaaccgagccccgtctctgttcttgacgcctcaatttaccacgaggactcttctccgtcccccgtcctgaaacgcacccttgactttgctgatgctgaagaagacgaatcctggggtggctcaatattatcatcgtccgactctgaatatgtatacatctcggacatcctccgagcctcagattgccttccacaagagtccgacagcttctcctttctggaaaagcagcaatacctcaaaggaaaatgcgcctccagagccgcagctcaggaaagacgcctcatcttcgacgcagtgcaagagattgtggcgcggagaaggagcttgcccccgtggatgatggtgggagaggctgataataagatgcaagtgatctggtctgaatttcagaagataagagacaaaaagtcgtccacggaggaagatgaccttgtgggatacgtgtgcggggtcctcggaagagatttgtcggaggaccgatggcgagattttcaggtggagatgtcagaagcagttcttgacgtcgaacgcctcatattcaaagatctcatcggcgagaccatacgccagttggcttttcttaacaggtccgactcgctgcgtaggaggctgctcttttga

SEQ ID NO: 147544 - DNA, 1052 bp, Arabidopsis thaliana landsberg
atgggaacaccagagacatctcgggagccttgccctgatcgtatactcgatgatatcggtggtgcttttggtatgggagctgttggaggatctgcctttcatttcattaaagggacttacaattctcctaaaggtagtcgctttgttggaggaacacaatcggtgagcatgaacgcacctcgtactggaggcagttttgctgtttggggaggtttattctcgacatttgactgtaccatggtgtacctaaggcaaaaggaggatccttggaactctatcattgctggtgctgcaactggagggtttctgtctatgcggcaaggggctggtgctgcttcgagatcagctatttttggaggggttttgcttgctttgattgaaggagctgggatcatgttgaacaaggtactggctcagcctcagaatatgatgatggaggaccctggaatgcaaggaatgcctgggatgcagggaatgcagggaatgcctgggatgcccggaatgcaaggaatgcctgggatgcaaggaatgcaaggaatgcagatggggcagatgcagagtcaagcacagataaggtcagagagtcaaaaccagaatacagcttcatcatcatcatcatcatcatcatcatggtttggagggctttttgataagaaaaaggaggaggtgcaaccaggcagtgaaagtaaaacagaggtgttggagagttttgatgctcctccggtgccatcatttgagttcaagtaagctttgtggacatctatttctctgtcatccaatggtttacctactgcctcaactatcaattccatttcgtcgtctttctgtctatcctaagttctcagctgaattcttcttgttcatggaagaatcagcatgctatgttctctctcttttcacttatggttatgtttcaatgagcttatgcactcaatctaggaatattctctttgtgaaaccattccacagatattgttggttcttaaataatgtagttatagcatttaacaatattcgccagtggaaaatgtttgagcagtggaaatgaatcc

SEQ ID NO: 147545 - DNA, 203 bp, Arabidopsis thaliana landsberg
ctcaaaaagaggaaacattttgtgaacctagtttaaccacacattttggatcaatctctagtaattttctttctgtttaatgtatgtcactgtttattttactgttccgttagaaatttgaaagttttggtgaaggtggacgaggctatagttgtggtgatgaaacttacaaagtagaaacctcaagggcctatttaagttga

SEQ ID NO: 147546 - DNA, 1128 bp, Arabidopsis thaliana landsberg
agacagagtcgcaaaaatactcatatggctagcttctccacagcacaacctctctctctgccacgtcatccaaacttcttcaatccgaatcaaccaactaccaataacgaacgctcccgccacatttctctgatcgaccgatgtgtgtctctccgacaactaaagcaaacccatggtcacatgatccgtaccggtacgttttccgatccttactcagctagcaagctattcgcaatggctgcgctctcttccttcgctagtctcgagtatgcacgcaaggtgtttgatgaaattcctaaaccaaattctttcgcttggaatactcttatccgtgcttacgcttctggaccagaccctgttcttagcatctgggctttcttggatatggtttcggagagtcagtgttatccaaataagtacactttccctttcctcattaaggcagctgcagaagtttcatctttgtctttgggtcaatctcttcatgggatggctgttaagtcagcagttggaagtgatgttttcgttgctaattctttgatacattgttatttctcttgtggggatttagattcagcttgtaaagtgtttactacgatcaaagaaaaggatgttgtttcatggaattcgatgattaatgggtttgtgcaaaagggttctccagataaagctttggagctttttaagaagatggagtcagaggacgttaaggcaagtcatgtgacaatggttggtgtcttgtctgcttgtgcaaagatacggaatttagagtttgggaggcaggtttgttcttatatcgaagaaaacagggttaacgtgaacttgacattggctaatgcgatgcttgatatgtacacaaagtgtggaagcatagaggatgctaaaagactgtttgatgcaatggagaagaaagataacgttacatggacaacaatgcttgatgggtatgcaatttcagaagactacgaagcagctagagaggttcttaattctatgcctcagaaagatattgttgcttggaatgctcttatatctgcttatgagcagaatggtaaacctaatgaggcattaatagtgttccatgagctgcaacttcagaagaacatgaagctgaaccagatcacactg

SEQ ID NO: 147547 - DNA, 1188 bp, Arabidopsis thaliana landsberg
atgactgtgcaaacgactatgcagatatacgcaggttcattctttaccatccctttgattcggtggttttcaatcaagagaaagaataatcagatagagaacagaaacaaagctcggctacaatttgctcgagcacttgaatctccagatatcgcactacggcgtaaggtaggcacatcagtagtaacataaatcttgggagatgtttatttggtttctgcccaaacatgctctttattccaaagaggagatagcctcgcactacattttccactagtgggtaaactcttgccaactaacgtcaagggttaggttctgaatcgtctatgatacctgcatatctgtgggagatctctttatgtgattacccacttttgattgctttatgtgactcttttcttgccctctagcaccagccagactaaagcacatttcttggattcttttcctggaaacttcatatatatgtttttttcttataacttgggagttgtgaaataacgccttgaaatgatgcaatgcagctacttagtgcaagggatatggctcaaaaaacagtcatagggaaggatcggatcgtgtacagtacagatagagatatgatggaacaaaactatgagacagacgaatgggacaggagattcaaagagttagaaaaatcggattgaaatgtgaaatctggtaagtgaatgaggcagtttcacagtttcttgctgcaattacaaataatgggtttatatgaatcatgtacatctcttaatctcaatattgacctcatccagttttgcatttgacttttagggacttgtgaccttttgctgttatatggtaagttacgtagcagctcacacatcatccgcaacacagaattttcccaacaacgtaaaaacattcatggacgctggagttaaagcggatgacacaagccatggcacatactgtttagacattcttcctctctctgagacagaaaataactggtttatagaggtctcttaagctctagtggtaatagaccattttgtgatgctccgtaacacaacaagcttggtcttgtttatatcatccaggagatccaagtattgcttgttcctgagagttactacaaatgcaacaatagattatgtacattaatttgtatatacgaaagtccaaattcttgctcataagaatgaatgttcaatgtat

SEQ ID NO: 147548 - DNA, 2535 bp, Arabidopsis thaliana landsberg
atgcagattgaggatcctaatctaactaacgtaagccatttgctcgtggatgagattcacgaaagaggcatgaatgaagattttctactaatcatactacgcgatctccttcctcgacgcccagatttgcgtcttattctgatgagtgctacgattaacgctgacatgttctcaacatactttgggaactctcccactatgcacatcccggtatgtctagttgtaaatccagtgacttgtttatgatctgatattcgtgacttatctcttttcaacttattgccagggtttcacatttcctgtggcagagttattcctagaagatgtattggagaaaagtcgttataatattaagtcgtctgactcggggaattatcaaggtagttcgagaggtagaagaagagaatcagaatccaagaaagatgatctgactactctttttgaggtatgctatgctacccttgttacttgcaaatctcgagagcttgtttcttagtaaaagaagtatgaagcttcattttgataccgctacagaaaatgtgtataccgaattgcataataattcctgttctcaaattcatcagtattgcattcaagtttggttcattattctgattcatctagcctaagaactgttttttctctttatatttcacgctgatatagacatttagtctccatgtacgtggaaagattaaacctcaagagtcaaaaccaagcttagttcacgtgggaatttaagtttatggttcagtaactaaaaacggctcggttgtagtttagaaaaacacataagtcttgatcttttgcatttttttcatcatcaaagactgaagcttactagaatatgttttaccttgaaagctagaagtctgccttatcaagtttttttattttttgataggatattgacatcaattctcactataaaagttatagctcggccacaagaaattctcttgaagcatggtctggtgcacagattgatgtggatctggtatgaatttcactttattctcttggtaatccagctaattccagcccatatcatcttttactgaagaatctcatcatgaactgatctttgaaactctgtcgtaggtggaggcaacaattgaacatatttgtcgtcttgaaggtggtggggcgattcttgtcttccttactggctgggatgagatttcaaaactgcttgaaaaaattaacatgaacaactttcttggagattcgagcaagttcttagttcttcctttacatggttcaatgccgacggttaatcaacgtgaaatttttgaccgtccacctcctaacaaacggttagccctctgagctatcattcgcatttcttcttttatcattctgctttgtagcaacttttctaagcgaatgctctgcttttgtaggaaaatagttttggctacaaacattgccgagagtagtattacaattgatgatgttgtatatgttgtggattgtggtaaagcaaaggaaactagctatgatgctttgaacaaggtggcatgtctcttgccatcatggatatcaaaggcttcagctcaccaggtattcgactaaccataaaattgtctatcagtaatcaagatccccttcattcaatgatctcagtactgcgcccagatcatagatgtgcttgtaagacttaaaacccgtgcttttctctgtggctttggtacaaatgcagagacgaggtcgtgctggacgtgttcaagctggagtttgttataggttgtatccgaaagttatctatgatgcttttccacagtatcagttaccagaaatcatacggactccattacaagagctatgcctgcatatcaaaagtttgcaagttggatctataggctcattcttggcaaaggcactgcagccaccagatgcacttgctgttgagaatgctattgaacttctcaaaacaattggggctttaaatgacgtggaagagcttacaccccttggtgagcagcaactctggtctttactattgtttttttagtttgtaaatatatgctacactcaaaaccatcatgttacaggtcggcatctttgcactctacccgtggacccaaatattggaaagatgcttctgattggagctatcttccagtgcgtcaatcctgctttgacaatcgctgctgctctggcgtatcgtagcccatttgtcttaccattaaataggaaagaggaagctgatgaagccaaacgatattttgctggtgattcctgcaggtatgacatctataggcaaattacgtttatttcacaccgtcagtcaaccaggtcactgtgttctgtttcttacggaaaagatttggcatatatgtgttgtgcagtgatcacattgctcttcttaaggcatatgagggatatcgggatgcaaagcgtggtggaaacgaaaaagatttttgttggcaaaactttctttcccctgtaactctaaggatgatggaggatatgagaaaccagtttcttgatcttctatcagatatagggtttgtagacaaatcaaagccaaat

SEQ ID NO: 147549 - DNA, 2636 bp, Arabidopsis thaliana landsberg
ctcttacatatcatcacttcacatcaaccaaaactacttctgtctctctctctcgctctctatctctcacgctctcacaggtttttttctctctctgtctctctcttgttctccatttgcgtctctgtttgtttgatgagtttctgaatgttaaatgcagatgtgttttggttttctgtggaagtttttatatctctgttgattgagtttttctctgatgttgttgggctgcgaaaaaaatcgaaacttgtattatctctcgtttaggtttcgtgttctctgcattgatctgcttcttttatttgttaactatagtctcgtatgtgaaaaatgtgaactttgtttgttaactctaatccaaatcattagaaaaatgcagattgagatttctctaatgcagtgcttgaaattttggaaactagggttcttgttataatgtttcaagtagtgaacttatgtcaacttgtgctttaggtttgatctgattcttaaattttgtttcatatgtggtctttcttacaatgtttctggatttgttgttttagtagaagaaaaaattagaaaggttgtgagaatggcggctacagcagcttcaagcttgcaaattgctacacgaaggccgagcatgtcttcgcccagcaaagttcttaaagcaggaacctacattgttggtgccaatcctggaaacgcttcatgggataaactttcatgcactcgccaattatcaaaccttggatgtttgagaaacaacactgctgttccaacttgtaaaagaccgttttctttttccacaagggcaatgtctgaatccagtgaaaataaggctccttcagggcttccaattgatttgagaggttggtttggcatatctttctttatattcattaagatgctgttgtggagaagacttggtgctatctgaactaagcaagtgtaaatggtacagggaaaagagctttcattgctggtatagctgatgataatggctacggttgggccatagcaaaatctcttgctgctgctggagctgaaatattggttgggacttgggttcctgtaagtcatttttggttcagctgcttttagtttccttcattttgctaattatactaacctatgaatggatggtctactaggcacttaatatatttgagacaagcttgagacgtggaaaattcgaccagtcacgagtgtaaggacttacaacatgatcttgtctggttttatgtaatgggacattaattttcccatccatatctatattcaggttgccggatgggtcattgatggagattaagaaggtctatgctttggatgctgtgtttgacaatcctgaagatgtgcctgaagatgtgaaaacgaataagcgatatgcaggatcgtcaaactggaccgtacaggtatagattagagatacacaaacacgcctgcaagttaagcatgtgttactccttaatgctttttgttgcttaaatcaggaagctgctgaatgtgtgaaaaaagattttggaagcattgacattcttgtccattcccttgcaaatggtccagaggtagagaactcgtatcgatgattggttacagtaagtgcattgtgttgtatacaaactatttccttatggtgttcacatgtgggtttaggttagcaaacctcttctggagacatcaaggaaaggctatctcgctgctatctctgcttcgagttactcctttgtttccttgctgaggcattttctgccaattatgaacccaggcatgtaacaaatttcgtatgtctctttattccttgtaaatatgttttcttatttggttctctatgatgatttaggaggtgcttcaatatctcttacttacattgcatctgaaagaatcattcctgggtaaggatggcttcttcacaagttattcaaaggaacaaactaatgcacacacataacgatgtcaacacattctcacaagtatctctttcattctgtgcaggtatggtggaggtatgagttctgccaaagctgcactagagagtgacacacgggtgagtttacaattctgtttcgtaaactcaaagatgtattggttagaagtctcttagtccaaactgtgttttcaacataggtgcttgcatatgaagctggaaggaaatcaaacattagggtcaacaccatatctgcgggtaatccatctttccctcttacacgcctcgtggtacaaataacacgcctcgtcttttgaaattataaaagagtactactgtttgggtttcaggtcctttgggaagccgagcagcaaaagccattgggttcatagacaccatgattgagtattcctacaataatggacctattcagaaaacactgaccgcaggttcatttccttcaaaccatcacctctcttgtgcttgttttttttcttggaatcttacggttttataaatggcgatgatgtagatgaagttgggaatgcagcagccttcttggcatctccattggcctctgccataaccggtgcaaccatatatgtggacaatggtttgaatgcaatgggcgttgcactggacagccccgtgttcaaagaccttaacagcaagaattagagtcttgatcgtcggctgagctcgacataatccgtgttcgcgcgaa

SEQ ID NO: 147550 - DNA, 1094 bp, Arabidopsis thaliana landsberg
gtttcagatgattctcttgatagttccactaaactacgccaaccaacattgctgttgcttgcatctcttctttcgcatgtgactgattccctcgagagagcagcagagaagaagtccttacttcttcataaggtatattattctaattcctaccatttacatgtttcaaactcttttttttttttttttacattcgaagttgcatgtatgattggcagattagagacataaacgagctctcaagacaagatgtagatgcgatcatcaagatctgtgattcccaagaatatgtcacaccgtccgacaacatacataaaaggttagtgaatttctttcttctgctcgctcatgcgtgcatatgccaaagcagaaatgggtattaacatagaatttttccagattttttctatcagtgattagtaagacgtttgaccactgtttttatttgttcgtggctctgttgttacttacctcaggagatacatagctatggttgaaatgtgccaaatcgtgggtaacagggaccagttaatcaccttgttactgcaacttgccgagcatgtactaaatattatcctgatccatctccaagataggtatgccactttatcttcaacaattgatatcttaaaagtttggaaatctacgggtttgctctaagatactatgctaaacacttcacatatgcagatccgttagttcaaatgaaaggggatcatatggttcaaaatcccatatacaacaggaagttacagatctctgtggcaaattgtcacctaccatagataggcttgcattactgaatgaggtaagcctaatcgattttcgagagttttcgattatttatgtgctgaaagtgaaaggtggtggtgacccgatttgtctatcccagggaaaagtaggacataacctgaaggtgttccagagactggcaacgactgtaaaagaaatggccatccaaaagtgtgtatgaaataagcttctcaagaaatgtatttttgtgtgtcaaatgtccaaatctcaatttccagtatgagtctgtataacaaaataaaaaataaacatgaattcaaatgatactttctctgagactc

SEQ ID NO: 147551 - DNA, 2316 bp, Arabidopsis thaliana landsberg
tattgagtctctctctccttttcatcttctttaacgcttctcttttccagaacttgctctctctctctctctctatcatctcctcaccgcttcctaaatctctatagcggtcttccttccctcctttgtttccgggctgttccttaatcactatctctttctctttcttctgccatcgccaaaccttatctgggttttgcttcttatttggtaagattggatttttctcccttttgattttgtccttcttagatcgtgttaattgatcttcatccccaagtgatccttcttctatttaagtttgatgatgattttgacgatttgttttttttgttactgctaatcttatttggggatccttcttgtaggtgcactgtgtcaattttgtgtgtttattgagtagttttgctactgactaatttgattgaaatgattgtgcgtatctcgattcactgttttgtttttttgcttcgtcggtgtaacaattcagaggtgattgtttcgattgcatttaacttgtcgttttgatcaattgggtttgattcacttgtctaattgtttttgatgtttgaatgctaatctccttactatagtcactatctcgtgctactagatgtacatgggaatttgttaatccattctttatttcaaggctaaagttcatgtttttggcattcaaatgaagtgaattttgaatttttcagttttttgtatggatctaatgtgcagtcacttaacgctttttctcgtttacagaagatttatatgggctgaactaggaatttcatgggagttgtggaggatactgaacctcctttgaaacgtgctaagaggcttgctgacgaaccgaacggcttctccgcgaactcgtctgttagaggtagtagtgtgaacagcaactctttgggagacctgatggcaaggcctctgacctcccaaggggatgacgaaactatcggctccaaaggggtcattagaaaatctgaattcgttaggattatcactagggctctttattctcttggatatgataaaaccggggctatgttggaggaagaatccggtatctctctgcacaattccaccattaagctgtttctgcagcaggttaaggacggcaaatgggatcaaagtgttaaaacattgcacagaatcggtttccctgatgagaaggctgtcaaggctgcgtctttcttgctcctagagcaaaagttcttggagcttctcaaagttgaaaagatagctgatgcgctacgcaccttaaggaatgagatggcacctcttcgtattaatacaaagcgtgttcatgagctcgcttcctcccttatatcaccttcaagctttatatcacataccacttcgactccaggtaaagaaagtgtgaattcaaggtctaaggttttggaggaactgcaaaccttgcttcctgcttctgttataatcccagaaaagaggttggagtgtttagttgagaattcacttcatattcagcgggattcttgcgttttccataatactttggatagagatttgtctttgtattctgatcatcaatgcgggaagcaccaaattccttctcagactgctcaggttagactaaacactctgctgtgaatgttacttccgtttccttcttgttgttggatcgtttcttcgtgatctgattcatgagtttgtcggtactataagagatttacatatctttagctgagatgtttacagtacaatgttctgcaaacgtttccacttccttgacaggtcattgagaaagatatagaagatgataattgtctcaatctgatgcctattttctttttcggttattccttttccatcattggctatgtagtacattcttttctttttgctgtcacctgtacccatgttcctctgattaactaattacttgtgtggcatctttttctggttgtagtttagtcagacttgcagtgcatgtgtgcttactgacttaaatcacattcgttaagttctctctacgtgaatggttcagatcttggagtcacataccgatgaagtttggttcttgcaattttcacataatggcaaatatttggcttcatcttccaaggatcaaaccgcaattatatgggaggtaattctgactgaccaattaaggcttgcctgaattgagttttggtaacctgttcaagttttgatttgttacctattccaattgaggcaacctgtttgctgattcacttagaatgtacttttcagatcagcgcagatgggcacatttcattgaagcatacacttgttggccaccacaaacccgtgattgccatgttatggagt

SEQ ID NO: 147552 - DNA, 932 bp, Arabidopsis thaliana landsberg
aaaagccctagcttcttcttttttcgacgatcaaaagtttcgatttttcagcagcaagatggtgaacaacgttgtctctatcgaaaagatgaaagcactctggcactccgaggttcatgatgaacaaaaatgggcggtgaacatggtaaccttcatacattctctctttcgtttaattccgacttgattgtctattgaatatcgaagtctcgattctcttgtatgtttcatgattagattctgggctttcggctgaatttaatgagttgtacagcgattttgaattacggtttaggatttacaaattgattcaattgagcgtacaatgtgattcttttgtctttcttatgaaattgtgtgttcgaatgggaattgaatttaatgagttcgttttgggtttcagaatttaacgtaggattgattttctctcctatgcttcgataggccaaataagatgaccttatcttatctctgtgtcttcttcttatgaaattgtgtgttcgaatgggaatgttgggtctcttagaggtttagggtttatcaatcacaagttaagttcatgcctttgaagtatttggatgttcgaatgggaatttggggatgttgggtctcttagagatttagggtttattatagttcatgcctttgaagtatttggataaaaaactgtctcatacgaattccttttggttgcagaaacttctgcgagcacttggtatgtttgcaggaggtgtcgtcctcatgcgtctctatggggatctcatgggagtttgacaagaagaatggaggatcacgggagttcgagaagactggaggagcctatctttagttttcactctctcaaactcttgtattttcttctctagaattggtgtgaactcgtttctgatttgtgtcttgggatgctataaaagagttaattttccattcac

SEQ ID NO: 147553 - DNA, 1622 bp, Arabidopsis thaliana landsberg
atcaattagctgggacgatgcattcgcgttgtcaagaacttggaagctgaaacaaatgggtgtgtattatgcaggtaaatattctgagtagtctaaattcttctgttaatgtgtcttatgctaaaatttgtttgacaactctgcccttaaagttttatgggtgtcaccttttctgagagaatcaggtctatcttaaattaattgtttcggaagaacgctaggtctcttaaaagtattacatgtttcgatcgaccattatgtctatgttaaagtgtcttaagagtagaggttttgatgtgatagctgcattttgtatgtctggccaaatagtaaatagataaaactaacctggtatatatttttataatcttagctaataaaagattttgtctgcagtggttctgatttttgtagatcaggatttgggccgcggacaatcataatatgtgatcaggtactttctcaatcgtggcgagatcttaaattagattattctgtaaattttatatcaaactatttatctctattttgcaacagtgtgaaaaggagtaccacattggatgtttgagtagtcagaatattgtggatttaaaggtaaccacatatagcttcaaccccaactcacaatcttctgcgttgacatagattggatcattatctttattgtctgccctgatttcaacttacacggggtatatgattttctgacaggaattacctaaaggaaactggttttgctccatggactgtacgaggatcaactccacattacaaaagttacttcttggtggggcggagaagctttcagattcttctttgggaataatacagacgaagcaagagagaaatgatgtatattccatcagtgatcttgacatcagatggagactgatcagcggcaaagttacttctcctgaaagccgaatgttactgtctcaggcattggctatttttcatgtaagtgcctctgcatttcaaaacttagaattaaatctttatgtgatggcaatttctgtggtttgatttgataattagtactgctaaaacaaaggaaaaatctgtttagctcattgctgattctctttccatttaatcttgtctcggaaattatggggcagggtaactagcaaaatgctgtacaaaatacacaataggccaaggaaggttacataagtctatcttaaaagttgaatcatgtatgtatatatgtatgaaataaattatcttgatttggttagtatgtacaaatatctctatttctatgcctacaatttgaaccaaaggcataactatgcagaagtttatatctctctctgcatttttaatggtcacatatgacacacattttttctcaataggaattagctaaactttaccatcgtgccctaagtttatttcagtgtcttccttacaggattgcttcgatcctatagttgatccactttctgggagcaatcttattccgagaatggtttacgggtgaggactcttccattaatgccctcttcaagtagcctgactttcaaataccatcaataacaatcacaagtgcctttttcgtttaggaagactatgcaaggacaagactacgggggaatctgctgtgctgttttgactgttaa

SEQ ID NO: 147554 - DNA, 870 bp, Arabidopsis thaliana landsberg
tttaatttttgatcaacatcaacagggctttgggggcttgagttgacaacaaaactctccaatggtagctcccagtaatctgttacttctcgagggtaacccgcagtcatcatctttaccctcaaacccgggtttttctcctcatttcgagatcagcaagcgtctagaacattggtcaaacgctgcattgtcaaccaacattccacagagtgatgttcattcaaaacctgacaccttggaatggaatgcgttctgcgactcagctagtccgctagtaaacccaaacctggatacaaatccggcatctctctgcagaaacacgggttttggatccacaaatgctgcacaaacagacttcttttatccattacagatgaatcagcagcctgcaaacaactcaggtccagtgacagaagctcaactgtttagaagtagcaatccaaacgaaggtttactcatgggacaacagaagcttcagagtggtttgatggcttctgatgctggttccttagatgatatagtcaattccttaatgacacaggtattgtatacaataaaaaccatttactttttgcaccttattcttttggagatttctgaagatttgttactttgactgtaacaggaacagagccaatctgatttctcggaaggtgattgggatttggatggtttagctcactcggaacatgcatacgagaaactccattttcccttttctttgtcagcttgagaaacctgttttattcagacacaatcaattattattatcttttggttctgtctcttctctcttctctgtaatgaaagtgtaagctattgtttaccgctcccccactggtttgagcaacttaggaagatccaaatcca

SEQ ID NO: 147555 - DNA, 1338 bp, Arabidopsis thaliana landsberg
cttaggttggtgggggactaagagactcagaatcaccagatgatatctactgttggcaaaaaccagaagacatgtcctacgaccgtcccgtcctctcttccacttcggccgctgaccttggcgcagaagtttctgcagccttagctgctgcttcaatcgtattcactgacaaaccggactacgccaaaaagctcaaaaaaggcgcagaaactctatatcccttcttcagaagcaagtccagacgcaagcgctactcggacggacaaccaacggctcaagctttctacaattcaacaagtatgttcgacgagttcatgtgggctggtgcatggctttactacgccactggaaacaagacttacatacaattcgccaccacaccgagtgtacctcaaactgctaaagcttttgctaatcgacccgagttaatggtaccgagctggaataacaaattacctggagcaatgttgttgatgactcggtatagattgttcttgaaccctggtttcccttacgaaaacatgctcaataggtaccataacgctactggtatcaccatgtgtgcttatctcaagcagtacaatgtctttaaccgaacttcaggtgattaattactctgctttactctgtttttcgtttgtgtgtggtcttgaaaatgacttgaaccgttttgtggagaaaattttcaggagggcttatgcaactcaacttggggaaaccaagaccacttgaatatgtggctcatgcttccttcttagcttccttgttcgcggattatcttaattctactggagttcctggatggtactgtggacctacatttgtagagaaccatgttctcaaggattttgctcagtctcaggtaagaatggagcctttaaaaacaaattatgacttatttagaacatatcatgattatgttgtatgtttgatcagattgattacattcttggagacaaccccttaaaaatgagctatgtggttggattcggcaagaagtttccaagacgtgttcatcaccgaggcgccacgatcccaaacgacaagaagaggagaagctgtagagaaggattgaagtatagagacacaaagaatccaaatccaaacaacatcacaggagctatggttggtggaccaaacaaattcgatgagtttcatgacttgcgaaacaattataacgcaagtgagcctactctctctggtaacgcaggcctcgtggctgctctcatttccttaaccagcagtggtggccagcaaattgataagaatacgatgttcaatagtgttcctcctctctactctccgactccaccacctcctaaagcctggaagccttga

SEQ ID NO: 147556 - DNA, 2215 bp, Arabidopsis thaliana landsberg
gttttgcagagtagcatcgagagagaaaattttctgcaaatttggaatcttaaagttaagaaaatttattttcttcgaaaggtgaatctattcctctgtcgtatcgtctaaaagctggtaatttgtgtttcttctcttcaaattttctatatttcttcagactctcacaccatttctatcagatgagataatctgccacattctatctttccttccgacaaaagagtctgctttaacatctgtcctgtcaaaacgatggcgtaatctgtttgccttgacatcgaatcttcatttagttgatgatgatctagaagtgggtggttgtggacaaaccctcatcgattttgtggatagagtattggctgtgtcaagcaatttgcccattagggagttttctataaaatgttgaacacaatttgaattttcatagggtaaggaaggaggtaagggcagagaggagggaaagtatgggtctttagaggttgacgataaaaaaaaattcaaattgtgtttgattacataaatttacttactgaatgagtagatttaacagccatttgtgttaactacaagagagaggttttatgcatttggacttcactgttactgttctaaactctctagatgttgaattgtttttgtaaatctgaaatctcagatttgagtctgacaatgtcaatgtcaatctattaagaggttgatttttgagtgtcttttggtttgtttttaactccccgcagacccgcgaatttaatctcaaggttaaggtggtgtggaatcagccttaggggatggcgaagtactttgacattgatgacatacttatagaggaagaggtcacctttattctccaatagctttgctttagactctctttatcaactaagaaatctgatctctattgttaccttgttgcagtttgtaccggttttattccataaaacagcaaacggagtgactattgatccaagtgcagaaacaaattgtgtcagtattctccttcctagtgcaaaagtttgtaatggatatatcatattttcctttctgatatgatttttgtgagattttctggtgcaggctgaacaaggctctaaagttgaacttcccttctggcttgctcatgagttgcatttgaggcaagctgttaccataaaccttcctccctgttttgaccaaaagtaagcattctgtagcttaactgtaatgttggcattgtcaatttgattctctttctttctttttcttctgcatctatggtcagatggcctttaagcagttgcttcttttaccctgtagcagtcttttcatggctttgtttgttttgtgcaggacgaggcttgaagttcaggctgatgctgcatacgtcgatcttagatcgcgatgtccatacttttatgaatttggatgcaagatagagccactgtgagttcctccttttaagactctgtccactcacttccccttcattttgatgttgtcttatctcttggcttcaagaacaaaagtcggtttttctggtgtcaatttctaatccttgggaaagatagctgttgtagaaagatttcaacgtgaattgagcatgaatatatcaagcaagttgtctaatttttacagtgtctggattaaagtaaagctattttctgtggtggtaatcatactgattttggtctaaacagggtcacagatagaacactgggaatcttgctatcgactgcgtttaagatcagatacaaagaggcactgacaaaagtatacacagcagctcacataacagcttccaagtacttgtcgcttttaacaaaagaagaaacaaactgtaagcctttatgttttgaactctaatggtagtgaatttagtgtttaaccatctcaagcttgtaccaaaatgaacaatctgtttttgtttctgtgttctttttgaagtgtatgaagcagctcacttgtcgatgacagccttcaagaagtggagaacaggtggtcctagattccagagagcttcaatactcggaagaaaacgcaaggattctaattaagttccctaaaactctttatcctcatccttaccaagagggtgattgtgttatattagttataacatgtcaaaatgatgcaatggcaacatattgtggtctgaatcaaattgcaaatccttttgtgttatgttctcttcagtaaactcaaaatcatatccagatggtgttatcagttatgccat

SEQ ID NO: 147557 - DNA, 1643 bp, Arabidopsis thaliana landsberg
atgtaccaaggaagtaaagatacgacactctcgcctatatgcaaggtgagagatcctaagagttttggataatattactcttgacttttcaactcttctataatcttttcatatgaaaaagaaactgaagccaaagagtagttatatactctgctgttcaaaatatatcagtgcagctttgttctaatcatcaacctattaagaaaagagtaaggaaacggaatatgaattcagttttgttttcataaggagaggacttttcacatgagtcttggaccaagcatatggatatttctttggtttcattttctgtaagtcaatagtaatcatgttctctaatctgacattcatattgtgcaggttgtaaaaactgtatatgcatcacctagtcgtgttaattttcatctggactcaaagaaggcaagtatagtcgcttttctcataccaatgtttgtccttttggaatttgtgtttgatgtttccattgttgtttacctaggaagtggaaacaacacctgcctacccagaaatttgttttgccgtagatgattttgactcaacctttgatgctgtggtaacaaattttcttctccctttttgttgtattgtccttccaactgttatattatgtagtcatttcgttcaaagaaactctaaacatgaatgtcaaaggaattatgacattttgttcataatgaaatcggctctggaagaatagtttttagttgaggaaatatgcatgaactcccctttgtcactagggtgaagttacgtgcattcttagtttctccttaactggatagtaaaatcttttgtaggatacgtttgttggcttttggtacaggactggaggatccagataatattatttcaactacctcttgcggtgctttaacatcctctccttatttgagtttagtacctgctatttattatcttcttcagaggattggcctgtcttcttctttagttttgcttaggcgtagaggagtttggctttatgcttcctataaataacttaagtcgtatggttaggtttcatgcatggaagttgttatactgaccatagtttttttccaaccttgttcattggctttgtcattgatgttttcaggttctgacagataaagatcattgctattgcgtactacttaattctcacgatggggcagcctttccaagtgcaactgttaaagattcgagtgattctaatacgaatgctgaccctagaactgtgaaagatcctaaggtctagttttttcccacctatgcttcactattttcagcagttgctgccaatcatctatcaattattcatttgccacctgctatgagtttcaaatagattccttaatttgtggttaatgcttgaaaatatcttttaaccatgtcatacagaggaatatgtcggtagtttcactgatgcttgcaacggtcgatcttaaacaaattaactaaagtattgtttgtgatttttgtaaagatgatttaacttcaagctcaatggttttcaaaaggcctatggacacattacatggtcgtgactttctaatgagaaagaaattgacatgctggtgcttttggttgcaggttactctgttttctgggtttgtcagctatcagatggttcgagaagcctatga

SEQ ID NO: 147558 - DNA, 2505 bp, Arabidopsis thaliana landsberg
  unsure (1)..(2505): unsure at all n locations
gtatcttgatatgcttcctactcgatttggcaatcctctttggttttctgatgatgacatccttgagctaaaagggactaacttgtatcacgcaaccgagttacaggtctcaatcttgatcatttattcctgtcttatcatatcgtccttaaaatagcaaccacattttctcttttcatttattaaacccaataaccatcgtgtattcattctcagaagaagaagttgctctcgctttaccatgacaaggtggaggtcctggtgacaaagcttcttattttggatggcgattccgaaaggttgacatatttacactacttttagaccaaattattgttcattgataatcatattttgttttctctcttcgtgcagcaaggtctcctttgaacacttcctctggtatgtttggtactggtgttattccttgttagtagaaccagacttttgtgtcttgtaaagggctgcttagtgatcttgcgacttttttcaattatgccagggcaaactctgtattctggagtcgcgccttgaatattcctcttccacattctttcgtgtttccacaaagccaagatgataccggggaatgcacatcaacaagtgagtcccctgaaacggctccagttaattctaatgaggaaaaannnnnnnnnnnnnnnnnnnnnnnnnnnattctgtgtgaaatgcctcttttttaattattattattctatcatgtaacgacaatttcatgggtttcttcattttctgatgggtagaaattcaggctcaacctgcgccatctgtaggatccggagatacaatatgggttgaggggcttgttcctggcattgacttttgcaaccatggtatgccaatctttgtttcaaaaagactctattatcagtttctccgttccataatgttgatatggttaatgagtatatcccagtgtgatgtgatataatgacctatggttatggcagtatagatttgaagcctgtggcgacttgggaagttgatgggatcggatcagtatctagggttcctttctccatgtaccttctctctggttggccaaatatttgtttgagaaacatctcagctttctacaatttttcaatcaaacaatacagaacattctttttcctctcttctttttgatctgtatgcggaaaactaagtgctacaattctgtaaagcagttgctcaacgtcctatcccaaagaaggagatctcgatcagttatggtaacaaaggaaatgaggtaagatgttttgcagctatcttgtacaactatataacttgtctcttggtaaaaaatcacatctagccctttgtttgagtgatgtgccttcttgctgaatgcaggagcttctttacctgtatggctttgtgatagataacaacccagatgattatctcatggtaatatttacatccatcaacagttccctaccttttcaaccagtgatgtattatagaagtcttgagaatgatgacgagaaacataactttcaagatcaaggagatgctcgtcaattttgttctcacatctgttgttacgtttaacaatggatttattcaggtacattatcctgttgaggcaattccgagtatccctttttctgattccaaggggcagctgcttgaagctcaggttagcagtacaagtcttcgcactatcttacccgaagttttgattatagaccctataagacaatgtagctctttaatacatttatttccatgtaatatgtaactgtcgaactctaaaaaatatcattgcagaatgcacaactccggtgtctcttgccaaaatcggtcctaaatcatgggtttttcccacgaaccacatcagtaattagagaaagtgatgagaaggaaacagtgagatcctgtaatttcagttggtctgggaagcgtaagatgcccacatatatgaacaaactagttttcccagaagattttatgactggcttaaggaccattgcaatgcaagaagaagagatttacaaggtctcagctatgcttgaagaggtatgatcaccgttttttctttcttctgacatctgaaacccatatcctacacaaaaaatctccatctctgaaagagtgaaagtagtaacttgggaaacgaaggcggaatcataaatatccacagtttgtcttccactagataatgagacaaaagtattgttttcctgaaaagcttgttgagtcaagacaaggcgagcaaccttctgaaactgaggtcaggatggcagtatgggaagcatgtggggattctggagctttgcagttacttgtggatctccttaattcaaagtaagcagttgaatttgaacatggattcttaagggctaactaagatgtttgtctgtgggatgagaagaaaattacagacctcaatgctttttgtcctgacaggatgatgaagctggaagagaattctggcactgaagaacaagatgctaggctccttgaggaggcgtgcgtcttagagagccatgaagaatcgag

SEQ ID NO: 147559 - DNA, 413 bp, Arabidopsis thaliana landsberg
  unsure (1)..(413): unsure at all n locations
gtcaccggaatcactcaagaataggatcttgatctcagcaaaaccaccaaaagagtatcttcagacccaaatctcaaaaggttcaacaacggatgaatccactagagctaaagtaagaaataaaaacataaagtaatcattagtgtttcttgatgttttctgagtgtcttgtgttgtgacagaaaatttcggatgcagaagaacaagttcaagaagaagatgaggagagtgtagcgattgaatacagagacttaatctcgattcacgctgggaaccgcaaaggagggttgaagaattgcttgaatgaagatcctaaccgagtcatacggttaagcatgaagngcaatggcttgagactctggcaaaaacccgtggacccgatttagtaaagttcacgcagcggaatacttttg

SEQ ID NO: 147560 - DNA, 482 bp, Arabidopsis thaliana landsberg
gtgttagtgacaaggattttactgagccttggtctgtttacacggtaagaaggaaggcctctggacaaaaaaggagtaaagacgcatcttcctctactagtgcagcagctcgcattcgtctcgacttgtcatcaagctctgggtatgaaacccattcgatcatatatttgctatgggaaaattgatttggcatggctaatagtagctaatgtacatatggaatcaggatagaatgtagttcatgctgactaatttattgatgcctgttcttttgaaagaatcttgtcagtaagaaatagtagatgagataacttttgttagtgttacagttaactttcatcaaatttgtttagcattttgtgggctgtttataatcaaccatgttgttgttagttaattttctttgaaatttgtatcacaggaagaaaacacgtcaagctagtgaaaacaaaaagaagaccttgaaagtggctccaaaaaag

SEQ ID NO: 147561 - DNA, 3206 bp, Arabidopsis thaliana landsberg
  unsure (1)..(3206): unsure at all n locations
tccacttcgtggcgcaaagggaaaagacagtaccactactgagtcatatgttccttatggagtcattgagaactcgtttctaacgggtctgaatccattggaatcttttgttcattcagttacaagtcgtgacagttcattcagtggtaatgctgatctcccggggacactgagcagaagattaatgttcttcatgcgggacatatacgctgcttatgatggcactgtgagaaattctttcggaaaccagttagtccagtttacttatgagactgatggtcccgttgaagatatcacaggtgaggcacttggctcactttctgcttgtgcattatctgaggcagcttacagcgcgctggaccagccaatcagccttcttgaaacttcgccgcttctgaatcttaaggtcttcctcttcttattcttcgcttcttgatttattgaatcatttccacttaagtcgtttgcatttctctaactagattttatctctttctacagaatgtattggagtgtggatcaaagaaaggtcaacgagaacagacaatgtctttgtatttgtctgaaaccctttcaaagaaaaagcacgggttcgaatacgggtcacttgagatcaagaaccacttggagaaacttagtttctcagagatcgtttcaacatctatgataatgttggtaacttttaactgtctatatgaatctttttggttaagggcttctcttaacaaatgtttattgtcttcttggttcatagattctctccaagttctaacacgaaagtaccgataagcccgtgggtttgccattttcatatctctgaggtataaactcatacccatataaagccacaaacatatatatatgtgtacagattctaatgaacctcttctttaatttcacagaaagtactgaagcggaaacaactgagcgcagaatccgttgtttcttctttaaacgagcaatacaagagcaggaacagagaactgaagcttgatatagttgatttagatatacaaaacacgtaagaacattcttgaatttgtagcagacatgttttgtttcgcttttatgtctattagaaactgatttgttatacatttatgtgttgtggattagaaaccactgctcttcagacgatcaggcaatgaaggatgataacgtttgcatcacggtgactgtagttgaagcctcaaagcactcggtttnnnnnnnnnnnnnnnnnnnnnnngttttgatcccttttcttcttgactctcctgtcaaaggtaaagccggatgaaaaataaagacgagcgagctgaacagatcgttgttttgttattgtcgttcttatgagttctatcatctgtttttgcaggtgatcaagggatcaaaaaggtgaatattttgtggactgaccgaccaaaagcgccaaaaaggaatgggaatcatttggcgggtgagctgtacttgaaggttacaatgtatggagatcggggcaaaagaaactgttggaccgctcttttagaaacctgccttcccatcatggatatgattgactggggccgaagccatcctgataatatccgacaatgctgctcagtttatggaatagatgctggacgcagcattttcgtagcagtcagtatcggtttctttaacaatttcttcattttcttggtctctctcgcagcttctaaagtttgaagttttttttttgtgaccgcagaatttggagtccgcggtgtcagatactggtaaggagatactaagagagcatctgcttctcgtagctgatagtctctctgttacgggagagtttgtggcattaaacgccaaaggttggagtaaacaaagacaggtcgagtccacgcctgcaccttttactcaagcatgcttctcagtatgtaacaaaatcccatttcttttggttatacaaagcttatataggatttcatttgatacttagtgcttgcttaatctctgcagagcccaagtcaatgctttctcaaagctgctaaggaaggtgtcagagacgatcttcaagggtctatcgacgcattagcttggggaaaagttcctggtttcggaactggagatcagttcgaaatcatcatttcgccaaaggtaaattaactttacatcttttgatccgtttagaccacataacttcagtggtctaatttgtgtctttatgcatgccatcaggttcacgggtttactacaccggtagatgtgtatgaccttttgagtagtacaaagacgatgcgtagaacaaactctgcgcctaaatcagacaaagccccggtcccagcctttcggtttgctacattccgcattcctgaaagatatcaaggtactcgatgggaaagggattcctatgtcactgcttagaacgatctttacatggaaaaacatcgagttgctttcccagtcattgaaacgcattctccacaggtaagattctactgttcaaaaaaccgtaaagattctttcttccttttggctgatgcaaattacaatggcttaatctttgttagttacgagatcaatgaactgttgaatgagagggacgaaggacttgtgaagatggttctgcagttgcaccccaacagtgttgagaaaattggaccaggcgtcaaaggaatccgggtaaatcaaggctcatatgtttcagaatccttaaagacataaagatcctgaccatgtttcttttataggtcgctaaatcgaagcacggagattcttgttgcttcgaggttgtaagaatagacgggacattcgaagacttctcataccacaagtgtgtattgggagcatcaaagataattgccccaaagaaaatgaacttctacaagtcaaagtatcttaaaaatggtacactcgagtccggtggtttctccgaaaacccgtgaacagccaagtaagagtaaaaaaaaagactggctcttctgcggtataatatcgaacaatgtatgaagttgtatgtaattttgtttaaaaagtgattagatagatataggggaaaagccttttggctttgctctaagcttctttttgctcctttcactatgtaataccttttgccttccacctaaaggcttaaaggttaattacttagtggaagcagcaacgagaagctggcaaaggaggcttctgttctgtttctgtttctgtatgtaaaccatgcaaattccggtttgactatgaaatatccggttatgttt

SEQ ID NO: 147562 - DNA, 277 bp, Arabidopsis thaliana landsberg
tgctctgctttcagtttctgcaagatgattggatcgtttcttacaagaggattggtgtaccaaaatcatattctcatttgtttgctaaacgatatatgatgtggtagttactgttgattagttctccttaatttactactatatttgttataggatggtgttgggctatgcttaccctgcgtatgaatgttacaagactgttgaaaagaataggcctgaaatcgagcaacttcgcttttggtgtcagtactggtatattgtttatagccttttcctg

SEQ ID NO: 147563 - DNA, 2010 bp, Arabidopsis thaliana landsberg
accactttttagttttgacgattagatgatcaacgttgctggaagtaggaaaattagataagagtactgatcaaatcctaagagagaatgtccggcgtcacctcggagcctattgctatggatgccactcggttccagcacactccttactactggtattcttcttcttttaaaacaaaatttctcatcgatttaggtttcttcaaattatagaacggtctcttctacatgttctatgtaacttccgaatccagattactcgttttagagggttgtagttgattattttgacttatgggtaggagtacttaagataaagatgttgactttttcttgtagcgaagagaatgtgtatctgctctgcaagacgttgtgcgagaatggtgtagcggaggcaacgtgttctgatttgtttgttgtttttatctccaatgagaagaagcaggcaagcttgttgctctttattaataattcttatctttggtcttgtttcatgttggaattacatcaccgttacgaagtcgtttggtaatcagagtgtgtatatttcaatgtccattgtactgatttgattttcttgtaggttccactttggcatcagaaagctagtaccagagctgatggggttgtactgtgggattatcatgtcatctgtgtccaggtaaacctataatgtccaaaccagtgatgtcagtttttagaattaaacttggtttttggtttggattcccatgaatattgattacaggaagaaagaaagtgattctgagcctttggtgtgggaacttgattcgactttgcctttcccttcacccttagcctcatatgtgactgaaactatccagccatcttttcagcttttcgcagagtaccagaggtaatctatatctttcacatcactgtaccaccaagtaatagatatcagggtgccaaagcagtagcctttacttttctatcaccgagaaactatataggcttctttatcttcttgtgttcctgaaccggatatttatccgcaaaacagtttatgaaaggcataaggagcaatatagatttggataggaaattcagcatcatgtaattgtaatgtagttggttttttctttttgttttgttgagatcaggttcttccgcattgttcatgctcctctgttctttaagcatttcgcttccgatagaagacacatgaaagaacctgatggaagttggactgctcaacctccaccctatgaacccattgttgcccaaggtaagatgttactttttaccctttcatcaacaatattcatctgctcagctcgcttttgtcttacttctgaagatggaatcttgcacaatttgagcgagtacattgccatgagcggtgcggatacattgtcaagcttggatcccgaaacagtgacagcagcaatttcacagaaacttggtgttgtggtgagccacactcagcttcaggatctcttcaccaagcttccttagcattccaatgtctttttcttatgggatcaaaactgtgtcattacttgtatattcaggcatgttttcagttgtctttttgtctttattgatgaagcagagactgattttagatggggaaatatcatacactcacaaaacgtatggttacaatggaacattacatgactttcttcacaacccccagaagaaaaaaattctgaaaagggaaccaataagaaaagaatcaaaaacacaatttttgtataactctgtttctatcattgcattactgcaagctctataccctgagtccatcataccaactccatcagaagcgggtcgccctcagccatttgctgaaccaatttgatgaaatcttgttcgcttgatatgctccacgggtgaaccgcaggtgctttagcagaatacagactcgaagaagtgttaaacgaagctgatttcctcttatataccattgaaccgagaaccgggtcaaaattctgaggagaacccacagacaagaagaacattggcacagccactaaataatgc

SEQ ID NO: 147564 - DNA, 496 bp, Arabidopsis thaliana landsberg
  unsure (1)..(496): unsure at all n locations
atgtcaattctatggctgacctcattagaaggagcttcaacttttctctgatcttaagnaggtatagttatatccccccccccctctgttttttcctcttcattgcacatttctagtctgaacactggttaaattggtccattgttttgtgatttaggttatgatattcttcagtgcccatggtgttccggtcagctacgtagagaatgctggagatccgtaccagaagcagatggaagagtgtattgacttgataatggaagagctaaaagccagaggggttcttaacgaccataaattggcataccaggtttgttctaatcatccgatataaacgttgcttggcattacctctttatgtcaagtcctctaattgattcttgcaataatcatttcttctccagagtcgtgttggccctgttcaatggctgaagccatacaccgatgaggttcttgtcgaccttggtaagagtggtgttagagtctacagccgttc

SEQ ID NO: 147565 - DNA, 232 bp, Arabidopsis thaliana landsberg
agaaaacgctgaagcaaaggtggagtcggatgctgtagctgcacccgaaaaggttgaggttgcagtgaaagcggagaaaaaggctgaagctgatccagtaaaggttgaggctgaaccagtaaaggctgaggctgaaccagtaaaagctgaggctgaaccagtaaaagctgaggctgaaccagtaaaggaggagagtaaacaagaagagaaagaagctgttgtcaccgtttga

SEQ ID NO: 147566 - DNA, 623 bp, Arabidopsis thaliana landsberg
acacaaacagtatttatttttataaacgtattgacttgtcgactgcaaacgtgattacgtgaaccttactgttaataatacaaaaatcacagctctaatttgccaacccaatccagatctctctagttctcaacttctcatataattattcattaatatatttcttttgagattttggttgattttttgatatataaatattggacttgccattttctattacaaccatcaaatctcaataaagcaaaacgaacaagaaaatggcgagcacggaagctctcttacccgtcacgtccctacaagatccattatctgagtcaagatccgaccagatcccggagacccgtcggagacgacccatcaaagttcatcttgcagtctattccggtttgctcttgatcgctttgtacgtcactctcatcgtcacacacgacggctccaaggctgaaatagctacggagtcacgtcctcgtatggccggcgtgtcggagaagagcaacgacggggtttggatatcatccgatgatcggaaagttgaagcgttcccgtggaacaatactattttgtcatggcaacgcacggcgttccatttccagcctgagaaaaattggatgaacggtacg

SEQ ID NO: 147567 - DNA, 663 bp, Arabidopsis thaliana landsberg
aaaaccaaccaggcctaaacggctacttgttaaattgccagagcctaattaggtcaagaaaacatgttttaggtgaggaggtggttgcttttaatctccatttttataggtaacaatgtattttcaatttgttcaactatttagcacaatacagtatagtacataggaaaaatatgcatgttatccttcattattacaagcataattcttataagtccagtaaatttttcataaaacttaaatcctcatatgactcgtttgataaatcatctttaccaactagtcttttaagtatttaacatttgcaataatcgttcaagaacaagatcgatggtttttatccattgcagcaatcgggattcgaaccactcgagttatccacttcagtgtcttttaagaattgaacctcacatccatttggaaacatgagtacaaagtttcgaagtattgtggttcctatcttcattgaccaccttcaaaccatatataaggtatattacatgtaagtaaaaactttggctgcaagcaaaaataaaatctaatcacaatcattagttaatgaaaatgaacctgtatctagacaaatgatggataaaaatggccatttgcagcttagcaaactcagctcctacacattgtctagagccagcaccaaagggaatg

SEQ ID NO: 147568 - DNA, 506 bp, Arabidopsis thaliana landsberg
gacgatttagtgaaatccgatgtcattttgggaaaaaccattattgaggtaacttccatgctttctagctgagttatatgacttatattcacaagtgcttcttctatggttttggatttaagataatgtatgaaatctcgggtgttgggggttttttgagtgacactttaagttcattttgtgttcgtgtttatgatttacaggctcccgtgctcttcagaggagttgcacattcgttgaaccctactaacaatctggtaagtcgaacatcatactcttttcttgcattgagtagatgactataagtacaagattaatgtttcatatgaataactatacattgatctgggaattaactttttgctaatctatacctcatgctccattcctaggttttgaaagttctttcagcctctccatcagcttattctgctaacccaagctcgaagttgtctagtcccccccagctcactgggtcttcaatttcgctagtctcggtcatgcag

SEQ ID NO: 147569 - DNA, 609 bp, Arabidopsis thaliana landsberg
gtaggattctccagtgttcaactacataagcaccctctctccaattgagtcggtcaaatctatctccactgctcaaacgtttagctctcttagtttcacatctcctcctcctgtttttacttctcctcacgtcatttctcacagagaatccagattcttcagatggtaaacaaccaaattctcttcttgttgttttagtagaggatgatgatgtttactgttgtaattggtgtttgttttttgttgttgtagtcataactctgttgatcgttcaaagcacttagaatctttagatggatctgctgttaaaggagaagttgtagtaccattagttgaagatctaaataaagaagcttctttggaagatgaagaagaaacttctgttgaaacgtcttctgagctgccacagatcttgaagttcgatagccaaacttctgagcatagtgattcaccttgcactgaagatgttgttattgaagcttcatctgatcctcctcgaggagacaatggttcgtcatccgaggatgtcacgatgggacttcagaatatgcttgttgttcgggaagggaatgacactcctggttgtggacgtttgatctcagatgcaac

SEQ ID NO: 147570 - DNA, 683 bp, Arabidopsis thaliana landsberg
atggaatgtgttgaaagcttgtctaagaacaatcataaactagagacacttcacatcaatggcgtcaatggctttaccaaacaacatctctcagcactgtatacttacctttcttccgagggaacgattgacctcgaggtctgtcccaaatgcgatgaagtaaggatgattccgtcttgctcaagagaatcatgtgtaagtataactctgtagataaagatcattgagagtgttttgtgattcttagtactaatatcatgtttttcttggttgaagaaccagaagcaacgcaagtgccgtggatgctggctttgtatccctagatgtgcagagtgcgcagtgtgccttgttggttcagatactgagagtcaagaagcagcgtgtggtaatgatgatgttctgtgtcttgaatgttggcttgtgcttcccaagtgcagattctgcaataaaccatattgcactaatcacagtagtcgtcgacatgagattgcaatcactgatgctgcatctcggccttcgtttgaatgtgaagcttgttactatagggcaggtacaaacccatatgaagtcgactatcaaatctaaacaaacactttgttgtctgcaactttgtctattttgtatatgacaagcttggattgtgaaatattcagccataaaaaagaaagaatcaagctttcaac

SEQ ID NO: 147571 - DNA, 309 bp, Arabidopsis thaliana landsberg
atgattctaagcaaattaccaggaaaacaagcattgatctgccgatgtgtctccaagacgtttcttagtgttttagactctccttgcttcatggagagacatcttcgtgatgatcatgatgacggtgaatgttgatacatcaattgggcctcagtgatcaaccggcccatttcaaggaataacgacccagccccgaccatcactttagaactcgagccggaccaccgggccgaaacccggcctggtcaagatgtgagttcggctgcgcagaaaaggggtactctcgggaattcaccttgcgtaccctac

SEQ ID NO: 147572 - DNA, 638 bp, Arabidopsis thaliana landsberg
ctccattgagaccttttcgacagtaaaccgattgcgatcaaattagctgatctgatcggaaaatcacaagaaaaccctagaaaactcctccggattcgaattctcgactcgattcaatgtatcaatggagaaaatttgacttcttcgaggagaaatacggaggcaagatacctgaggatgtaaccggagatatacaatgttgttccagtggccgtggcaaagtcgtcatcggctctaacgacggatccgtcagcttcctcgatcgcggtgtaaagttcgattccggtttccaagctcactcttcctccgtcctcttccttcaacacctcaaggtatattgatccaatccattcatcaaattttacaattcttcttcaaatttgttgtatgatttgcaaattgagattgtgtttgttgtttatcaattcatgctcatcgatttcacaattcctgttgattttgatgtttttacgcttgtcgttgtttctttcaatagcaaaggaactttctcgtcaccgtcggagaagatgaacaaatatcgccgcaacagtcagggatgtgtcttaaggtttttgatcttgacaaagttcaggaggaaggtactagttcggctacgtaatcgcctcaagtcgagcgtc

SEQ ID NO: 147573 - DNA, 1782 bp, Arabidopsis thaliana landsberg
gaaacctttctaattatctctggaaaattaaacaggtgcaacagtacaagcgtgacagagagtgcaatgctatcataggacaaacaagggaggacaagattgttcgccttgaaagtctcatggatggcgtgttatctaaagatgattttctggatgaagaatttgcatcactcatgcatgagcataaggtaaatttttgggttaccattatttagaagtttattgaatcaatgcagatatgttttcttacatataattgtgcagcttctgaaggacatgtatgagaaccaccccgaagtattgcagacgaggattgagttgaaacgagtgcaagaagagctcgaaagtttcaagaacttctatggtgacatgggagaaagggaagtattattagaagagattcacgatttaaaggcacagctacaatgttacactgactcttctcttacatctgctcggagaagaggttccttgcttaagctgacatacgcttgtgatcctaaccaagctccaacacttaataccattcctgagtcagtggacgagggtcctgagaagacactagaacaggaaagacttcgttggactgaagcagagagcaactggatctctcttgctgaggaattaagaactgagcttgataccaatagattgctaatggaaaagcagaaacgtgaattggatacagagaaaagatgtgctgaagagttgacagaggcaatgcaaatggcaatgcagggtcatgcacggatgattgaacaatatgcagacctggaagagaagcatatccaattgcttgcaaggcataggaggattcgagaaggaatagatgatgtcaaaaaagcagcagcaagagccggagtcaagggagctgagtctagattcataaacgcacttgcagcagaaatttcagctttgaaggtgcaaagagagaaggaggtccgatccttcaggtatgaaaacaagagtctccagtcacaactaagagatactgctgaagctgttcaagcagcaggagagttacttgttcgatttaaagaagctgaagaaggattgacatttgcacaggtactgttatagttatatttctaaaatctcacccatatcctatcatgtgactcttacttaaactttctggcttgtgtattcacagaaacgagcaatggatgcagagtatgaagcatcagaagcatataaaaagggggacaagttgaagaggaaatacgaaaccgaaatcagcactgtaaaccaacaacataatgcagagccacaaaatcccatagaatctttgcaagcttcttgtaatgacgatgctatggccaaatatgatgaaccatcagctagtgatggtgataaccaatggagagaagaattccaaccattttacaagaaagacgaagagttgtcaaagctcgctgaaccctcttggttctcggggtatgaccgatgcaacatataatttcgtttccacaacattatttttctgtaatgtgtaataggaaaaaaaagacatgttggggtctgatccgattctgtgagatatatctgaagcttgtactcttttcattggatttctaatgtgttacaattaaacatttttttgtactcgtccatctctcatctgaaagaggtctttgtttgattcccctgtagagattagtagagataaagaatctggaagatgtgtttcttatgttatgttgcacaaactcattttacagtttgattgttctcacggcaacaactctcctcgatcgtcaccgtcaccatcataatgagtaa

SEQ ID NO: 147574 - DNA, 597 bp, Arabidopsis thaliana landsberg
gcacagaaactgtactaggcatatctcttaacacattggaaatcaacgggacattgtctgtagatgataaatcattccaaggtatgcataatctccaatttcttaaagttttcgagaattggcggcgggggagtggtgaaggcatattgtctttacctcaaggcctcaattctttgccccgaaaactcagactactacactggtataaattcccgttgaggtgtatgccttctaacttcaaggccgagtatctggttaacctagaaatggcgtatagccagcttgagaggttgtgggaaggaactcaggtaatactattaagtaagattttcttcattacttaactattgtccattttaaaagaaaatcttgctcttctttcttcacttcgattgataaatatggagtaaacaaaatgcttttacttattgaatatgtgcattatttttttcatgttctgttttcagcaatttggaagtctcaagaagatggatctgtccaagtccgaaaatttgaaagaaattccagatctttcttacgccgtaaatctagaggaaatcggatctttgcagttgtaaatctttggtaacacttcct

SEQ ID NO: 147575 - DNA, 980 bp, Arabidopsis thaliana landsberg
aaagcacaaaacttttgcattgtcttgcaaaaataatagaacaaagaagtcgcagttgattttatggacggctaaggctgatgatgacctgacacaaaactccgatcgtgttcgattacaagtttagatttttctgagaacccttataattgtttcaacttttggatcttcacacgcataaatcttcgcttcgtctttcatcatctgttctcaagtttagagtctatagacaggtaaaggtctttgcctttgttttagttcaattatgatttctgtttatgttgtgttctcttcttccttgttttccagatgtagacacattatgggtttaatttgaaactcttgccaatactttgattcatactttcttatttatgttttgtccttgaatttggatttggttatttgatggcttaatctgtcctgtgtatctattgaattgctatcttttaagagtctgttgtataattgaatgcttctggcttcgtgatctggtctaatttacaagctggtttgtgaattgtgatagcctttgtttgttttcagagtctgatcacagtgatattgataaagtgtttgatctttaacttgcatgttatatctggaattaagagattatgttaatggtttttgaacctgtgttcattaggaaacttggaactttaggatttgattgaaaaagcaatcttgcgatggcgaataatgcggctgcttgtgctgagagggctacaaacgatatgctgatcggtccagattgggctatcaacattgaactgtgtgacattatcaacatggaaccaaggtaagtcgttttaatgactatagagatctactgatatttgattgagtctaggctaggagcctaggatgcttaaagttttgaccctgttttgtttctctagtcaagcaaaagaagcaatgaaggtagatcaagaaacggttaggaagtaaaaattctaaagtccagatggttgctctga

SEQ ID NO: 147576 - DNA, 978 bp, Arabidopsis thaliana landsberg
aatcgagatttgcagggttaaagggtgctgattctactgcatcttcgacaacctcgtcttcgaagctttatcaagagacttctatagatggccatagctcccctgcttcttcatctgctcaaagcaagcagcagttcttctcaccagatcccttaccacaaactgctcagcggtctaaagaaaacgtcacagtgacagttcgctttcgcccactcaggttcttggtgatatgtttacatacgcttgcaaaaattaggttgatgtttgttctgcgaatttgacataccttatcctcgatgtagtccaagggaaattcgccaaggggaggaggttgcatggtatgcagatggggaaactatcgtgcgaaatgagcataatccgacaatagcttatgcctatggttagtcttgacagtttgattagtgttcatgacttcatgagtttctgtaaccatcataaatcttgttctgtggaatggattgaagtttcatgcatcatgaatcaagacctaaattaaactagatatcaaggtccaatctgccatattttttcttgaaatttctgttgtcctttcttgcagatcgtgttttctggcctactactactacacgcaatgtctatgatgttgctgctcaacatgtcttaaacggtgctatggcgggggtcaatggtatggactaaacacttattattgccctctctagttaagactttattcttagaacagaaaaagatatttttagtatcaagcttacccgagctacagtaccatgaacagttgcatgaccattcatttagaaaatgagatctttgagttgccaaactctatctagtgcttgttctagtctctagaacaacctttaagttagattttcttgccaatttgattttattgtagtgactttgagtgttaattcaaccacagggaccattttcgcatatggagtgacaagcagtgggaaaactcatactatgcat

SEQ ID NO: 147577 - DNA, 1330 bp, Arabidopsis thaliana landsberg
ctcagatctcacgattttcttcttcctctcacattaacacacatcatcatgagattaccaacgacgctgctcctctttatcggagctctcatcttctccggcgccggaaatgtcagatccgatgcctccgaccaccgttacaaggatggcgactccgttcctctctacgccaacaaggtcggcccctttcacaatcccaggtaaatccaattctctaatctcagttcctttgtcggtagcttagatctgtgattctctttgatgagtgataaattgatcgttgcaaatttctgtagaagcttgcgttggtattgaatttttgtatctgaccttgaaaaaattcgattcgtgttcttaaaatgtgatagatcttcgattgcattgttatatgactgatttttacttgtgtttgatgattgttgcagtgagacgtatcgctatttcgatctccccttttgtattccaggtacgagcacgctcaatgttgtctctgttatgtgtggtttttcacttttttcggatttgtgtattttggtgtcaatatgcatttgttttggtttgtgtagagggtgtgaaagataagaaggaagctcttggtgaggttttgaatggggataggcttgttagtgctccatacaagcttaactttagagatgagaaagactcagaggtgtactgtaaaaagaagcttagtagagaagaagttgaacactttcgaagagctgttgaaaaagattattactttcagatgtattatgatgatttgcctatttggggattcattgggaaggtggacaaagagagcaaatctgatcctagcgagtttaaatattttctctacaaacacatccagtttgagattttgtacaataaggatcgggtgattgaaatcaatgctagaatggatcctcattcgcttgtggatcttactgaggataaggaagtcgatgctgagtttatgtacactgtgaagtggaaggaaactgagacttcttttgagaaaagaatggataagtatgctatgtcttcttctcttccacatcacttggaaatccactggttctccattattaactcctgcgtcactgtccttcttttgactggtttccttgcaaccatcctgatgcgggtcctcaagaatgatttcatgaagtaagttttgaatgctaactctttgtgcttgactcaccgatgcacacttttgtttccaaacattaacttttcccccaactttcaaaggtatgctcaagatgaggaagctgctgatgatcaagaggaaaccggatggaaatacattcatggagatgtcttccggttcccaaagaacaaa

SEQ ID NO: 147578 - DNA, 1629 bp, Arabidopsis thaliana landsberg
acgatgaagactggaccagagagcactttgagagctttgaagtgaaagagcgagaagggaaacgccccatcttaactggggacacacagatagtgcttaaggaaggtgtgggaactctaggagaacttactttcactgacaactcgagttggatacgtagccgaaagtttaggcttggtgttaagccggcttcagggtatggtgatagtttttgcattcgtgaagccaaaacagaaccttttgctgtcaaagatcatagaggagaacgtgagcttctaatcatttggattgtattgatgagtgttagttactactaacttggctctgtcatcgaccatcagtaaaattcattttcttttgacaatgttttgcagtatacaagaaacattatccaccggctgtacacgacgaagtctggagactggatcgaatagcgaaagacggagtgctacacaagaagctattgaaagctaatatcgtgacagtcgaagacttccttcgactccttgttaaggatccacagaaaatgaggaatgtaagcatatttatttgttaatgtgaacaaaccaccaatattgccaaagatatcctagttaaatgttcttttttctccctgataatgtagttgcttgggagtggaatgtcgaatagaatgtgggagaacacggtggagcacgcaaagacgtgcgtgttgggtgggaagatttatgtgttttacacagaccaaactcacgctacaggcgttgtcttcaatcatatatatgaattccgaggcctaattacaaacggacagttcctatctctagagtctcttaaccatgaccaaaaggtaaagtgtaaagacagtcatatttctgtcttgatttgaaaagaattttttggtcattaagctgataattggtttgctcacagatttctgcagacattttggtgaagctggcttacgagaactggcataaagctattgagtatgacggtaagctgttgaattgcttaccagttgccgagaaggaaataaaaagcttactggaaccaaaaatggtcacagcacaaactgctccgaaccatcaacagctgcataaccagaacaataggcaaactgtgcaaggtcatcagaatgcgattacctattcaccggtccctcaaccaatagattatcctcagtttgcgcagcaacattgcaaccaattattaccctcattcccttgcaacgtacaagactacaacaggtcgatggaaagctccaatgattcaagctcatacaatggagaagattggtgtccaccaagagctgcaggacaaggtcttgaagacattttcagcgaagaaatcagactaaggagttctgaaatgcttgagactgacgatatgcagagactgttgaagacgtttggtatcggtgtgaacactgtgggaacacaaggagggtttggtcagactgatgagtcttgttacggttatagcatcccgtaccaagctcagatcgataacacgtaccgaagagaacgtaatagaggctcggggaaagctgttgttggatggctaaagcttaaagctgctttgagatggggtatctttatacgcaagaaagctgcagagagaaggcctcagattgtggagatcgattga

SEQ ID NO: 147579 - DNA, 2355 bp, Arabidopsis thaliana landsberg
gccggtccaaccacgacccggcaagatcagattacatgtttgactgcaattgtagagagcacgagggtcatgcaggtcctttggtcttcaggtttgtaacatagcatccatgtgaatcaatggatctcaaggactatcttcttacaaggttgatctgaaagctttgctctttcacagatcaaaatggtgtaacctgaattatcttttgatctacttccttttaaaatcgaatcatcacaatcagaaaaagacatacttatgatttgcacttaaagagtcggaatttgactctccttagttatataaattgagacaaaataatttgataaacaatattttgcagatagaaaattactagataaacaaacaataatatatctttagaaaaaagaagttaagcatataataattcaggaaaaatggtcattttcaacccgaacaattttcaaaagtgtgttttccaatccgaacaaacgatcagtgctaatttatatcctaactcttgaaaaattcagtttacataccgaaactcgtattttagtgtataattacgagtcaacattaatataaattagtcaacacaacggttttggaatccaatgatacgtgtgggtcgaaatggcatgttgtttaaacaaaaaggtgttaattttgcaatttggattcaaatgttttttaaaaatacaaaatcggagaccgaatatgcaaccttagctgatttaatgttaaactataatttatacttggcataatcataaattaattatatagttgatgcgacctcatattagatagaatataatttatacttggcataatcataaattaatatgatttaaataaattgtttaaaatataatttatacttggcattgtcattcaggtgcaactactaattggtgctcggttggcatcatcctctttgaactcattgtaaaaattctacccttcaaagcaaaacatcctcaggtcatagactaatcactactttgtttcttattaatgctttgacaaagaaacatatgttttctcaaaatcttagatacgaaaattcatacttgggctggtcttcaaatgccatgtttttatttatttgacttctcaactcatttaaacattcattcatttgaagtcagcacatatgtgtctaaacattttatgtgattaatagttccaacgagttgtaaactgttaatgacactagtttcatgactcaggtcaagcagcacatcttctttaaagacatcaactgggacacactagcaaggcaaaaggtgcatttatttagcttattcttttaaaaacgtaagctttgctacttgtgccttcttaaagcttaacactagttttctttaggctgcatttgttccggcttcagagagtgcaattgacacaagttacttcagaagtcgctactcgtggaacacatcagatgagcaatttttcccaagcggtgaggttccagattatagtgatgctgatagcatgactaacagcagtggttgctcgagcaatcatcatgaagaaggggaggtaacatctattaatccactctttggatttcacctcctttagaattagtcggaaaactcttatcattagtgttcgttggatatgcaatttccttgaactggatcaatgttgctacacaggctgaagaatgcgaaggtcatgcagagtttgagtctggcatacctgtagattactctttcagtaatttctcgtttaaggtaataactcatgactgatctgttaagatcaaatgttgtccaagtaatgcaattggttggtagtttatatagttgttgatattccgataaataacatttcattttggattgaaatctatctaaagttctgtggcaacagatataatttagcataagttatgttagcttggaagagttggaagcatgtagaggtgtattaggctgtaggtagatgtcagattcacatgtaggaactgtagggactgattgataatgttttgaacttgtgggctctgcctccagacaactcgaaaacttgcctgtttttgttgtgccaactgattttaagtgagcttgtatcattgtgagtggttgagtattaagagcacaatgcttagcattctgagtttctatcctttttggttttgcagaacctctctcagttggcgtctatcaactatgatcttctatccaaaggctggaaagatgagccacaacaaattccgcatcacaagtaacatccatttcctggatgttttttctcgattcttttggtgttcagtcagtgtaatgagtactctgccattaccggcgtttgtttgtatactctgtaaatgtaagtcgttcgtttctgttaatcacaaaa

SEQ ID NO: 147580 - DNA, 2749 bp, Arabidopsis thaliana landsberg
aactcacctaccctcaaaaatcgaattgctaccaactccaatttctctcctcctctattaaatctttctcaatcatctttctttgagtcttttgccttggaatcctgatcatggcgtcttctctcacttccaaatccattctcggatgcaccaaacccgcttcttcttcttttcttccgtcggagctccgtcgtctctcttctcccgccgttcagatatctctccgttcacaaaccaggaagaacttccgtgagttctctgattcttttcaaaaattttagatttgaagcctatatctagcttaaagaagaaagatgtgtaatttgaatctctagggcagtcgtggggattgaagaagagtgatctgatgctaaatggttctgagattcgtcctgtgaaggttatggcttctgtttccacgtcggagaaagcttcggagattgtgattcaacccattagagaaatctcgggtctcattaagcttcctggctccaagtctctctctaatcggattctgcttctcgctgctctatctgaggtatatatatatcacttcatttcttccttctctgtaatctgaaattagattattaaagatatatactttaccattttgctgtgcttatatagggaactactgtagtcgacaacttgttgaacagtgatgacatcaattacatgcttgatgcgttgaagatattgggacttaatgtggaaactgacagtgaaaacaatcgtgctgtagttgaaggatgtgccggggtatttccagcttccatagattccaagagtgatatcgaactttacctcggcaatgcaggaacagcaatgcgtccacttaccgccgcagttactgctgcaggtggcaacgcaaggtatattgaaggagtaaatgctgaatagttttgatttcttaagaatcgatcttgttttgatgcttttcaatcggtttatttcagttatgtccttgatggggtgcctcggatgagagagagacctataggggatttggttgttggtcttaagcagcttggtgctgatgttgaatgtactcttggcactaactgccctcctgttcgtgtcaacgctaatggtggccttcctggtggaaaggtgagatcttgcaaatggcatgtgaatttataactttataaacacttgcagcaatttgtgttcatcatagccttacttgacaagatttcattttttttgtttgttgtcaatgtattgttcctgaaaacgaattgtttttttttagtagggattagttttgtctcttgattacccttttccttgtatggtttctttattgacgcatcgaacattttttgcatttgcaggtgaagctttctggatctattagtagtcagtacttgaccgctctgctcatggcagctcccttagctcttggagacgtcgaaattgaaattgtcgataaattgatttctgttccgtatgttgaaatgacattgaagttgatggaacgttttggggtaagtgctgagcatagtgaaagctgggatcgtttctttgttaagggtgggcaaaaatacaagtaagagttattattctctaccttttctgaaatcacataccttagattgacaaaataatgactaatatgggacatgattcaggtcgccgggtaatgcttacgtagaaggtgatgcttctagtgctagttatttcctggctggtgctgccattaccggtgaaactgtcactgttgaaggttgtggaacgaccagtttgcaggtaatatttgtacactgaatcatcaaagaggctgttaagtttatagtgaaattcgtttaggtcaaagtttcatctttttaaggctttgacaagttgtatgtaacatattcgcaagaatctaagttcaatttttgggatgaatctctagggagatgtgaaatttgccgaggttcttgagaaaatgggatgtaaagtgtcctggacagagaacagtgtgactgtgacagggccgtctagagatgcttttggaatgagacacttgcgggctattgatgtcaacatgaacaaaatgcctgatgtagcaatgactcttgccgtcgttgctctctttgccgatggtccaaccaccattagagatggtaagtaaaaagctctctcttataatataaggtttctcaagattcatggtcacttaattctatttggtcaatatagtggctagctggagagtaaaggagacggaaaggatgattgccatttgcacagagcttagaaaagtaaaattcttcttctctctctctctttctgtttacagtgctcattctaagaaattttgcggtatttgtgtccagctgggagctacagtggaagaaggttcagattattgtgtgattactccgccgaaaaaggtgaaaccggcagagattgatacatatgatgatcatagaatggcaatggcattctctcttgcagcttgtgctgatgttccaatcaccatcaatgaccccggttgcaccaggaaaaccttccccgactacttccaagtccttgaaagaatcacaaagcattaaacaaaaaaactctaaaatctccactgttttttcttctgatccaagcttatctgtttccatttttcttgtctctgtaacattattagaaagcaagagtagtgtttgtttgtgtgtacctgaactgagtgagatttgagatgcaatcattgaatcggctttggtatatcattttactctgtttttcagggtgtttgttcaggttc

SEQ ID NO: 147581 - DNA, 2819 bp, Arabidopsis thaliana landsberg
atattgggttacagaaatgcatgttgacggcttccgctttgatcttggttcaatcatgtcaaggagcagcaggtgcaaatgttctagagtacgtcaaatgagtgcttgtttggtccatgtgtttctggaatatttattgttctattcttgttagcctttgggatgcagccaatgtttacggggctgatgtagaaggtgacttgctcacaactggtactcctattagctgccctccagtaattgacatgataagtaatgatccaatactccgcggtgttaaggtgatcaactagttcccttgatatgtccccttcagatagcgtcggttttccttgtttagagtggagaaatgctgactacatgactactattttatctcaatccatgaccaaactttaaaatctcccaatgtgattaggcaccaaaaggttaattagcgtacaacatgttttatttcttcttgttgtacttcagcatagagcttcctttgtgtttttttttcaagtcatgtcataatctccagatctaaagatgattgttaaaaagttgtcattttcttgatggaaatacattcaccaatgtaagatctttgacgatgagatatttatgtgtttatgttgcttctttgcaaacagctaatagctgaagcatgggatgcgggtgggctgtaccaagttggcatgtttccacactggggtatttggtctgagtggaatggaaaggtcagttaatgtattacgaggataaaatgcttctttcaattgtttgagacatgagatatggaagagtaagtgtcacagtgtataagggtttcatgccaaatgtgatgtaattattagtggttattcatctttctgctgacccttagaatatgctctaatcaattgaaaatgggacagcctatgtgatctgcctgtactagctaactgaagtgtatagtaacctactagcctgtattagcaatgaacatggaagtcttaaacttactatccaatagacaacacatgagacaacaataatgaatattcagttctcgtggtagttcccattagtgtgtgcactgtgctggatatctatcttcgttgtgaatttgatatggtatagtaacatttttgtccatttcagtttcgggatgttgtgagacagttcataaaaggcaccgatggcttttctggtgcttttgctgaatgtctctgtggaagcccaaatctgtaccaggtaaatttaactcctattatactggggtatctggatatataactaatctttatggtgttctcttggttgttttgtctgtgaagcttcatattttggttgtatatcttatcgatatctgattgtgtctgtgcatcagggaggtaggaaaccttggcacagcatcaattttatatgtgcgcatgatggttttacgttggcagatttagtaacttacaacaataagaataacttggcaaatggagaagagaataatgatggagagaatcacaattacagctggaactgtggagaggtaagatattaatctttgttttctctttcatcagctatgtgaattcagtctcatattatatcatacgactttttgtagaatgtttataagctgaaatgaaatggctattgcacttttacctaaactaaaaaggcttcatttgattgggctgcaggagggagactttgcgagtatctcggtgaagagactaaggaaacgacagatgcggaatttctttgtttccctcatggtttcccaagtaaagctaaccatttgttgcttctttaattttaattcctgctcaaagctcgtttcactgatgttatgcacattgaactatgatactggagtagagggcatgagttcaaaatataaattaataagccacaagagaatctaaatccactagcaattaagtactatgcactgtttgtttgcctttgcaacatgttaagttgtgactggtaatggcatggtgtcatgcaaagaatatgtattaagggtactgctttgtcagattgtgatgctccggttttcattgaaattagtgtattgcttaaccttttccttttctgtctttctgaactattaatcaccagggtgtcccaatgatttacatgggagatgaatatggccatactaaagggggaaacaacaacacgtattgccatgacaactatgtaaaccccttatgctttgcttccagggtgattataagtaattttttcgatcttagctttccgacattaacacaactctgatgcagatgaactattttcggtgggataaaaaggaagaagcacattctgacttcttcagattctgccgtattcttatcaagtttcgtgagtatgtaatcttctttcatgagtctatcgatcttaattgcttagttgatcgcttcacttagtctcaaatccaataattgacatgcttcttccttttcacctactgctatgtgttttctttcttttgcaatcccctgtttctcgggtttcctctgatcgatggccattatgactgtattgtagtgaatgtgaatcacttggcttgaatgatttcccaacagcaaagcgtctgcagtggcatggtcttgctcctgagatcccaaattggtctgaaacaagtcgatttgttgcattttcactggtaccattttctcataccccttctcttacatggacagtttccttagtgggtgatattaatcccttttgtttttcggtaggtcgattctgtgaagaaagaaatctatgtggccttcaacaccagtcatttagccacacttgtttctctaccgaataggccaggataccgatgggagccattt

SEQ ID NO: 147582 - DNA, 904 bp, Arabidopsis thaliana landsberg
  unsure (1)..(904): unsure at all n locations
acatctgctgattcagaagatgaagcagaggattctgatgatgaaaggtttccattcttcttgtcacttatctgattgttatgatatctctatgcctttgcatagaaaattaattcttctctgtgttgttgggggtgcagctgccctgcatttttttcttgagatatttaacgatgttgagattctgtccatataatgatatgatatgttcataaataacatgcataaatctgggctatttccctctcttgatacagcatggagaccattatcctgggcgacaaaagaatagggatcaaaacaagtgttctagaggaaaaggccacggcttgtaacatgctttgttgctatgctgatgagttaaaagaaggattttttccttggattgatcaggtttgtaatgttaaataactccaaattgtgtcaatatctggtattgctgctgggttcgggagagtaaatttttatactgtaggttgcacctacattggttcctttactgaaattctattttcacgaagaagttagaagagcagctgtttcaggtatatcagaaaatatatcatctataatctactgttttgatcattagaacacangtttctaagaatttggataatttttctttctagccatgccggaactaatgcgctcagccaagctggcaatagagaaaggggaatctcaagggcgagatctatcatatttgaagcagctctctttctacattattccagccatgctggaagctgggggggggttagtgtgtgttctgttcatttttacttttctctttttggctttgattcactttttttgatggggcggaggattgtattttatgtaggaacctgatacagagatctgtgtgagtatgttggaagctatcaatgaatgcttgcag

SEQ ID NO: 147583 - DNA, 3496 bp, Arabidopsis thaliana landsberg
atgcttgacattcttggagacagcgaattcgatcagtgtggtgaccccttcttcaaaagcatacgaattagagagacgaagctcgaagctttcaacaactccaccggtaaaattgttaacccaaccaaccatataggcaactaatgcagccctttggtaatagcgagcaacggaatcatcagcgaatgtcacgatctcgtcctctctgaaagagatgtttttcgcttcgcgacatatgtgtcttcagcgggtggaaaggcgactggtgctcaagccctccttgaaggaaaggttcgaaatgatcaggacgagcaggaagtctgaaagcgtcaaaatgatgtccactgcacttcctgagtccattgttaatgattttggagtaaaagtaatggattcaggaagagaataatgtgtgtggcgtgagggaaaacagtgctcttccttgtctttatatatattttttaaaggttgcgactttttgttcgtttggcggttctcgtttctctaaccgctctttttacagaggttagggtttgtccgttactcattgaagaattgcaacgatacgcattttctaattaattcacaaaagccatatttaattaataatcgaacccgactgggccgataataaatttacttataataggctttatttttacgacccaattaattaggcccactaattattgcggttaaggaacgttgactttaagtcaaattagagagagcacagtccagggactaaagtgggtcccttggatttcttcctctcttcaccgatttcttagatcttcgaaacctctctctctctctctctctctctctctcgcattctcactctcgttcgtttggtttttggatcagtgtaagcttctccattattttcggattcgcttccttcgtagtttgttcgtttgctctgatttgtaatcgtagcttagtttccgtagattctcaaatgataacgcgctttacgagttttgggtgtgactaggggtttctctctgtgttttcttattcctcaatgttatttcgaaattgaatgctacagatacagagattcaatgagctgttttggctgttgccgtgaagatgatttgcctggagctaatgattatggaggtcacaatatgaccaaacaatctggaggtaattttcagttactgtctctcatcatgttcttaaattattaatctctgctaatttgttttctttgatggtgggagtgaaggaaatgatggaaggcgcaacggctctgaaactgcacaaaaaggtgctcagagtgtgaaagtgcagcctatagaagtagctgctattctcgctgatgaactgattgaagcaacgaatgattttggaactaattctcttatcggtgaaggctcgtatgcgagagtgtatcacggggtgttaaagaatggtcagcgtgcagccattaaaaagttagattctaacaaacagcctaatgaagagtttctagcacaggtttggttaatatagataggttatttgttgatggattatggacttatggtcccactttacatgttgaatttgggaatgaatcttcaggtttccatggtttcgaggttgaagcatgttaactttgttgagctgcttggttactctgttgatgggaattcgaggatacttgtctttgagtttgcccaaaatggatctcttcatgatattcttcatggtaagttactaatgtaaaacatcgaaggaagatcaataccatttttccaagatcttcagaggagaaactaatgaactgtggtgaattcactggtgcaggtcgaaaaggtgttaaaggggcacagccaggtcctgttctgtcgtggcaccagagagtcaaaattgctgttggtgcggctagaggactcgagtacttgcatgagaaggcaaaccctcatgttatccacagagacatcaaatccagcaatgtacttctgttcgatgatgatgttgccaagattgctgattttgatttgtccaaccaagcccctgacatggctgctcgccttcactcaacccgtgtgctcggaacctttggctatcacgctccagagtaagctcctttagagatatcatttatctggaacagtgatattttgatttgtttacactcaagtcgtgctgagaatcttttgttatcattatctaatgttctgatgcactaagtccttcacttggactaagctttgataatcatattttcatacatttacacttctgtatgtcttgcatttcttcccattgaccaaactagattcttaaacatatttggttctgcaatttaggtatgcaatgacggggacgttgagcacaaagagtgatgtctatagttttggcgttgttctgctggagctcctcacaggtcgtaaaccagttgatcataccttaccacgtggacagcagagtgtcgtgacatgggtaatacatcggtctctgcttcttcttctggttgactcatatttataagaaaatcttagaaaatacatgatttattcagtcaattaggagaatgaccaaaaaaatcctctagcaacttcgcaacacctctttgcatctatagaaatcattgatttggtgtagtcaattcttttctagaaagaaatttcttaaactagaatttattaaataagaaaaaccaagtgccaattgtttttttaagaaagaaattttcctggataaaggtgggtttctgtacgtgaagcctttctgaagcaaactctgcttacttgtgagatattagagactctgaactttccctatagacaaaaaccagtagtcaatgataacgcttttgtttgtctcaggcaacccctaaattgagtgaagacaaggtgaagcagtgtgttgacgcaagactaaacggagaatatcctcccaaagctgttgctaaggtaatttcccccaaaaccttgtcatacttctcactgttgcagtagaaaaggtttaccttaggatttgactacttctccatccgttgcaccccgcaatcaactacaacagctaaaacttgtctgcctggttgaaaaaacaaaaatgaatttgatttgattccctcttgatgtgttgttccctatgatatgcctagatttgcaacccaaaacctcgagtctgattttggttttctcttatgactcattgtgatcagctggctgcggtagctgcactgtgtgtgcaatatgaggcagacttcaggcctaacatgagcatagtggtgaaggctcttcagccgttgctcaatcctccatgctctgctccccagactccacacaggaacccgtattgatatgctccagtctgatatcaccctttatgatcatcactatttcatttgtttttgtttgaatccgatttgtgtaaatttgtgaaataggcgtttattctctcataaaccccctgccacttcactgaaaatcttacttggaaagacctgaatgttactgtatttctatattatttcatgcatgtgaatgtgatgcaa

SEQ ID NO: 147584 - DNA, 751 bp, Arabidopsis thaliana landsberg; identical to SEQ ID NO: 65260
  unsure (1)..(751): unsure at all n locations

SEQ ID NO: 147585 - DNA, 1293 bp, Arabidopsis thaliana landsberg
atgcatgttgccttcttcttcctaaccttcttcttcattgtccccatcgcgtttgttcaatctcttgctaccattgaagggattgtgaaagctgctccgttcttgaagtttattgtagatgagtgagtttttcttctttactctctctcttcttgacatcagataacctgaaaaaattactaatgatggactgacttgtttggtttaatgcagtaaattcatgaaatcggtgatacaaggtttccttccgggtattgcactgaagcttttcctcgcctttctgccatccattctgatgatcatgtccaaatttgaaggcttcacatcgatctcatctttagagagacgagcagcgtttcgatattacatcttcaacttagtgaacgtctttcttgctagcgttatcgctggagctgcgtttgaacagcttaactctttcctcaatcaatccgcaaaccaaatccccaaaaccattggtgtggcgattaccgatgaaagcaactttcttcatcacgtatataatggttgatggttgggcaggagttgcaggagagattctaatgctgaaaccattgattatgttccatctcaaaaacgccttcttggttaagactgataaagacagagaggaagcaatggacccgggaagcattggttttaatacaggtgagcctcggatacaactctactttcttcttggtcttgtctacgctcctgtgacaccgatgcttcttccttttatcttggtgttcttcgcccttgcttacattgtatatcgccaccaagtaagtttctttttctttcctcaattgggtatcgaactggttttaaagcagattcttgaatatatttgttgtatctgtcagatcataaacgtatacaatcaagaatacgagagtgctgcagcgttttggccatatgttcatggacgagtcatagcagcgttggtaatatcacagttgcttctgatgggtctattgggaacgaagcacgctgcattagctgcaccgtttctcattgctttgcctgtgcttaccattggtttccaccacttctgcaaaggtcgttatgagccagctttcatcagataccctttacaggtttgttgtttcttctaacaaccataatcacattttagattccacaatcataccaaacatgaatcattcttgtattgtttactcgtgttacaggaagcaatgatgaaagatacattggaaagcgcaagagaaccaaacctgaaccttaaaagctacttgcaaaatgcttacgttcatccggtttttaaaggcg

SEQ ID NO: 147586 - DNA, 1303 bp, Arabidopsis thaliana landsberg; identical to SEQ ID NO: 9108

SEQ ID NO: 147587 - DNA, 322 bp, Arabidopsis thaliana landsberg
tatacagacacagcatatatacacaagtatctcaagaacaagaaggagaataagagaagtcatgtcttgctctttgaggagtggactcgtgatagtgttctgtttcattcttctgcttttgtctcccaatgttggatgtgcctctgccgctcgtcgtttaaggtcacataagcatcatcatcacaaggttgcttctttggacgtcttcaatggtggagaaaggaggcgggcgttgggtggagtcgagacaggggaagaagtagtagtcatggattatcctcagcctcatcgtaagcctccgatccacaacgagaagtcttaa

SEQ ID NO: 147588 - DNA, 2503 bp, Arabidopsis thaliana landsberg
  unsure (1)..(2503): unsure at all n locations
atttgcaaattcctttgatcagatagtgaaaacgattctctctatattgccgatcgatctccaagtttgctaaatcgccgggaactttactgaaatttggagctagtcatgtcttcggatcctgacaaaatgatgtnnnnnnnnnnnnnnnnnnnnnctttttctcttctcatttatatgaatgctctgtttgagaggttaatgatcggtggaaattaaaattcgatttgggctttagggcattttgggtttgatcgagatgactgtgctcttaagatatgagggttttcttttgttactgtgattgagaaacttctcgtgatccattctgagattcgatcaaaggtttttgttgggagaaaagaaggatctaggatcttgtgtattgttgcataggaacattttaatatgagagtttgcttaaagtttaagaacacttcttttgagtctgattttcaattcaaaaatttgtgagttgtgagattctctgcaatttttgtgaattggaaataagagttaataatgagtatgcaatgtaatatattaccagtttgacaaggattgagaaatcattttggattggtttgataaggaacatcgtctttgcttgcttatataaattgtgttgttctgttttcacattcctacatttcagtgatctgcttctgttattaaccatccttttaagcatctttggttcttcattttttacaggacaaagctcacgcttactagatggagtgctgattggagaggtgctactgagttgtatgagcaagcaggtgggtaacacagtgtattttgctctatggcagaatccaaatgctattctctaaaagcttggagactataaaagcatggtttgattcttttcatgcataaatgataactgattttgattctttccttttactcctattcattgatgaatgacagcaaatgggtttagagcatcaaacaaatatgagaaagctaaagtggctctcgagaaagcttcaaaaggacaagagatgcaagcttcgtatccaaactttccgttaaagattataatttgttgctgtttatttttgtcgcatcgacatagcatcctctttaatgttatccttgatagtaaatagtccttgggatgctgcaaagcatatggagtctgctgctgccttagcacagaagctaagtatttggaatgaagttgctgatttttatagaaaggcgtcggagctgtatgttgagtgtggaagggcacaacccgcatcagatgctcttggaaaggctgcccggtaattttgtgttgacatctttaataatcaagaaattggatttcatgatttgtatcttactatctattatctaaatgcgataatagtcagtgtggcttcctccgtttttctttgtttcatctccaataattttgtgttgcagtgctttggaagatgtcaaaccagatgacgccatccaactatacactgatgcttgtgaaattcttgaagaggatgggagggaccaaatggcctttgatctgtaccgtgcttgtgctaatgtctacattaagcttgagaagtaagttattatttacttagaaacacatccgtgtttaaagtttcacattgcagatatatgaatatatgatcagttagtatcatggaacattttatccgtctatctgatatagtaattgattggcacaaatattaaaatttgtaggttcacagatgctgcaacctttttcttaagattgggtgtagctgctgatcagtgtgatgcgacaaatagccagtgtaaggtatgagtatatgtgctcctaaccatctctgttcgaccttgctgctttctgcttagctcaggccgattcccttgtatctctgaatgttattgttatgacttgtgatttaactgttttctgaatgttatttcaggcctatctcagtgcaatcatcttatatctgtatgctcacgacctgcagcaggcagaaaaatgctacaatgactgttctcagtgagtacacttttgtctttttatatggatcatatatgttactacgaccaagaaaacatgaactctttaggaattgtgataccaaattagtgtctgaatatttttcttctcatggttaggattgatgcctttctgaagagtgatcagagccgaagtgctagtagacttctcaccgcctataatgaaggtgacattgaagaaatcaagaaggtggcgagtgcaagcactgtctcgaatttggatcatatggtaattcacttaaatgatctgtcgaatcctaatcctaattatgtctttctgtgtttctgaatgtatttgttctgcattatgctggttattgtgacaccatatgatcacagaatgtttcattaaactactggaatcttatacggataagtattttgtctgcagattatcaagtccgctagccagctacccactggagatgttactgacaattcaaatgaacactaatgacgatctagacgaggatgatctcgcttttagttt

SEQ ID NO: 147589 - DNA, 474 bp, Arabidopsis thaliana landsberg
gtgaagagagtgcagaattatgtcgaaacacttgatgccttgaaggtcaaaaactccatggctaatgggcaacagaaacagtcaagtactgctcagagacttgcaccgattcaagaacataacaatgaagagagacaagaacagaaaccgatacaatcgctcatggacatgccgatacaatacaaagagaagaagcaagagattgaagaggagcctaggaattcaggggaaggaccatttgtgttagattcttctgctaaatgggaaacattcgatcatcatcccgtgacgccattgagctcgactactgcgaaaaataacgcgatcccgcccaggtttaactgggaattctttgattgagaaagttcacattttgtgaaactttttctttcttttatcttgtatgcttatataattcttgtgtggaagtgttgttttttttttcaggcttcttcttcttcttcttcatcatta

SEQ ID NO: 147590 - DNA, 1058 bp, Arabidopsis thaliana landsberg
attgtgacagcaccccgagcagcggttcaatccccagatgaaaaattcgaagtgttctacatcgattatggaaaccaagagacagttccatacagcgcaatcagaccaatagacccttcggtatctgcagcaccagggctcgctcagctctgcagacttgcctacataaaggttccaagcttggaagacgactttggtcctgaagcgggagagtatttgcatactgtaactctgggtagtggtaaagagttcaaagcagtgatagaagaaagagacacatctggaggcaaagtcaaagggcaaggcactggaactgaattcgttgtcactctcattgctgttgatgatgagatctctgtaaatgctgcaatgcttcaggtcggttttctctcaccttgtctaaaaaacatttccaagaattggtattggtattgatgaggatgatgatgaacaggaaggaatagcgagaatggagaaacgcaggagatgggggcacaaaggcaaacaagctgctcttgatgctttagagaagttccaagaggaagctcgcaagtcgagaattggaatctggcagtacggtgacattgagtccgatgatgaggacaatgttccggccagaaagcctgctggtggtcgccggtaaaatcataaaaaccgataagtcgtgatatggttcaaagggaccatgaggtagggagagaagcttcggtgtgtttctctaaagagtttaaagacatgtggaactttttgtaaggttttagatttgtttcttctcttcttcttttaatttatatacgttttagactttttaaagaaattttccatgtaggacttgaaataaggggaagtttgaaccatgcttacagtttttgtgtgttttctggtccaacttatctttccattccttaagccgtcttatttatgttacactgacattagaaagaacaaaaaaagagcagagactaagcaggaaggatatggtcgttggagcaactttggtcttattttctgatgaagtgactgcatcatctgctggcagtcagccagctggtgaatag

SEQ ID NO: 147591 - DNA, 138 bp, Arabidopsis thaliana landsberg
ccctaatacgccccctcgagatgatggctcttctagccattgatctcgatatgtttgggcatggatcggcgggccaagtattgggccgaaccgatgtggatcgggttgagtatgtgcggatcgggctctgataccata

SEQ ID NO: 147592 - DNA, 1301 bp, Arabidopsis thaliana landsberg
atggtttatattcgacattccttgcacgtcaatgagaggcttgtcagtttttataccaactgcaattcatttcgattctgcacactagaagtgagagattagttttacttgttcgctgccacccaagttggatcatgaatgatgttaaaaacaattgttagttgccctcacccatccattagtttctcatctaatggttcagtttcttgattgccatctgtaaggggcagaggacaaaagtgtatgattagtgctcgatcctctacattatatataattctgaatgttctttatatatatatatatatatatatcatctcaaaagtatgttttaagagctcatctcattcttggatacttggttacatatgattctgaatgttctttatatatatatatcatagatatctccgggagatatcagatgggaaggtgaagatcctgggatttctcgtaaaggaggacatcctgggcaaggccgtggaacaaaaaccatggctcgtggtggtcctgcaagcaatgcgggtggtagaggtaggggaagcatgaggatgcagcaacctaagacacagaatggcatcggaaagaaagctttaggcgaaatcgaaattctccacactgagacattgttaaaagaggtaatcattcaagtttttttgatatgggaataaatgttttacagttgttaatcttatgaatatttgtaacaggtggaaaaagtttttgggtcagttaaccccaacccagcagaggtagagaaggcaaagagagtgctgagagtaagaactatatacatgtgttgttgaatctagttgtttactccaaaatatcatgaaaagagatgctgactatatagttttacttggaaatggtaggatcatgaactagctcttatggatgccatcgcaaagcttgaagaaatatcagatggagaaagcggtaatatttgataggggctttctaaatctcctcaggttcaccacatcttccttctgctctttgggttcaatgcgtgtgttgaattgaagttataatgtggctttgatttttggcttaaacacagatgatggagccggagcattagagttgcaaaaaggtgttgtagatggtggtggcaaaatgtgaattgatgagggagatttggaaacttgtatggatggcaaaatgtattttgtttaggagggggatttgatgacatttgtgtaccacataactccaaaaactggatttggaaattagggttcttaagcattgtaaaatccataagacttgatataaatgtagaatgtttcagagacgac

SEQ ID NO: 147593 - DNA, 1472 bp, Arabidopsis thaliana landsberg
  unsure (1)..(1472): unsure at all n locations
atggaagcgaagctagaggtgaccgggagagaagtgatcaaacctgcttcaccatcacctcgtgatcgccttcaactctctatccttgatctctattgtcctggaatctacgtgtcgacgatcttcttctacgatctcatcaccgagtcctcggaggttttctcggaaaatctgaaactctctctgtccgagactctctcacgcttctctccactagctggacgaatagaaggcctttccatcagctgtaacgacgaaggagccgtctttactgaggcacgcaccgatctccttctacctgatttccttagaaacctcaacacagactcactgtccggattcctcccgacactagccgctggagaatctccagcggcctggccgttgttgagtatcaaggtcactttcttcgggtctggatcaggagtggcgggttctgtctctgtctctcacaaaatttgtgatatagcctcattggtgacctttgtaaaagactgggctaccaccacggccaaagggaagtcaaacagtactatcgagttcgctgaaacgactatttatcctcctcctccttctcatatgtatgaacagttcccatcaacggattccgattctaacatcacaagtaaatacgtactcaaaagattcgtcttcgaaccttctaannnnnnnnnnnnnnnnnacaaggccgctagcgaaagcgtccctgtgcctacacgtgttgaagctatcatgtcacttatctggagatgtgctagaaactcctcacgctctaacttgttaattccaaggcaagccgtcatgtggcaggccatggacattcggcttaggattccatctagtgttgcgccaaaagacgtgattggtaacctacaaagcggattttctctcaagaaagacgcagagagcgagtttgagatccctgaaatcgtggccacattcaggaagaacaaagagagagtcaacgagatgattaaagagagtcttcaaggcaatacaattggtcagagtttgttgagtttgatggcggaaactgtgtcagagtcaacggagatagaccgatacataatgtctagctggtgcagaaagccttttacgaggttgactttcggatcgggtagtccggtctgggtgggatacgcgtcacataccatttacgacaacttggtgggtgtcgtgttgattgattcaaaagaaggtgatggtgtagaagcatggataagcttacctgaggaagacatgtccgtgtttgtcgatgaccaagagttgcttgcttatgccggcctaaatgccccggtcgtggcataaacaagactactaccaattgctctacgctggatttaattaattattggctttcgcttttcgttgtgatttgaataaagtgaccaatcatttcaagttccatgttaattcagtttatctgttaccttgatcttgtttgtactctatatggttatttgttttgtcaa

SEQ ID NO: 147594 - DNA, 677 bp, Arabidopsis thaliana landsberg
  unsure (1)..(677): unsure at all n locations
ggctcttattcagagtctccctacttctaagatggtggagtcatgctctatagctggtcctggatttgttaatgttgtactatcatctaagtggatggctaaggtatagtcatgttctagttcttgtgttaataattttgtgtttgtcataattgttttctaatctatctgcagagtattgaaaatatgcttgttgatgggattgatacatgggcacctactctttcggttaagagagctgtagttgatttttcctctcccnnnnnnnnnnnnnnnnnnnnnnnnnnnnnnnnnnnnncaactatcattggtgacactctagctcgcatgctcgagtactcaaaggttgaagttcttcgcagaaaccatgttggtgactggggaacacaggtaggtagctacttttctgcctttcaaatgatttcgtaaccaagttttgcttattgtattcattgaagtaaaaagctgcgtttgttatgcagtttgggatgctaattgagtttctctttgagaaatttcctgatacagagagtgtgaccgagacagctattggagatcttcaggtcagctgtcttgtttcatatggccctctcaagctttacaggtcttctgatggaccaaaagtttcattatatgctttatggtaagaaccaatggaatttaagttcttacctttt

SEQ ID NO: 147595 - DNA, 1007 bp, Arabidopsis thaliana landsberg
aaggaacgcttgattgggatgcgcggttgaagattgcacttggagcagcgagaggactggcttatctccatgaagattcaaatccccgagtaatccaccgtgatttcaaggctagcaatgttctcctagaagatgactttaccccaaaagtctcagactttggactggcaagagaagcaaccgaaggaagtcaacatatttcaactcgagtcatggggacctttgggtaaaatttctttccaactcaaatatgatgaatacagacactctggacttacagtgactaccctggaaataatttcaggtacgtggctcctgagtatgcaatgacggggcatctccttgttaaaagcgatgtctatagttatggtgtagttctactagagcttctaaccggtagaagaccagtagacatgtctcaaccttcgggagaggaaaaccttgtgacatgggcgagacccttactagccaacagagagggcctggagcaactggtggaccctgcattggctggaacctacaactttgatgacatggcgaaagtggctgcgattgcctccatgtgcgtccaccaagaggtctcacacagaccattcatgggtgaagttgtgcaggcactaaaacttatatacaacgatgcagatgagacctgtggtgattattgcagccaaaaggactcatcagtaccagactctgctgacttcaaaggcgatctggctccttcggatagcagttggtggaatttgacacctcggttaaggtatggtcaagcttcgtcgttcataacaatggattatagctcaggaccactagaggacatggagaaccggcctcactctgcctctagcattccaagagtaggaggtcttattctaccaaacagatcaggtccgttaagacccatgcgtagtagaagaaatttctttagactgagaggaagcatgagcgaacacggtggaccgtcgtcgtctagacatctctggtccggcaatggtgactggctctga

SEQ ID NO: 147596 - DNA, 1632 bp, Arabidopsis thaliana landsberg
gagatcgctgatccttcacacgcaagctaatgaagcctctcactaatggcgatctgttcaaatccccaactctgatcaagatctccgccttagttttcgtcaccgtcgctttcttctacttaggcaagcattggtccgacgatggctaccaacagctcgtcttcttctcctcttccacctccggtagctcgatcccggaggtctccgtttcaccgaatagtaacagagtctttaatttatcagcgataattcctactaaccatacccagattgaaatccccgccacaatacaacaacaacctccgtcggtggtggcggacacggagaaggttaaggtggaagctaatcctcctcctcctccacctccttctccttcacctcctcctccgcctggtccggttaagagctttgggatagttgatgcgaacggtgtgatgtctgacgattttgaggtgggtgaggttgagagtgatacagtggaagattgggggaatcagactgagatcgttgaggcgaaaagcgacggtgattctaaggctagggttagaattaagaaatttgggatgtgtcctgagagtatgagagagtatataccttgtttggataatactgatgtgataaagaagcttaaatcgacagagcgaggtgagagattcgagcgtcattgtcctgagaaaggtaaaggcttgaattgcttagttccacctcctaaaggttaccgtcagccgattccatggcctaaaagccgtgacgaggtactcctttgtttgcatgagttttgcattttggttggataacatgtcttgggatttagtttaagtagtatttggaatttacttatggataggtatggtttagcaatgttcctcatactcggcttgttgaagacaaaggaggtcagaactggatttcacgagacaagaacaagttcaagtttcctggaggtggtacacagtttattcatggggctgatcagtacttggaccagatgtctaaggtggctcatttttccaagtagtagttcttgtttttcgcgtcaactgtttatgtatcttttcatctgatgttgagctctggagtttgtgtctgcagatggtttctgatattacgtttggcaagcatattagggttgctatggatgttggttgtggtgtggcgagttttggtgcttatctattgtctcgtgatgtcatgacaatgtctgttgcaccaaaagatgtccatgagaaccaaattcaatttgctcttgagcgtggtgtgcctgctatggcggcagcatttgcgacaaggcgtttgttatatccaagccaagcttttgatcttattcattgttcaagatgtagaatcaactggactcgtgatggtaaggttctatggtgtgcttgattcttcacctaatacatcagaaaaagattaagattgcacctactgtaatttttaactccctgtgtgaactatgctctagcttttattacttgtacagaaaattctcactctgctgtttcattctttgtgataaagatggaattttgctccttgagatcaatagaatgctgcgcgctggaggatattttgcttgggctgcacagcctgtttataagcatgaacccgctttggaagaacaatggacag

SEQ ID NO: 147597 - DNA, 4120 bp, Arabidopsis thaliana landsberg
aatcatcccaggtggtgattgagtcatggggcagattcttctcccagatatgtgctttgtcgcccaacgagaatgggaacaaacggagcttgaatccgtcttcactgacaccattgatcttcgttaggttgcagagcctatcgaattcatcaaggtggtcgagtggatcctccattggcaaaccatggaatttgttcccctgaatcatcgagatgagaccactcttaatctcgaagttgttattctggatagcaggaggtgcgattcccttcctctgacggtgatcacgtggtgcatctccagcaccaatgttggcatggccattttgttgattctgttcttcagccataacgagtggttgctgaggtacagtgttgactgtggttctcctttttctgatttcgcgggctgtgctgttgatgttgtcgttgaaaaggaggttctggttgcctgttgatcgagttcgcatacagtagaggtgtacctggatcaagaagacaacaagaaaaacacacagttagtaactaaaaagaaaattaaaaaagaacttgatctaagcaagtctgaaatcttaaatgtaacaaacaaacacccaattggcaatggcgccaaattgataataggtttttagtcaattatcctaaaacaccaatcatatcgttgtagtattttaggttgtcaatccaaatgggtgtgatgctagcaatcaagatgtgatcagaagtcactaagtcaagccaagcataacaggttttggtgtgttccagcagtcctaagtgaacatgcagaaaacagaaaatcaaacagaaacagtaaaacactcgaccaacacagctctttgcagagcactaggtgaggtcgagtaacagacagaaaatgaaacagggatactcgactgcacagtctgttgccagacaactgggtggtcgagtaccaggtcgagtaacagtaaagaattgcagaaactaagcaatagatgacaggatgtagtaaacagcagtagagtaaacaataaaatcaattagaccaagaattcctaaggatggggtaattgagtaatttcgtttcctcagtttacaggtgattgacatgctcaataaattaaccctagacaataagttcatcaaccaaatctaagtgccaccgcaacagagactctcaagctaacctagtcccagactcaatcaccattgacgagagctaacctaacaggcattacgaatcaacaagttaaagccaaaacgctccctgcaaccaataccttggtacagggtcacgaatctctggaattagtggttcagacatttcatcgaacaccttttgggcgaagaaatgtctgggctcaaattccagttgatgagaaagcaataggcattaagaacaactaatccagaagggatctatcaatcaatactcaatcacctagcatactgagaattctacactactgtaacccatgctgagaaacctattcactactcagacatcataacagaaagcataaacgttgaacaggttgaagacatgataacagcaatgtaacagcagtatgataacagaatgaacaacagtaaacgaaaatcaagaacagaaactgaatactgaatactgaatagataaagagaaatccggattacaaaaattctagaacacaaggtctgcggaaataaaactaggtaaaaaacttcttgtcctgcgaaaatgagaagtacatgctacttatagccaaatatcccgaaaccctaatactcaaaacgacgaagtatttagacgggttaagaactgtactcgacccaggtggtcgagtgagaggtcgagtgaatagctgaagtcttcttttcttccttgtgctcgagtgtctggttgagtgcggaatgaagaaggctctgaagcttgtcatcgagtatgcagtcgagtggtgtgatggcgatactcgacctctaggtagagtgaagaggtccagtggttgtctggtgatggaggtgaagacactcgacctcatggtcgagtgaagcgatcgagtgatggagacgagggcgctcgacctcggggtcgagtggtgaagtgaagtagtgatgtcctctactcgacctcgtggtcgagtggtctcttgagatcttgaagctcctactcgacctctgggtcgagtggtttgtcatgatcaggtccgcttcttccagatagctcgtcaacagctccaaatcacctgaaatcaacgcaaatatgcaacatgcatgcaaaactatcctaaacatgcaaagtgatgacaaatgatgtgaaatggtataaaacagtgctgatatgatgctaaagtgatgacaaattgatgctcaaaacatgcaaaatacacacttatcaactctcccaaacttagtctttgcttgccctcaagcaaacaatcaagaacaagctggaggtgaggtttgaaagcggggactcagagccaaagcactagataaaccagatgaaatcaatgtccaagttgaaagttctaagctgcgagatcgaattctacttaaaaacgttagccatgcctcattaatcaatcaatccgactcatatgctcgacctacataagttttcaaatccaccaatccctttaacattcattagttctggaacgtgaatcaagcaatgcatcatcaaagaactcatttggctaaggtaaaaggtcaagacacaaagatgatcccttacagaataggcttcagtaaaaatgattattagaatgctaaaggtaagtcccaagctatgcatacagagataagatcccatttacccagagtatatcaaatgaagctctaatggtaatcccatctcccatctcaatacaagaactagactttaccctttgcattcatgaattttttttttagccctttttcgaatcattcttttcttttctcttaactctaggagaagctttctcaacactttgatatatctagcggagttggatttctttaacaactaaggttcctgttttttaacattctaaagccaagggcttttgcccatcttcaatagctaacaagaactctttcttttctttacaaatcccaaaacctttactagactttttctgcttctttagcttacttcacctagagtcttttaccttttcttatcaatgaatcaaccccttttttttcttttaaacacatcccaaccgaaagttaagcgcccacctagtcctatctagtccgaaaaatgcgaactagaactacatgagacactatctctgtcgttacgaacctaacactttctaccaagcttaatcggaataaaacctcacaaacactcacaagtgatatagggcttgaaagaaagtctaggtttgggtttgggttaactgctctaataaggagagtcagctacttggattaacaagagagatcaaaatgaataagaaaatccaagtattttagggtatccatgagttcaaatttgatgcagacatgataattagagatcagattcaggttcaaattgatagggaatggtatcagatcatgatagtgtggtcgagtagagcaatctaggcatggttcagttttatttcaaattcattgactacgcaacagacaactagcaacgagggcattaagtttatccggtgaatcaaaatgcttacaaggctatctcatcatcatcccctatgcatatgaaacaatcataaatgaaacactgtacactcaatccaaaatgtaatgcaactaaatgaacaatctttttttgtgaaatcattttctgaaatttttcaatttttttggtttttctatgccttagatgaatccagactcaaaaatatatacaatgcaatacacacttcctgagccctcccccaaacttaaatcacacagtccactgtgcgaataaacttggaagagagtactcaggacaaatccaatcacagaaacgaaatgaagaaacaaatcacaacagatgatataatacaatggtgaagtgaggcgcgtacctcaatcgaagaatgaacgtagttgctcgtcaatggctgcctgtgattgctcctaggccatagaccaaccgccctgttctgtctcagctccagcatgtgggtactcgacctcagtgcctctatggcggccagcaccgccat

SEQ ID NO: 147598 - DNA, 364 bp, Arabidopsis thaliana landsberg
ggttatgagaagaacgcaagaccagctcaacctctgaacggacgtctggtttatttaaacgagcagtccagtccaagtccaactccacggctaagaatcccacgagttggtccggtctaagacagtcttataggacaaggcaactccgagccctaatttccatacaaagaaaattcgaaaaagaattttgaagatgtatgaaaattggaagccataactattttttttaactattctttttattaaaagataaaactacgcaatattatatgcacaaagtttttcttttatacatgtattccaataaacaagatgtaataatatccaaccataatgagttgtttgattattttataacacaaga

SEQ ID NO: 147599 - DNA, 1063 bp, Arabidopsis thaliana landsberg
  unsure (1)..(1063): unsure at all n locations
atggggaccaaatatttaaccgttccagtggttttcaggcagtttatatctgggaaatctagcccaacttggaaggcatttggaatccccttggtctcaaggctttgtgatgtcgagaatggatctgatgtcgagaacctgtacctgaagctgcttagttcatttaagatgcctactgaattctttacagagaatcttgaaaacccaactgaagaagaagccactgataaaacagataccgatggtactacttcagttgaggatacaaattccactgatgtgaaggagactactgaatctcttccagatcctgtgttgaggctttacctcaccgacgacagaggaaactcgatagaagctgaaatgttgaaagaaaagcctgtaaataaatccaagcggttgaatgtgcttgcacgttggcctgtaaaagagcttgacgtttatgatacttgtcttctgagctccttacctgaggtttccaaatctggaactaagagaccccaagaatccgtttcgcttttcaagtgccttgaagcattcttgacggaggagcctcttggtcctgatgacatgtggtgagttgagggtcaaaccatttctcatatctattctcagctttataatacatgagaacttatattttgacaatcgtgctcatagtaatgtgatttgtttcgttgtcttgaaacttttggggctttttgtgcgtctgacatgctctttactaattcttcggagtactctgatccttggtagctgacatgagtcaaaactgtattaggtattgtcctgggtgcaaagaacaccggcaagccattaaaaagttagatctctggnnnnnnnnnnnnnnnnnnnnnnnnnnnnnnnnnnnnttttcgtatagccggtttatcaagaacaagctggaggcatatgtggatttcccgttagataatcttgatctatcaagctacatctcctacaagaatggtcagacaacatatcgttacatgctctatgcgattagcaatctctatgggagcatgggaggtggtcattacactgcatatgttcacgtaagtga

SEQ ID NO: 147600 - DNA, 1106 bp, Arabidopsis thaliana landsberg
ctctaccaacctcgaaaacgaatcaagagattagcatcttatcgagatttaaaccatcaattaatcggctgccatggtgggtttcctcctcctctcttcgttttttccaaatttttaattgtttcttgccgctttaatctcttgagtgatgactcttttatcatttggtaaatcaattgatgttagcatgatttgagatcatctattagatttatgttgttcaattgtataaattagagaggcagatgggttttatgaattgggtacggattattcaactggttgtttcattttgagataatttcggaaaattttggtgtttattactaacgaaaattttctcgttgtatgattgattgattgattgaaattcatccatattcgtattcgcagtgaatagaacattttccaattgaaaaaaacaaacaaattttttcggttctcatttgttctttctaggcaaagatttctcaatgttgaagttttaatgtattggcgatagatcgatgattttgagctggcttgaatttggacatgtttctttgtttacaaatcccttcttcatctctacttgtcatgttgcatttattctataacattctcatttcttttctttttacaggctgggagactacttgcaaatttgattgtgatgggttctgggatcattggtcgtgctgtctttcaagcctatcgtcaagcacttgctagtaagtttccaacactttttgttttatattcacccttttcacatcaagtgattgctttatgaatccaatgataaggcaattacatttcatggtaattgttgattctggcagctcctgtttgtgtgtgtttacaactgttagaacggttgatatgtttctgaatcatattgctgctctcttttactcgatacctaagacaaagggtggtcaggtatttgttacgaaggagacctgtcttacctaggagaaaattcttttgcagatgcgtctaaatctggtgttgcgcaggaagcaatgcaaaatggagtacgtcaagcagggaaagccatcactgagcaagaggctaggcagattcttggtgtaaccgagaagacctcttgggaagagatattacag

SEQ ID NO: 147601 - DNA, 564 bp, Arabidopsis thaliana landsberg
tgttaaggaagagttgtgtccatcttcctcctgccaaagccctaaaggccagcaaccaagagtaaagataagctcaatttattgtcagtggacgaaactggattctgtaatttgcttagtgtaaggcttctttgttttgatataggttgaggttagattaagagaaggaaaggcagtgaacattcacatgttctgtggacgtagaccaggtcttttactttccaccatgagagctttggataacttaggattggatgttcaacaagctgtgattagctgtttcaacggttttgctttggatgttttccgcgctgaggtaatatagttgttaagatgctatgctgatcactgattagtaaaactagcagtcaaagaatagttatttgagagaatgatttgtatataagtaacaacatgttttatgtttctaatcagcaatgtcaagaagaccatgacgtgttacctgaacaaatcaaagcagtgcttttagatacaacagagttacgctggtttggtttgattgcgaagcagaaggaagcatctgtgggaacagagctagatcta

SEQ ID NO: 147602 - DNA, 3389 bp, Arabidopsis thaliana landsberg
cttttttctcgcgcccgcctctctctctctctctctcttctcctctaaccaaatttcccgatgtgaaaaaaacaagtttcccatcaactcaaaccaccgccaccacttcttctctccgacatggctccgtcgttaaggaatttcaacttctttcaccgcttctccaccttcctcgtcttctctctgttctccgtcgtttcttccgacgatctccaagccttactcaaactcaaatcatcattcgccgattccaatctcgccgtcttcgattcctggaagctacactccggtaccggtccatgtagcttcaccggagtaacttgtaattctagaggcaacgttacagagattgatctctctcgtcgaggtttatctgggaattttccattcgatccggtttgtgagattcagagtctcgagaaactctctctcggattcaattcactatctggaataatccccagcgatttgaaaaactgcacgagtttgaagtatttggatctcggcaacaatttgttctccggtactttccctgagttctcatctttaaatcagttacagtttctgtatctcaacaacagcgctttttccggcgtctttccgtggaaatcgctccgaaacgcaacgagtctcgtcgttttgagcctaggcgataatccgtttaatgcgacggttgatttcccggtggaggtttgtttctctgaagaaactctcgtggctttacttgtcgaattgcagtatcgccggaaaaattccaccgccgatcggagatttgacggagcttcggaatttggagatttccgatagcggattaaccggagagattccgtcggagatttcgaaacttactaatctctggcagttagagctttacaacaactccttaaccggaaaacttcctaccggattcggaaacttgaagaatctgacttacttggacgcttcaacaaatcttctacaaggcgatttatcggagcttaggtctctgactaatctcgtttcactacaaatgttcgaaaacgaattctccggtgagattccgctggagtttggtgaattcaaggatctcgtgaatctctctctgtatacaaacaagttaaccggttctctgcctcaaggactcggttcacttgctgattttgatttcatcgacgcatcagagaatctcttaaccggaccaatccctccagatatgtgcaagaaggggaagatgaaagctctgcttctcctccaaaacaatctcactggctccatccctgagtcctacggtaactgtttgactctgcaacggttcagagttagcgagaactcgctcaacggaacagttcccgccggactttggggcttaccgaagctcgagatcatcgatatagagatgaataacttcgaaggtccaatcaccgcggatataaagaacggtaaaatgctcggagcgttgtatctagggttcaacaagttgtctgatgagctgcctgaagagataggtgacactgaatctttgactaaggttgagcttaacaataatcggttttccgggaagattccgagctccattgggaaactgaagggacttagcagtctaaagatgcagagcaatggcttctctggcgagataccggactcgattggatcgtgttcgatgctcagcgatgtgaacatggctcaaaactcgatatccggtgaaatcccgcacacgcttggatctcttccgacgctcaatgctttgaatctttcagataataagctctctgggataatcccagagagtttgtcgtctctaaggcttagccttcttgatctgtctaacaacagattatccggtcgtatccctctgagtttgtcatcatataatggtagcttcaatggcaatcctggactctgcagcatgacgatcaaatcgtttaaccggtgcataaatccttcgagatcgcatggagacactcgcgtgttcgtgttgtgtatagttgtcgggttactgatcttgctagcgtctcttgtgtttttcttgtacctgaagaaaacagagaagaaggagggacgttcgcttaaacacgaatcttggagtataaagtcattccgaaagatgagtttcactgaagatgatatcattgattcaatcaaagaagagaatttgattggtagaggaggttgtggggatgtgtacagagtagtacttggtgatggtaaagaagttgcggtcaaacacattcgttgtagtagtactcagaaaaatttcagcagtgcaatgccgattctcactgaacgggaaggaagatcgaaagagtttgaaacagaggtgcaaacgcttagttcgatacgacacttaaacgtggtgaaactctattgtagtattacgagcgatgactcgagcttgctggtgtacgagtacttgcctaatggaagcttatgggacatgcttcactcttgcaagaagtctaatctcggttgggaaacacggtatgatatagctcttggtgcagcaaaagggcttgagtacttgcatcatgggtatgagagaccggtgattcaccgtgatgttaagtcgagtaacatattgctagatgagttcttgaaacctagaattgcggattttggtcttgccaagattcttcaggccagcaatggcggtccagagtccacgcatgtcgttgcgggaacctatggctacatagctccaggtatataaagagacttaactcttatatcatcagcttgttatggccttacattttgaaattacaatttgacattaaaaattattgttgcagagtatggatatgcgtcaaaagtgactgagaaatgcgatgtatatagcttcggggtcgtgttgatggagctagtcacagggaaaaaaccgatagaggcagagtttggagagagcaaagacatagtgaattgggtgagtaacaatctgaagagcaaagagagtgtgatggagattgtggacaagaagataggagaaatgtatagagaagacgcggtcaagatgctgaggattgcgatcatctgcaccgcaagacttcctggactaagaccgacgatgaggagcgtggtgcagatgatcgaggacgcggaaccttgcagattgatggggattgtgatcagcaaagagagtgatgtcaaggtcaaagaaataagttgatgattgagggaccaagtcactcttttggggtctgttttgttcacaatgaaacttagggagatcgagtaaagtggatcatctaaatctattaagacgtacgtcagagtttagatgcagagtgttgtcataaaaaaactccgggatgagccatcataggtgttgtaacgatctcattgtaaactattttcttgtaattgtagaattttaaggttttcaaatgttcatgaaggtcaactactaaatgaaa

SEQ ID NO: 147603 - DNA, 457 bp, Arabidopsis thaliana landsberg
ttcttctccggctaaatcatgtttcgtcgtttaattctccggcaagcagccgccgtcgccgcggaatcgaagattgcttgtcatcatactgttcatggattcgaacagcgagtatgacattttcctttttgtggatttcgattggaaatgagtttgtttcggttctgtgatttacgtttgtggtgtttatggtttgaatcagagaggattacacagtaggaataagaaggcaatggagtatgtagccaaaggatggagcgcgattaaagaagtagagagagttatcgattactgtgaactcaatgatcgtcgtcttattcctctcctcagggtataacacttatgtatgccataagtgtttgaatgtagtgctttgtatcggtggtgtttatttctaaatataaattttttttctggtatagggagctaaagagaactttgaactgctctggagctg

SEQ ID NO: 147604 - DNA, 816 bp, Arabidopsis thaliana landsberg
gcaaagacagaaaaacggtggctggttcctcgatactttgtccaatgtatccaaaccagatcgtgctgcacaattcattatcgcatacagaaacaaggtaagcctttttctctctcttacttttcatttatcttgcttacaatgccagatagaccattataaattggttttggtgcatgaacttgttttccaggacactgttggtctgagatcatttgctgctggtgggaagttactgcaggtagctcttacattagagagtgttacttccattggtaactcaatgttgctcttatggaatctaaaagtggttgtgtcatgggtgtgtgtgtgtgcagatcaatagaagaatggagtttgtgtttgctagccatagttttgacgtgtgggagagttggagtctagaaggttctctggacgaatgtcggcttgttaactgcaggaattcctctgtaagtctctgtccttacagaaaatggcccgaaattgaaaaaccctacttcttggaaaacagaaataatttgtgtaatgaatgttgcaggcggtgttggacgttcgtgtggagatattggcaatggtaggagacgatggtatcacacgttggatcgattaaaaagaaaaacagagtctctccatttgtgagtttctctcttttaattacttttgttactttaacatccttaggattcacagacgaaaaacagagacacccaatttttgtgtttcgagactgtgtcgtgtgttgtgtagttggtatcaaccaacttatatctgtaatcattgtttctttttatttattctcggtttgcagaaaca

SEQ ID NO: 147605 - DNA, 783 bp, Arabidopsis thaliana landsberg
tttgattttcttaggaatacttccttcaacttattacaaggatgcagaatgcgtaacactaagacggtaaaagcacaaagaatcagtatttctgcattttctttctaaaaagagagaagcaataacttgcaaaatcatcgcaggaatatgtatcgtgcccgtcttgtggaagaacgcttttcgacttgcaagaaatcagcgccgagatccgagaaaagacttcccatttacctggcgtttcggttaaaactcaagactttcatacatgtttttcaagaaaaagttttcttctgtttttgaatgtaaacaaattgaataatggcgcagatcgcaatcatgggatgcattgtgaatggaccaggagaaatggcagatgctgatttcggatatgtaggtggttctcccggaaaaatcgacctttatgtcggaaaggtaacacctttattcttgagcttcgttgtgaatgtgtttatatacaactcggagcttccgggtgacaaaagaatctgattttgatatgttgtggacagacggtggtgaagcgtgggatagctatgacggaggcaacagatgctctgatcggtctgatcaaagaacatggtcgttgggtcgacccgcccgtggctgatgagtagatttcaaaacggagaaagatgggtgggccattctctgaaaactgtgagagaagatatatatatttgtgtgtgtatatcatctgtttgttgtgtattgcatcatcattttgaacaaatgtccaaatctcttaagttgataaaagttctt

SEQ ID NO: 147606 - DNA, 874 bp, Arabidopsis thaliana landsberg
atggttgagaaccaatttgtttgtcccggtgatctcactgcatttcgaacaatgccatgctcaaatgcagccataagagaggtatctgtccgtttggatgcaaaggatatcgtcaagcttcaaaaatgtggtgatggatgggtgacaacatcagacaccgataaccaaagtgactgcgtatgtccacaggtgaatattgcttgagaatacccttaagactgatgatatcattgcattttcgaatttttatgatttgatgtttcagggtgacttgtgcttacaagcaatgcaatctccaggcgtattgtggacagagatcacttataaaagaacctcgtcacaggattgctctagacttggtctggatttcaatacctcaaattgtcttggcacgtttgtttttgtcggtgatctgattgccatgtcacattcagttcatttaaccgcatatcaacctcgttggctatttaacttctttggaaagtccttcccaaatatcctagaaagaagcttgacctgcacattccatgtctctcttgcactagttcttctgaacagcttacccgtaagttctacatccaatcccacaccaaatctcataaaaatatcttgtttgtatgatcttaatagcatttgtttctgctaggtgtattaccttgatggtgaatccattttagagtcaagtctccagtcttttacttggttaagcccaagaaagaagaagaaagctcttcaagtttgccttgttggtgggagtctcctctctttcctcgccttcttcagaatcttcctcctcggtttacctctgagccgccgatggtaaatgcccccggtcttgaatctcaaatctttacaagatgatggttccagaatt

SEQ ID NO: 147607 - DNA, 585 bp, Arabidopsis thaliana landsberg
accatacactgtttctcgatggaataaccgccttaccacctcatgatttcctgtgcggagatgcacctcaatgtggtggacctgcagggacaccggtcacttccagtgccgtaatgccttcacttccattgactataaactggctaagagactgcgtacgccgaaacccttcactgaaactagaggtaaggcaaagctatattcattatccacttccaaagacaagaatgaaagtctgatttttgttttcagacattctggaatagaacagaacattaacctcttcggtaccggcttatgtttggtttctaatgatgctttgtgcaacaggttctggtcacaggatcgctacatcttgttggagatgtgctcaggttgctaaagagatgattttatttttcaccaacaaatcttcaaaaagactccttaagagtaatcttacagagcttcaattgttctttacttcactgtttttttctcatagttactatttgattctttggtccattttatctaacatgagaagtgagaaccctccacttaagctgtatttttctgctaaattttaatttatatttcctctca

SEQ ID NO: 147608 - DNA, 1580 bp, Arabidopsis thaliana landsberg
caaacctcaaaaaccaatcctttattacgaagatcctcacttgtgtcttcttctccaacactaaaccccaagaaaatgagattcttccgcaaaacctcactttatctttctctcttcttatacttctttctttatgaatcttccatggctgcaaatacaatcagaagaggcgaatctttaagagacggaatcaatcacaaacctttagtctctccacaaaagacattcgagctaggtttcttcagtcctggaagctctacgcatcgtttcctagggatttggtatgggaacatcgaggataaagctgtggtatgggtagcaaacagagcaactccaatttcagaccaatctggagttctcatgataagcaacgatggtaatctcgtgttattagacgggaagaacatcactgtctggtcttcaaacatcgagtcaagcactaccaacaacaacaacagagtcgtttctatacatgacactgggaactttgttttgtctgaaaccgacacagatagacctatttgggagagtttcaatcacccaacagataccttcttaccgcagatgagagttcgtgtgaatccacaaaccggagacaatcacgcttttgtctcatggagatctgagactgatccttcccctggtaattactcattaggggttgatccctctggagcaccagagattgtgctttgggaagggaacaagacgaggaaatggagaagcgggcaatggaactctgcgatttttaccgggattccgaatatgtctctgttgacgaattatctttacggattcaagctttcatctcctccagatgaaacaggtagcgtgtacttcacgtatgttccttcagatccatcagtgttacttaggtttaaggttctttataatggaaccgaagaggaattgagatggaatgagactttgaagaagtggactaagtttcagtctgagccagatagtgagtgtgatcagtataatcgttgtggcaagtttggtatttgtgatatgaagggctctaatggaatctgtagctgtattcatggttatgagcaagtttctgttgggaattggagtagaggttgtagaagaagaacaccgttgaagtgtgaaaggaacattagtgttggagaggatgagttcttgactttgaaatctgtgaagttgcctgattttgaaattcctgaacataatcttgttgatcctgaggattgcagagagaggtgtctgaggaattgttcttgcaatgcttattctcttgttggtggtattggatgcatgatttggaaccaagatttagtggatttacaacagtttgaagctggtggttcttcgcttcatatccgtcttgctgattccgaagtaggggagaacaggaaaacaaagattgcagtgattgtcgcggttcttgttggtgtgatcttgataggaatctttgctctgcttctatggagattcaagagaaagaaaggtactaactacgttctttcttgatttcttagtttggttactgcatcataagatcttgttgattcacttctctttattacccgcagccgtttcaggagcatattgtg

SEQ ID NO: 147609 - DNA, 761 bp, Arabidopsis thaliana landsberg
gaaagttaagagaattttccagcaattcgacgggaatcatgatggtgggctaaccgtgaagagatggcggctcttgtcgtagctgttaaccctagggttaaattcagtgacgaacagatcaacgccattctcgatgaagtttttcgaacctacgctgaattcatcgatccgagcaaaggtttgacgtacgacggtctcctacgtacttacgacgacggtgccggagatgttgacagagatttcgacgcattggggcttgagttaaacgctgatgagacgacgattaaagggtctgaggcggcttcgtcttcttcgattactgatgagagagctgttgaagcgcagaagaaacagagaacagctgcttgggctgtttcgccgaatcacggaatcgtttttgacgagacgtggaagttagttgatgatttggagattctggtgaagagattgaagtcgaaacaggagaaagatgggaaattgaaagctgataataacaataataacaataacaatgttgatgcgttttctgatgctggatggtctagagagttaggtccgtcttctgagatctctgagaagagaatctattgggaagaatcgagtcatgattatggagtgtttgtgaaggaattaggtgttttgagaagtaaagctgatggagctaggtctagagaagaagcttttgatggacatatggctattggtagggttttatatgagcatcagttgttaaagaagctcttgtagcttcaaagagcttg

SEQ ID NO: 147610 - DNA, 679 bp, Arabidopsis thaliana landsberg
  unsure (1)..(679): unsure at all n locations
ttgcaaaactctcgtccgagatatatcgactccgcgaccctccactactctgctgatctacacacacacacacaaaaaaaaaaaactcaatcgccagcaacaatggcgaagctcacacttctcttcttcctttcctttctcatcttctcctcatccatcgctttccaatcagacgagctcctcgttgacgacgacgaatttggtctagaaggagcaaagccccgctccaccgatctttacacatcttcttcttcttcgccacagcagcagcaacagactccaactatccggagaagatactcagatcctaccgatttggattcaaaagtccaatttactctcgaacatgccttcggtgactctgatttctcccccgccggtactttctccgctcgtctcaaaacctggagtcatggcggaaaggtatcgagattcggtttattgattttaggtttttggatcgaatcttttcatgttacttcgatcatattaagtttcatctgcaaattctggaattggcttgctctgaagtgaattgatctaattagagtagtagcatagtttaattcagtaattaagtagatttgatcttgtgtgtatgcagacattaacgaagctgcgattctctagaaatgattnttctgctgaagagaaagatacattcaaggaatgttctgat

SEQ ID NO: 147611 - DNA, 1274 bp, Arabidopsis thaliana landsberg
atgattgaagaaatctccagtcatatattaggtaaactgaatttaactccatcaaatgattttgaggactttgttggcatcaaagatcatattgagaaggtgagattgttattgcatttggaatctgacgaagtgaggatggttgggatatggggtacctcgggaatcggtaagactaccattgcaagagctttatttagtaatctctctagtcagtttcaaagtagtgtttacatagacagggctttcatatctaagagtatggaaggttacggtcgagccaatccagatgactataacatgaagttgcgtttgcaagaaaatttcctgtttgaaattttgggcataaagaacatgaagatcggtgcaatggaagaaaggctgaagcatcaaaaagttcttatcattattgatgatttggatgatcaagatgtgctagatgccttagtgggtagaactcaatggtttggaagtgggagtagaataattgtggttacaaaaaacaaacatttcttaagggcccatgggattgatcatgtttacgaggcctgtctcccatctgaagaacttgctcttgagatgttttgtcgatatgctttcaggaagaattctccacctgatggttttatggagctttcttctgaagttgcattgcgcgctggtaatcttcctttgggtcttaaagttttgggttcgtatctacggggtagggacatagaggactggatggatatgatgccgaggcttcaaaatgatttagatgggaaaattgagaagacactaagagtcagctacgatggattaaacaacaaaaaggatgaagcaatatttcgtcacattgcatgtcttttcaatggtgagaaagtaaatgacatcaagttgcttctagcagagagtgacttggatgttaatattgggttaaaaaaccttgttgataagtctctcatatttgtaagagaggatactattgagatgcaccgtttgctacaagatatgggtaaggagattgtccgtgcacagtcaaatgagcctggagaacgggaattccttgtggattcgaagcatatctacgatgtacttgaagataacactgtaagtttcgtgctcttttcataaatctcactctataagaccaaaagcatgtcatttgataaacgaagagttgttaggtgtttgctaagctaaatgttttttctctttttactgatcttataattccagggtactaaaaaagtcttaggtatcgcactggatattaacgagactatggacct

SEQ ID NO: 147612 - DNA, 867 bp, Arabidopsis thaliana landsberg
cttcttcttcatctcagtaatggagacttcatcgacgatctcgatcggttcttgtttaaaagagcatcagaagatctacaaggaatggttcaacatcgccgattcaggttcagtgtttttttcccttctcagatggaatttactagtgcgtcttaattattcctgctctgattttgtttcgattctctgagattacagatggagatggtcgtgtttcgggtaacgatgctacaaagttcttcgcgatgtcaaagctttctcgccaggaactcaaacaggttattattcatataatcgacgattcgtgaaatatataggctatttggtttaaaattgaactttctgagttcatgaatccatggaatttgtaagagtgtaatctagggttgattggaattagttggattttggtttgtaggtttgggcagttgcggattcaaagcggcaaggatttctcggtttatcggagttcatcactgcgatgaaggtataataattgtatcaattacatctgttaatttgaaattttctgctaaatttcttactcaatggattgattttgttgctcagctcgtctcattggcacaagaaggacatgaaattacttcagaccttctcaaaggctcaagtaagtggaaaattacatcttaaactgtttgaatcaagaggttctgatgtaagagcttgatagtcatattagatatagctaatctgtatctttgtttttgttatagttgacatgaagagtgtggaacttccagtgttggaaggactagaaaacgttgtatcagtaagactctttcttatctgattatctcattttgtttttcaatctttacatgatttggttttcctaatctaatatat

SEQ ID NO: 147613 - DNA, 1065 bp, Arabidopsis thaliana landsberg
  unsure (1)..(1065): unsure at all n locations
gcactacctcctcctccaacgtcagtcccattcngaagcaactcattgggtcatgaaaccaagtctgagataaagaacgagatgtctccatctagtgggagctggagtagtggcagcccaactccgtcagagaattctccgggaatcccaccagtctcacagggctcaagccaattctcagctcgtggacgtatgggtgtgcgtgcaaggtaaacaaaccacttgagacacttgagaattatatataatctgtggaggctatcctggatcctaagttagaatggcaataaggaaggaatataagccaccattgatttacgggtacaaaagagcttttgatgtgagatgggaatagttctcctgatggtagtgtacggttgtgcaactgatagctataatttgtctgatcgtttattaaaaaagctactggatataatattccctcgttagtgttttactgtagataatgtgcatgcttagaactgatcattttactctttttcgggggcaggtacgtagacacctataatcaaggctcctcgagcatgtatcagtcacctcccgtgcaatcttctaaaccaccgattcctgcgaaagcaaaattctttgtcccagcagcaccggcatcgtttgcaaacgaccaggtaatggaatcggttagtgctgaaaccagacaagagaactcaggagatgaagcagtagtaggctctgcaggcgctccaggaccaagccaggcttcattccagtccccgacaccatctccaattgcaatgcagagatttccaagtgtagacaacatcagaagaagtggatcaggaacaagccttaatggtgatcttcctcagtcagtatcaagaagaacagcttcatggagcggaagcgtcaacagctcgtcgtttatgtctccaacgagtgcatcaacattcagaccaagcccactgaacagtagcagtagcagcttaggagaggagcttcaggaagttgaactgtaagttgaaaaaaaagtaatatcacaaaagaaaaaaaaagttttgctcactgtcacaacaggttaggtcgatcaat

SEQ ID NO: 147614 - DNA, 1322 bp, Arabidopsis thaliana landsberg; identical to SEQ ID NO: 26468

SEQ ID NO: 147615 - DNA, 1255 bp, Arabidopsis thaliana landsberg
attaacatctcaagtcaccgagctaaaacggcgactcgcgacggcggaggaacaagtccgtcagatgaaatctcggcgcgtggaagattctaaacgtaacgcgcgtgtggtcgagatcttcgctagtcatagaaacgcttggcaagaagaagagaaacgattgttgaatcggattcatgaaattgaagaagaaagagaagatgtcatgaataggattagtgaattggagagggaagtgagtgagagagatgaaatgattgggtttatgtctcgaagagagattgaggaagaagatgatgatgatggacaaggagatgagtccagtgaacgttatgctgtggatcatctcactctatcttcatcaccatcacctaatgcttatggcaattttaatcctttccaggttttgattttgattttcttaattatgagagtgaagaatttgtgtgtttggtttttcaagttttgcttctgtttttgtaggatttacaatatgaatctttggaatctgtgtatcgtatgaagcattttgtgccaaggtaatagagagtttttgaattgagaatgtgtgattgtgattgtgatgatgagtgatgtataatagcttgtctttgattgcatagaagggaatcaccatggaagattgatagtgaagggacgggtgtatctgcgaaactgaggttgcttgaagaggaattactgaatcttgagaaagtttgtcgtcctagtgacatatcgaaagttccgtctttgttgaaaaaacaggctaagaggtatcaagctctttcagggaagatcgatgatctatgtagaagaatggttagtctctatgagtgatttgcttacaagttacaacacattcttgagttactccttacacctttcatggaatttatgttttcagcagagtagtgatccgtgcgatgctacattaggacctgagttcaggacgcaaagacaaaacgagtttctgctcgagtgtttcagacttcagcaacgggcatcggagacaggtcagaagctagtttcattgcagacggaaatcaccaggagtaatcaaggagatcagttaagccaagccaagatgaacacagggaggtcattggatttgatcaagaacaacttgaaagaagttcagagaaacttggagatttggctggctagaattattggagatcttgaaggtatacttgctagagacggggcttcacgtgtaagagaattctacgttgctcgatacccttttgttcagtag

SEQ ID NO: 147616 - DNA, 2216 bp, Arabidopsis thaliana landsberg
  unsure (1)..(2216): unsure at all n locations
cctattgatcctgctgccattttcacagtaagattgcttttcattttcnnnnnnnnnnnnnnnnnnnnnnncccctttaatttatgctatgcagcaaggagccaaaagaatgcctggaactgcagttacaaaatcggttgtggctaatgatcctgggggtcggagaagagaggaaatttttgtggacatcatcgagaaaatcagtgttacttttagttcaagcgtgagtagttacttgcttctagtttattatatcaaaagtacagaagtcttggcatgttctcttcttgccatatcaaaccacccatttctgcggatcaatgctttgtattatgtactaatacatgtaggtgcatcttaatgttagttttcttcatggaaaatatccattatttttctgatttctgaacagggatatatactgacttctgagattgatggcaccattcaaatgaagagctatctttctggtaatccagaaatccgtttagctcttaatgaagacctaaacataggaagaggagggagatcagtatatggtatttcttgtttcacccctttaaatcatctttattatatttggaaggaatcaacgtcatattctatcttgtctcactctttgaaatcttggtgtctctttctgtgacatttggcgttgacaatgcttaaatgtcaactaagctgtatgttccacttacaaacttccctcataagtcataacccaattcgtaaatatatgtagttactcttgtagcattttttctgcatctttgaggcacatcagtatcaactggggattgatctattaatacaatctaacccttggtaacatcacacttgaaatgttgcagattataggagttcttcaggttcaggggtgatacttgatgattgtaactttcatgagtctgttcgtctggatagcttcgattcagatagaactttgtccctggtgagcgtcaaaatatttagtacagaaaacatcttgtaatagcatgttgtattagtctttaacttgcgttctgttttcaggttccaccagatggtgaatttccagtaatgaattaccgtatgactcaggagttcaagcctccttttcatgttaataccttgattgaagaggctggacgtcttaaggtgaaatttcatgcgtacatgtcttctgagtcagataaaaactgcgtatatttcttaattgctctataaatatttttctgtttgctgaaatttaggctgaagtgattattaaaatacgcgctgagttcccttcagacataattgcaaacacaatcactgttcagatgccattgccaaattatacttccaggtacataactttttgattggtttgtacaagtgcatcactgagatattgtacatgaggaagagaatacgatgaatttatttaaattccagctatagtgatataccgaattctgaatcacacaagaaatagaatcaacgattatgtttattgtgacagggctagttttgagttagaacccggtgctgctggacagaggacagatttcaaggaatccaacaaaatgcttgaatggaatttaaaaaaggcaagtgttaaatctctcacgtggtttgctagtttaggtatatattgaactgtatgttgcttccatgagctaactgtggcattccagattgttggcgggggtgagcatacactgcgtgcaaagcttacattttcacaggaatttcatggttaccctataagacaaaagtttgtaatgtttgttctctcaggggaaaatagagcattactgataattctcaattcgttgtaggtaatatcacaaaggaagcagggccagtcagcatgacgttcacgatacctatgtacaatgtttataaacttcaggtaagtaatatgccgattcttgcattgccattaaccgtcctcttcgatcattaacgctaatgaattgggtgatgcaggtcaaatacttgcagatagcaaagaaatcaagtagttataatccatatcgttgggtgagatatgtgacacaggcgaattcttatgtggctaggatatgacctgttttcagataatgtttatccttcacttgtatgtctaagtactttctcttttcattttcggatcacacttgcttcacagtactgtgttgaatgttgtctcttctatttggatactttcttgtttcggtatcaacataatatggctatatgcttttattttg

SEQ ID NO: 147617 - DNA, 916 bp, Arabidopsis thaliana landsberg
gctccattattttcccaatgttgtgaatttgagaagaaaagtctgtttttttattgagatttttttgtttctatagattctatcgaaatgccgatgtttcagccgttaaagagagatgggttaataggatttgaaggtggtggtgatgggcaagtcttagatctggatactgcagtgaaagatggagttctcggtggtgttaatggtggtggtgtcggagttgttgatgagaaattggatctgacgaagatgataaaggcgctagatttacaacgatataccttctgttatcatttgtcctatctctttacagccgacgcaagatcctgtgactttgtgtactggtcaaacctatgaaaggttgaacatttacaaatggtttaacctatgtcacttgacttgtcctactacaatgcaagagctttgggatgatacgtgtaactcctaataaatactcttcatcatttgatctatacttggttctctcagaagtatgtgttgatgaagaaacgttctgaggatgttcaaggacgagctattgagattttggggactttgaagaaagctaaaggtcaagctagggttcatgctttgagtgagcttaaacagattgttgttgctcatcttatggcgaggaagactgttgttgaagaaggtggtgtctctgtgatctcttctcttttgggtccttttacttctcatgctgttggatctgaggttgttgctattcttgtgagtcttgatcttgattctgattcgaaatccggcttgatgcaaccagctaaggtttctttgattgttgatatgttgaatgatggatctaatgagactaagatcaattgtgctagattgattagaggattggtggaagagaaagggtttagagcagagcttgtttcaagtcatagtttggctt

SEQ ID NO: 147618 - DNA, 1648 bp, Arabidopsis thaliana landsberg
tcttagccaaaagtaaatacattatataagatcgatctcacttttggtcggaataagaaggtattggatcgctgacagataacccgatcagattcagggagtttaatcgatcagatcattttttgtcaatgacgaaaaaggcggtgcttattgggatcaattacccaggaaccaaggcggagttacggggatgcgtcaacgacgttcgtcgtatgtacaaatgtctcgttgaacggtacggcttctccgaggagaacatcaccgttctcatcgacaccgatgaatcctctactcagcctactggcaagaacatccgccgcgcgcttgctgatctcgtcgaatctgccgattctggcgacgttcttgtcgttcattacagtggacacggtacgaggttgccggctgagactggtgaagacgatgacactggtttcgacgagtgtattgttccttgcgacatgaatctgattactggtgagttttatctctcttttttttttttgtgattgatggctacgatctgacgttctggtctccgatcctataataatcagaagaatcttttgatagaaaagttttgattttttgtagaattgttgatcttgttttcgagattggtctctcatagagtcatagctgagaaaaagtaggatcaaacgaaattaaggaatctcatatattcttggtatctgactttggaatttgtccatggagctttgctgatgtaattttgttgtttccagatgatgattttagagatcttgtggacaaagttcctccaggttgcagaatgacaatcatttcagactcttgtcacagtggtggcctaatcgatgaagccaaggagcagattggagagagcactaagaaagaagccgaggacgaagatgaatctgaagaatcttcttcaagattcgggtttaggaagttcttgcgcagcaaagtggaaggcgccatcgagtctcgagggtttcacattggagggaacaagaaggatgaagatgtggcggaagaaatcgagactaaggagattgagcttgaagacggagaaacgatccatgccaaagacaaatctcttcctctgcagaccttgattgatattctcaagcagcaaacagggaatgataatatcgaagttgggaaaatcaggccaagcctttttgatgcgtttggtgatgattcgagcccgaaagtgaagaagtttatgaaagtgatcttaggtaagcttcaggctggaaatggagaagaggtggctaatggaatgcttgcaaattggcttcagggttcttgaggtaaactaaacgatgaagactatgtgaaacccgctatgcagacacacgttgggagtaaagaagaggtttatgctggtggatccagaggttcggttccgcttccagacagcgggatactgatcagcggttgccaaaccgatcagacctctgctgatgcgactccagcggggaaaccaactgaggcttatggagccatgagcaattcgatacagacgatattggaggagacagacggtgagatatcaaacagagaaatggttacaagggctaggaaggcattgaagaagcaagggttcactcagcagccaggtttgtattgccatgatggttatgccaacgctcctttcatctgttga

SEQ ID NO: 147619 - DNA, 357 bp, Arabidopsis thaliana landsberg
gtatcagatgtaccactgaaggtgagaaaactagtggtgaaaatatgcgatgtggttacacgaagagcagggaggcttgcagcagcaggaatagcaggaatcttgaagaagataggccgagatggaagcgggggaatcacgagtgggagaagcagaagcgaaatccaaatgcagaaaagaacagttgttgcagtagaaggaggtttgtacattaattacaccatgtttagggaatacatggaagaagctctcgtagagatactaggagaagaagtgagtcaatacgtggtggttaaagccatggaagatggttctagcattggctctgctctcctcgttgcctctttacagtcatga

SEQ ID NO: 147620 - DNA, 2048 bp, Arabidopsis thaliana landsberg
atcaaaggctgttaaatcaaagatgttatcatcaaccgatgtttcggctgtggataaagaaaaggacgcctttttcgttgttcggaagggtgatgttattggaatttataaggatttgagtgattgtcaggctcaagttggatcttcggtaattatgttttggccttaagagtctgttgtgtataatagatactctctttatgatgggaatataagagctttcttaataatggtgtaggtgtttgatcttccggttagtgtttataagggatactctttgcctaaagacactgaggaatatctctcttctgttgggttgaagaaaccactatatagtttaagagcttcagatttgaaagatgatatgtttggtgctcttacaccatgtcttttccaggtaagatcataaaatggccttcactgtatttctcttctctcctatgatgcattcttggagaatatctgcatctgccatgatttgtgatgtgggattttaaactgaaatagtaactatctctctttaaatttcttcactaggagccagctccttgtacagtcaaagtatctgaagatgagactacctcagagacgaagtcaaaagatgacaaaaaagtaagctataagaacaagtttctttggaatcttattgagttgcttagctgaattttaatgattatgagacaaagcgattaagctcgttgcttaagtattcatttttcgcaggatcaacttccttcagcttctatatcttatgatcctttggaaaagctttcaaaggtggagccatctgcttatatatcagacgtgagttgtgattatgtttgtatataccgttactcatagtttcaatggactggatgcaaaattttgtgctcaagttggtctgtttctcttatctcctcatgtgttaggaaacttgctttatcgagtttgacggtgcatcaaagggaaatcccggtctctccggcgcagcagcggtactgaaaactgaggacgggagcttggtatgtatccttttgaatcactgttactaattaaagaatgcagtgatgtatctaagtatcaattttcaacatagatttgtagagtgcgtcaaggtttgggaattgccacaaacaatgcaaaagaataccatgcgttaatcctaggattgaagtatgctattagaaaggttacaagaatattaaagtgaaaggtgactccaagctggtctgtatgcaggttcgtcaattaaaacgttatatatttttgtgcaactaggtaagtttaatgaatcatatacgcttttatcttctcactttctcaacactttctgagaaacaacagattaaaggtcaatggaaggtaaaccatgaggtactcgcaaagctccacaaggaagcaaaactactttgcaacaaatgtgtctcttttgagatcagtcatgtactaagggtatgtctatgtgtgtctctgtctgtgtaaatgaatgatatcacatatttctcgtctcatgcttgtgagttgtgagaaagatactaatgcaagtttctgccattattggcatttttctttgtagaatttaaatgctgatgcggatgagcaggcaaacttggctgtccgtcttcccggttagacaacctagtctcctcttttctctgcatttgacaatgtcggatcaaaataatacagaaaactaaccaactctgtgctgcctttacagaaggagaagttgaggtggcgtgaaggctaattatcgatgaactaatataaagatccgggtttgttgttccacaccacatacagatctaaatagcctgagccctgaacaaatgtactcatgttcgttaggaaaaaaaacatcttggattaaaatctctgttttcttgcagagttacacactagcgactagccactagaaactggtgaagaaccagaatgagcacagagaattctctgtcagatctcacagagaacagcagaaactgactcatcatttgtcttctctttacttcagatgatattttgccggcgttctaacgttaaaatatgcggtgctcttacactag

SEQ ID NO: 147621 - DNA, 1519 bp, Arabidopsis thaliana landsberg
agccaaaactgaataaagaaaagatttacacaaatcttataatatctgacgcatatataggcgagattgctgacgataagctttttcgttttgtttccatggttttgtgacgaagaagagaaaaaaaaataagaagtcagttttttctcaatggcttctcatagctattcaacacttaggtttagtctccttcaagagctaagaagcaacgagatcatcaaggtcagttttttactttctctgttttaaaacacttgggtttagaatctctcgttgaattcttgtcctggttctgtcttctccttgtttggttcttatgtctatgaatgattcagacaagccgggcttatctggtgaatcctggaggaagaaaatatgagatattaccggagagctcctttaacctgaaatcacaactcttggagccattgaaacctttttcttcttttagtaagtctaaccactttttggagtttgattcaaccatgatgaagcatagactcatggatgttcatggtatgtgactttgatcaaatttcagttgaattcaccgaattgtaatcccttttttcgactgacatgaactgtggttaacagaaactggaccagaccctgtgtgtttaagcttggggatcactcagcagtatgcaagaaaagaggaggtgttagagttccttttgtctagatcagaagaagaactcaaagaagaaggattcgatttgtctctcctatctgaattgatgggtctagatgctttaagatcaagttctcagcaaccatatgcaaagccgttattggatctcatggtggatgctaacattctgttctcaagtagcagagctgaattgaatgatttggtctctacggcagctgagtttcatagattaaggaactcaacaagatggagaaagctctcacggcttgtcccgcagtttcagcggtagttaattcttcactgcaagtttgattcatacctatgagtctcatccttttgggtttaacattaagtttttgctctcctctcattctgcagattcgacagtgaagtaccaatagacactctgcagctacccgaggacgcagttacactagctcctccaaagaggtatctaatatcatcaactagtttttggtacttttgcatctttaaaaaacgtttctttcgatttccaacagtccgaagaaaaccaggctcaagccttcaccaaagaaacaaaatccgaagataagagataaggaatatgacctctacgaacgaaaccgtcttcatgcgtgtgagagccttctctctctgatgataggcaatgaacaacatagaaaaaccacaatgctatctctaaagaaatcacgtggagaactcttcgagcttttgactcagtgttcaattggctttgctggcactggtatggctgtgctcttctttctcgtttgtaatgttgcttccaggcaggtacccttttgcgcaaaccaattcttcgagggtgcaatgagtttgagtttggtattgctctcgtggtct

SEQ ID NO: 147622 - DNA, 641 bp, Arabidopsis thaliana landsberg
gctctaacacgagctagggttccaattgtaaaacttatggatccggttactgggatatcttgtgatatctgcatcaacaatgtattggctgttgtgaacacaaagctcttgcgagattatgctcagatagatgtgcgtttaaggcagttggctttcattgtgaaacattgggcaaagtcaagaagggttaatgaaacttatcaaggaacactttccagctacgcgtaagttctcctccacactttgaagtgaagttactttggattgcaaattacaatcattacttatatttgatacttttgcaggtacgttctgatgtgtatccatttcttgcagcagcgtaggccgccaattcttccttgcttacaggtgtgtataataacatcctcctaaaatagtgtactgattactgaatgctcttcttttattgaagttattacttgatgcaggaaatggagccgacttactcagttcgggtagataatatccggtgcacatactttgataatgttgatagactccgtaacttcggatcaaataacagggagaccatagctgagctggtctggggattctcaactactgggcttacgctcatgactatgcgtataatgttgtatccgtccgcccggttcaatctt

SEQ ID NO: 147623 - DNA, 540 bp, Arabidopsis thaliana landsberg
aaaataaaaatggaatctttgaaacgtttcctctgctctattgcgcttcttcttatctcccttcttctaccttcaagcttagctcaacaacaacaacatgaatcaatcagaacaatggaagatttttccggatacccaattcacgaaccgggtcaattcggttccatcaatctcgcttcttcactctccgttgatgctccaggactgcaaaaccaggttcaatttcttaaagtggaacagtagataactaaagtttagaactttgattttgatggatgaagttcttttgtttttggttttagatagatgagctttctagtttctctgatgctccttctccatcagtcaccagagttctttatactgataaagatgtcttggctcgaaggtaatttgaatctgtttacttgattgagtaatcataaagattagattttgttaagctaagttgattggttttgttaggtatgtgaagaatttgatggcacttgctggtcttaatgttagagaagatgctgttggtaacatatttggcaaatg

SEQ ID NO: 147624 - DNA, 816 bp, Arabidopsis thaliana landsberg
ggtttatcataggcaccgccttgctttactctcgctggagttttacggcgaagcacggttgttcggggttgtgtcagctttagattcttctcttcatagctagaattcgcgaaagctgactttaggtgaaacgaatttctcctaattttcgagatatggcggaggtatcgatgggaagcagcagtagcagcacggatctgtctcccgaggaagagcgagttttcatcagagacattgctattgctgctgaggctaatagtaaagaaggcgatacattttatctcatcactcagaggtttataaagctttgatttttgctccctatggtcacttgtagcttgaatttatcaaattcccaagagttatatctatctgttcgtcttgtttggttgccttggtttcggacttggttagggttagagttacgattagggattgggttatctgtagtagttgatgagattagtttgagcatttcataaccttttccaaagaactgtcttttattgactcatgtttatgggtattgtattagattacaaccattgtgataaagtttgaattttctcttatggtacttctgctgagaacattctctctcttttctgtccagatggtggcaagaatggattgagtatgtgaatcaagaccaaccatgtaacacaaatgatgggtcttcactgtcagagcattgcgactctcctggttcaagcactctaaagaagccttctaggattgataactctgatttgatctatgattcttcgctggaggacccgagtaataccagtgagattattgaaacacttcaggaag

SEQ ID NO: 147625 - DNA, 1747 bp, Arabidopsis thaliana landsberg
tttttcctcggaaaccagttatcagagttccagcaagtctccgatttgtagcgacgatgtcgacccctgccgccgccgtcgacgccaccgtcacagtcaccgatgccggcagaggatcaatcactcacgtcatattcgacatggacggtcttcttctcggtaatctccttgcatctgatcttcaatctccagctttattagatcgtactactgtcactatcgttgtttagatttgatggtttttttagtagtgactgtttagtttccaggattgatttcatacaattgatgttaagatgctaaagcaattagcttgaatctgatcggaattcgagcgattgagtttttgttctgtgtattcaaaatctcacaacttcattggcttatctgctcttgctgcatacattcatgctgatttggtttctgttgcagatactgagaagttttacactgaggaccaagagattatacttgctaggttcaatacaaaagtttgattggtctctcaaggctaaaatgatgggtagaaaagcaatagaagctgccttgatctttgttgaagaaagcgggattagcgactctctttcagctgaggactttcttgtcgagagagagtcaatgttgcaagaccttttccctactagtgagctcatgccaggtagattctgctttttgtaacacatgacatttggttcacaggaagattacatgtatggatatttatgtttttgatgtggtcatgaaccaattctcttccacattttcaggggctagtagactcattaagcatctccatgtaaagaatattccaatatgtattgctaccgggtaatctcttcacctcatctcataatataccatttagtttgcattctcattgtcctttacaatccagaaactgacttgttatgtttgattgtacgcttgcagtactcacacacggcattatgatctgaaaacccaaagacacagagagcttttctcattgatgcatcacgtagttcgtggtgatgatccagaggtgaagcaaggaaagcctgctcctgacgggtttctcgctgctgctaggagatttaaggtaactaacaggcaacagtctccaagattctccattactaactagttcatatttaaaatgagttgtagactaatgtttcctcttcgtctggattccttaggacgatcctgtggattcacaaaaggttctggtgtttgaagatgcgccttctggagttcttgctgctaaaaacgccggaatgtaagtggattgcgtgtaacattttccaagttctcttagctgatgagctattagtggttcagttctgactggtgtgtgtgcaggaatgtaataatggtaccggatccaaggttagataagtcctactgcaatgttgcagaccaagttctggcctctctgctagatttcaaaccagaggaatggggcttaccttccttccaggattcacacaactaaaacaacaaagctttcagggcaacgttatcctcaagctaacgatacttgactcgttaactttgattctttaagcctcttacgctatacgagaaagattattgcaaattatagattcttattggggtaatttaaaacaatatatttatgttcgtgatttgttttcttgattcatgaatttgtgattgttatccagaccgttaagtgtgactttagtgagaatgatattagaatgattgttgtgagtgtgggttacattcgaggtcataagcttag

SEQ ID NO: 147626 - DNA, 1479 bp, Arabidopsis thaliana landsberg
aattctaccctcttcctcttcctcttccttctctctctcttctcattctcctcatacgctataaggagaaaatctcagagagagagtgatggcgaacaatgagggagagatgcaatgtgggtccatgttgtttaagcaagaggagctacaagagatgagtggggtcaatgttggtggcgattacgttgaggtcatgtgtggttgtaccagtcaccgatacggcgatgctgttgctagacttagggttttccccaccggtgaccttgaaatcacctgcgaatgcacacctggttgcgatgaaggtctctctttttttgtctctactgtctctttctcgtgtctttctgatgcttttgggaaaatgggttttgatttgtgtgcatgttacatgtgaatgtgtgtgagattaaacgtttgtctctgtctagctactatcacattgggctggtaaagctagggtctttagcatgattacatatttatcaatgagtcttagtgtatgctagctagatccgttcttgtagaaaatgaaatgacttgatttgccacagtaatgttttaggctgtctgtttatctgtaaatggtaatgcgtctctttgttactggccaagtggtagctttattgacaaatgatatgtctcgcttagctgtacgtgtatgtcaaagtttgatgcaacctagttcttgtggtatcttgtagctaacaattccatctctagcttatttggtatagatgctcatttagagctctctttgaaagtaaaagtgactgacttgaacagttttgattgtatgatggtagacaagttgacaccagctgcattcgagaagcattctggaagagaaacggcaaggaagtggaaaaacaatgtgtgggttatcattgggggcgaaaaggttccattgtcaaagacagtattgctcaagtactacaatgaatcatcaaagaagtgcagtagatcaaacagatcacaaggtgccaaagtttgccatagagatgagtttgttgggtgtaacgattgtggtaaagagaggaggttcaggctgaggagcagagacgaatgccgcttgcaccacaatgcaatgggtgatccaaactggaaatgctcagatttcccatacgacaagtaggtgtcttttgttgtccttgtatgtacttaagtttgatgcaaatgatgtattatatcaatgaatggtgtggtggtcgtaggataacatgtgaggaggaagaagagagagggagcagcaaggtgtccagagggtgcacacgttcacctagttgcaaaggctgcacctcctgcgtctgttttgcatctcagttctgccgtttctctgagtgtgcttgccagacttgtgtcgtcttcaccagctatgtcgttgccttctcaaggcagtcctttgatgaaaggcatgtgaatgtctgtggccgcctctgttcgctgcgtttaatcacaacttctcatggtccaaccagttaa

SEQ ID NO: 147627 - DNA, 824 bp, Arabidopsis thaliana landsberg
gtcaaattgttcaaagcatcaaataagtaaataaaaactcttttatgttcacctttttcactatcctctctttgtgtttcaaatcgtgggaacaaattatcacaatggaggcttctaaagaagctcatcaccttccaaactacatgaaagacgacaacgttagtcaagaaaccaagaacttgatcacttctctaccttcagacaaagatttcatgggttatggtctctacaactacaaaggttgttggtactatccaaacacactccaagccgttcttgacgtccaaaaacacttcaagccacgagatactgatataatcctcgcttctttgcccaaaggtggaaccacttggctcaaatccctaattttcgctgttgtacatagagaaaagtaccgcggaacccctcaaacacatcctttgctcttacaaaaccctcatgaccttgtcccatttcttgaggttgagttatacgctaatagccaaattccggatctcgcaaagtattcttctcctatgatcttttctacacacatgcacttacaagcattgcgtgaagccaccacaaaagcttgcaaaaccgtatatgtgtgtagaggtatcaaagatacgtttgtctccggctggcattatagaaacatgttgcatcgcaccaagatggatcaagccacttttgagctcatgtttgatgcttattgtagaggagttctcttatatggaccttattgggaacatgtattgagctattggaaagggagcttggaagcaaaggagaatgttcttttcatgaagtacgaagagataattgaggagcctcgtgttcaa

SEQ ID NO: 147628 - DNA, 449 bp, Arabidopsis thaliana landsberg
tcaggctggttttgtgagaattatagttgcagcaagaaagcgtttcagatattttttaatggccgctgaggtaataattgactagagattgatgaattaagagtagttattgacgcttatagaagaagtagattctatatgaagaaagtttctttttttggaagaacttgaagtaaaagccatttaatttcatttcttgtttccacttcaggatcgaagtgaggaactaagcagcaatgtagaaaatggaagttgcaattccaatgaaggaattaatcctgaaaccagcagtcattggattgaaaacgttgtcaaggtactatatgttttgtcacaactttggagaagagacaaatttcagattttgccagtggatcttacctctcctctgtgtattgttcttaaggttaggaaaccgttcacagtaactaagcacagagagaagtgga

SEQ ID NO: 147629 - DNA, 995 bp, Arabidopsis thaliana landsberg
atgggagttgaccatacgacggttcttaacgaccaggttagatggtaaacgtagatgaataaataagtgacagggttttaggagcctgcgagtttaatttttgttgatttcgggaaatctaacaagatacttaattgataacaatttcatttactgttaactaactcttaaggttctaaaattattagttacttttattcatttgtgtttaccagtgggcaaattttgtgctttcctatctaggatcttaaccggtcccccgccagtggtgaagaaggtcagggtatctcgggacctttgtcaagccctcccccaaaatctgaaataaccgaggttagttgtctaattttcttagctatcagttacctgatattgctgttagttgctgactttattactaatcatcactccattcaggataccactctcggatctgatgttgaaccaaatacatcgacctccggcatatagatggaccccattccaaatgtctctcctgctgttccaccagtcggtccacccattccaactgcggtacacgccgaggtttagtactcacaaccttattctataaatacctttgtagctgctaaagatttaaatatcctgtgtcaggctgctgaagattttcctgtttattcttcacaacccaaaacaattgtccgcgaggaggtttgtctgcatttgttttttcgggtgcattggcgatgtcacttccttgttaaattttcttattattttttttagatcgtgataactaggactgttaactccaatactcccccgagccagtcgatcccttcgaaggtttttttctcctttttcattatatttaatatcattattaggtactaaccatgttacattcgtaacagtagcattatttagtaacgatactgaagcatgtttgttaatgatagtaacatgaataaattgtttttgtttaggttgcggatgatgcttctggtcgtgctactctgctaccgaccacacag

SEQ ID NO: 147630 - DNA, 513 bp, Arabidopsis thaliana landsberg
agggagttttcatctcaagttcaggagaccaagctcattctactggtggcaatggtgggttgtttcttctctgttagttttgagattgatccttttgattttaaatttctatgtgagataagtgcatatatacatatatgttgatgaattggtgatagcataagtcatctcatggcaatatgcttacacttgttagagttaatggtttcaagagtcagtgatgatctggatgggaaattaaagtcatggtgatgtcaaaactgaagtttcttatagtttgcgctggtgttagcttaggtctgcaagggtttgttcttgatctagtatacttgcctttctgcaggggctttggcatttgatgcagaacactcacgatggcttgaagaaaagaacaggcaaatgaacgagctgagatctgccctgaatgctcatgcaggtgatactgagctccggataattgtggatggagtgatggctcactatgaggagcttttcaggataaagagaaatgca

SEQ ID NO: 147631 - DNA, 679 bp, Arabidopsis thaliana landsberg
atgaagcggtatgacccaaatggcgacaacaccggacagctcagcgatatcgtccggttgaccaagaaatttaagaaccggagtagtgaaaatataagttggtaataacaagacacagcaaaagaagagaacaatccaagaacgctgcatataaactcccaacatatgatatttcttcgctccaaacgcttgtccacacagcgtttccaacgcactcgccattccaagctaaaccatttacatatactcatattattatttcttagaaaaatgaaggaaaaaaacattttaatcaagattgtgtagatactataccaagaggccaaagttgaagcctacggtgacgttattaacgatggatatggcggcgagttcaagatcgccgagatgaccagcgaaagcttgagtgattacaagcatcgaatatgtcgttactcgactgaatatggccggaccaactatttgccatagcttttttgtctcaaccaaaattctatccttcaatccttcaccgtcttcctccgccgtgtgaggacttttcaacagtgcaactcttgactccgatccttcttctccatcacctgccctcatcgctaattcctttttttttagttatgtggaagaaatgaaatataaggagaaaagaagaagtgagaagaatggtgaagacgagagatga

SEQ ID NO: 147632 - DNA, 1499 bp, Arabidopsis thaliana landsberg; identical to SEQ ID NO: 10778

SEQ ID NO: 147633 - DNA, 1251 bp, Arabidopsis thaliana landsberg; identical to SEQ ID NO: 27968
  unsure (1)..(1251): unsure at all n locations

SEQ ID NO: 147634 - DNA, 669 bp, Arabidopsis thaliana landsberg
atgcacaataacgtacagattgcaaccttaatagctacttatgcgcattgggaatttgcgagaatcaaaggttgtggatggggatggtgtggagtcatctggatctacagtatcgtcacatacattcctcttgatatcctcaagtttatcactcgctatacccttagtggcaaagcttggaacaacatgattgaaaatagggtatgtgtgaattaaaatcttgattcttaaaaccacaaaaatatatatattgacattatttattttcccttgttgtgatttaagactgcattcacgaccaagaaagactacggtaggggagaaagggaggctcaatgggctctagctcaacgtacgctccatggacttaaaccgccggagtcaatgttcgaagacacggcaacctacaccgagctgtctgagatcgctgaacaggctaagaaacgtgcagaagttgctaggtatgtaaaattgatcactctgaaagatttataggtaaacatttttctacaagattgataagagttgtgttgtgttgtgttgtggtgcatgcaggctaagagaagtgcacactctcaaaggccacgttgagtcagtagtaaagctcaagggtcttgacattgataatcttaaccaacactacaccgtctaagccaaacaactatacat

SEQ ID NO: 147635 - DNA, 665 bp, Arabidopsis thaliana landsberg
gtgttaagtgcacttatgctgaagctggattaagcagcgcttcatggtcagcccctattgacattgtggcagatgtcaaatccgaaagggtacgaaagtgaaagaacgagccttttttacttgtgtgtatatatgattttcgtgtctcaattgaaaaggctttttcttttacttaggttgtagttcttggtgggaatggtttcgttggctcagctatctgcaaagcagcaatctccaatggtattgaggttgtgagtgttagcaggtatagaaaaagtaggaacagaatgctttttcattgaagtcatgaccagtctcgccttttatcgatgaccgatctccttgattgattctttaggtcaggtcgtcctaacttcgaagattcatggttggatcaggttacatgggttactggtaatcacttctgttttggttatatcaaagattcacataaacatgtccaagtgtggattattaatgtgttttttgtctttgtgggacattgtaggtgatgttttctatttgaattgggatgaagtacttcttggtgctactgctgtagtttcaaccattggtggttttggaaatgaagaacacatgcacagaatcaatggtgaagctaacgttaccgcaaagaatgctgctaaggattttggtaaagtatc

SEQ ID NO: 147636 - DNA, 1371 bp, Arabidopsis thaliana landsberg
atgctgagagtaagaaaggcaatggagaataagaaccagaagcggtttgtgctcatccatggggtgtgccacggggcatggacttgggacaaggtgaaaacgcagctggaggttgcaggtcactgtgtgacggcagtggatcttgctgcatcaggtataaacatgaccaaagtggaagagattcagactctgaacgattactgcaaaccattgcttgagtttctgagctcgcttggctcagatgacggtaaggtgattgttgttgctcatagcatgggaggaatatccgctgcacttgctgctgacagcttcgcttgtaagattgccgctattgtctttttgacagctttcatgcccgacacaataaacccacctgcttatgtttacgaaaaggtacataaatgaacatgatgttatctgactgatatctcttcagagtgattctgatacttaaatctgcagctgctcagaagcattccacaagaggaatggttggacaccacgtgtgtgaactacgggaaacctgattttcctctacagtatactcttttgggaccaaagtttatggccaagaaaatgtatcaaaactctccagttcaagtaagactccaatctttaaagaaaaacaaatgggattgtgctagtaatctcagtcaatcttttgttgattgttgttgtggcgaataaggatcttgaagtggtgaagacattagtgagggaaaacccgttagttacaaacaatctggcagggacaagaagctttagtgaggaagggtacggatccgttacacgtatatatattgtatgcagagaggatcttgtggaagtcgaagattaccagcgttggatgattagcaactttccaccaaaagaagtaatggactatcaaatgtgcagatcatatgccaatgttctccaagcctcaagaagtttgtgctcttctcctggagattgcaaataaatattgcaaaaattaaccaatttcagcttccaccaataaataatacgccataagagaatacatctatatgtatgagaactaagcaaatgataatgcttatataataaagtttcgtgagaaaactgtattacacagagaagtagttacaaggcctcttggtttcaaatgtaggatcatagcatcataatagagagaactgcaatgtctgcattgcgaagcatcactataaccaatgttgcagagcaatttctatatgcaagatgaaaacaactgaacaatatggcaactgcactgatctaatcttagattcaagaaaagctataacttctcatcaactttcgtctacgatcaaacaacttcaagcactgaagcaaagaaaaactagaggagaaaacggaaaacgaatctag

SEQ ID NO: 147637 - DNA, 104 bp, Arabidopsis thaliana landsberg
caggagaagtgaagtcaagcaaggcatatgagaaatgggcaaataaaatttcagaaacgaaaccgcccaccagtccattgaggaagaggaagaagaagaagtaa

SEQ ID NO: 147638 - DNA, 1711 bp, Arabidopsis thaliana landsberg
atggagagaatatcctcgatgccacgcgcttcttggtcagcttctcctacattgcggctgagagaattagtgtttgattttgtggagattgtggatgagaaagaagaagctattaagagaatgttcagaagaagcgatgactctaataacaacccatctcatgtaggggaagtccaagctgatactgaggtaccacgaaattgatgagtagattccactctataggaagaaaattgttatgtataagaactagatatagctaacatgtaagtcaatattcgaattgtaacttagcaacataaaaagctggtaaagaaccagtgatcattagtcattaccatgcttaatttggcattgacattggggatttatgtgatagggtttggtactaatagaatatgcaacacttcaaaagccaaccaaatttggatatataaactcctcaaaaattttaaaaaggttggatctttgtatgtatatgtacgtctaattgtacccataattgtttggtaatcattattgccacgttctatgaagtatgaactcatgaacttttcttttatccaacttggtgcttttatcgtatgctaatttgtttttgtctggcccacccatttgctattttattggttttttttatatagttctgttaatttattgccatcatctctgagatagtttcagttctgtttcttgatcggtacagaatccaagataaattatatacaaacacatacatatatgtaaaaaatctaagtctttgattttaggttcgatacaatgtcaataaagttttgtcttttttgtctgaccaatttttttctagttgatgttgatgttaaaatcaatggtcgttaatgcctgttcgatcagatttttttctaactccgaatcatcaagtgggtatataacaagcccgtaaaaatcactccttttcgattaaaagatgggatttttcgtgatgattagagatgtttccatgggatttatgctcctatgtatttctgctttgtgggttttgccaatacaaggtgctggtagagaaagtttctcaagaaactcttcttcttcttctctgccaagctctgtaaacgttggagctctgtttacttatgattctttcattggaagagcggccaaacttgcgtttgtggcggccattgaagacattaatgctgaccagagtatcctcaggggcaccaagcttaatattgtcttccaggacactaattgcagtggatttgttggcaccatgggaggtacttttcgtaaactgcaatttgaattatgtctgaaaagttgcttgtgaaaatgccccaacgaagctggggtttaatagtaatgaggttattcaaattgcagagcttgtcttgttcataaacctcttgttaaaatcttcgttttgcgcatggattgctttttctgaatgaggaagtagattggtgatatgttttcttatggtgtagctttgcagctaatggagaacaaggtggttgcagccattggtccacaatcttcaggaattggtcacataatctcccatgtagctaatgagcttcatgtacctttcttgtcatttgcagcaacggacccgactctttcttcgcttcaatacccttatttcctttgtaccacacagaatgattactttcagatgaatgcaatcacggattttgtatcctattttcgatggagagaagttgtgcgatct

SEQ ID NO: 147639 - DNA, 2624 bp, Arabidopsis thaliana landsberg
tctacatgtcgcagtatatctctatgcttcaagaaacactcaaatctttgagagttgtgtgtggagtggatggtacaggtgatggagttggctcaaagaaagatgcaagtgcagagaaaagggagagctctcgcaagatggatttgacttcaaatgaggaatggtccattgttcaaggagcacttcaaattcttactgtagctgattgtctcacgagcaggtcttctgtctttgaagcctctttgagagcaactctagctagactaaactccagcttgtctatttcattatttggcacaaatttggatcacaacctatcacatttgaaaagtgaacaaactgctggagatttgtctatggctggacgagcttccatggatgtggcagctattcggttggttgatgttccggagaaggctcacaaactattaaacctgttggagcaggtagtgaaaacctgtaggcttgatttacaaagtttctgaattaactatttgatatttcatgcgtatcgattcccttttccctttgattttttgcagtccaaagatccacgattccacgcactgcctttggcgtctcagagagttgctgcatttgccgacacagtcaatgaacttgtctatgacgtccttatatcaaaagtcaggcaacgtctaggggaagtatctcgcctaccaatctggtcttccgtcgaggaacaaactgcttttcctctaccaaatttcagctcatacccgcagtcttatgttacaagtgttggagaatatctccttactttgccgcagcagcttgagcctctagctgaaggcatctcaaccaacggcgattcaaacaacgaggatgcacaattctttgcaaccgaatggatgttcaaggtaagtctaatttaagcttttgtcaaaccgaatcgcaataagctaagaccttaaccactaagtgttttttttttaataaaacaacaggtagcagaaggagcaaccgctctgtacatggaccaattgagaggaatccaatacatttcagaccgaggagcacaacaactctctgtagatattgagtacttgagcaatgtgctttcggctctgtccatgccaattccgccagttcttgcaacttttcagacgtgtttggctacaccgagaggtgagctcaaagatgtgatgaaatcagaagctggtaatgaactcgactgccctacagctaaatctgtttgtaagatgcgtcgtatcagtttcgattagtctcaaatctacttgggtttcgataagaacttgctaacaaatcggctcgtccattgtcatattgtattacagcattgtctaatgttttagttacgtagttttttcgtgttttttattgtttagaaaatagtttgttacttaaataaaatgtactcgtgacaagccgttttagttaagaccaaatcatagatgaaatggcttccactaacattgcgtgagaggaagaggcaaaactggttccttggtccgaatcttctaacaatgtgtagctgtcataacaaagtcaagaaagacaaaaaaaaaaagatcggatagatggaggaagaactcaagaacttgatcaaggtttcggtttctgtaataatctccatatcttactgttactacgtaccaaccagaatcaaacctggtatctttagatttctctctgttcttccaatttgtgctctgtttcgtgttcttcctctgtttttcgcctctgttcacctctctggttacacagcgcttttcatctcatggctcgccaatttcaaactcatacttttctccttcgatcaaggcccactttttccacttccctcaaatctcacccgattcatctgcttcgcttgcttccccatcaagcttcaacaaaaccctaagcgccgagactatttcttccaatgggaataccccattgaagttttgtttagtaaccaattcgtgactaaagttgtaatcttgagtgtagtgttacatatgtataatcacatacaacatatatatcccattgtgctatttgttctctatccactccatctatacttggtacttgagattctcttaaagctcttcaacgctttcttctctatagctcttgattgcgaactcgagccacagctgaatgaaccatacttggcctattctcttcgagacttctggggtcactggtggacactcatgctcccgacgatcctccttccagacgtctacgctaggatgccgcgaatcaccgaagggaaaatgaactccgagagtgctctgtacttgggagtttttgtcatattccttgtctccggtgcacttcacgagtttctcttcttctatataactcgtgagccgcctactggagaggttactctgttcttcgtgttacatggggtttgcattgtggcgtacgacgccaggttgaagaagaagattgcgcggtggatagggtttgaattttacccgtgtttgatgttacaagtgatggttatggggtttgtcgttgtgactgctggttggttgtttttccctcctcttgtcaggaccggcaagattcagagattcgctaacgaagccttgctcttcattggtttcgtgcgcaacttgtttaacgaatccttgttcttcatgcgt

SEQ ID NO: 147640 - DNA, 701 bp, Arabidopsis thaliana landsberg
gattttgacacaatttgccgattcctcgatcatttcatctgctgaataacaacagtgactggctcttctgattagcaagcttcttcttttcgaaatcgcatcactttggctgatcggtggattctacgaaccatgttcaatttctggtaacatcaacttcatgaatctgatttttgtgattatgcgattttgttaccctcttttacctcagctcgattatgctgttatctaattttgattatgatcgttttggagaatttcaatttctatgtgtttgggattaaagaactctgctttttgttagttacttactgttttatgcataccattgatggctcttatagttagttgctgctaacatagttaaggtgaacaaaaattttagttgtaatcattaaaagaacctgatctatgctcatgaagttgtgctgggtcttaagattttgcaatgttagtatattgggtattggaacagtttcaggtaagtatttttaagattgttgtgttaaaaatccaggggatcaaaagaacagcaacaaggacaatctcgtccttctccagaagcttctgcaacaccgtggtattcgccgtctcttgtcacctctcctagctcatcccggcctcaaacctcagggcagattccatcacatgtttcaccaggtgaagccgccggcattattgccattttaaaagacaaaagg

SEQ ID NO: 147641 - DNA, 575 bp, Arabidopsis thaliana landsberg
cagaaagtgaaaaagagagcgagcgatgaacagtatcttctccattgacgatttctccgatcctttctgggaaactcctccgattcctctcaatcctgactcttctaagcctgttacggcggatgaagttagccagagtcaaccggaatggactttcgagatgtttctcgaagagatttcttcgtcggcggtgagctctgagccacttggtaacaacaacaacgcgatcgtcggtgtttcttcggcgcaatctcttccttctgtttccggacagaatgatttcgaggatgatagtcgatttcgtgatcgcgattcgggaaatttggattgtgctgctcccatgacgacgaagacggtgattgttgattccgatgattatcgtcgtgttcttaagaacaagcttgagactgagtgcgctactgttgtttctcttcgggtgtgttgttaatcttctatttttcttatctatatgtgtaatttgtgcgttttgatctaaatctgaagctctgatgttctcttcttaggttgggtctgtgaagcctaaaaattcgactagttctccagaaactcaactt

SEQ ID NO: 147642 - DNA, 675 bp, Arabidopsis thaliana landsberg
ggcgtgagcaacattctacacaaggacttcatgattcaggttttgattaataaaactttatttagtataccaacaagtttcaccaatttcggatcataacaactcatgttttatctattggtgtagcctccttgggacactgaaacaaagaagacgttcataatacattacacttacggctgtgatttcgacatgaaggtatgtcaatcatgaaacaacaagcaatataagaaagttaataaaagatactattagataagcatggttttatattgtctatattggttatataattcacaggggaagatgatggtagggaagattggagaatggagattcgataaacggtcttacggggataaaccgcccccaagaaatctcacactgcctccccgaggtgttcccgagagcgtggtatatatatatagcttcaaacaaaacttctctcatttgtttccttttggttttcttgcacagtcctaatcactaagtgggtataacacaatgcaggtgacattggtgacaatgataaacgaagctactgctaatattcccaactgggaatcttgaaaagaaattctttttttcctaagcaagactctattcctttgatttatctgtccgaagactgtagttgtagaaaacatacgacgaaacgttacggctttgtgtttc

SEQ ID NO: 147643 - DNA, 1778 bp, Arabidopsis thaliana landsberg
ccatcactcgaagacgttttcgcacaatgcgtcaccgattttaaaccttcaaatccaaaatccccaatccaaaactacatatacactcaacgaagccctaatttcctcacaatccttaacaactacgtccgtaaccttttgttacttcaacaacatgacacgtaaacccgtagcgattgtagctgccgcggatgtcactcacatccaggctacaatcacttgcgccaagaaactcggtctccagctccggatccgcagtggaggacatgactacgacggtatgtcgtatttatcaaccattgatttcgttgtcctagacatgttcaatctccggtctatcaatatagatcctaaactcgacaccgcgtgggtccaatccggtgctacgcttggagagatctactacggagtcgccaacaaaagcaatgacctccgtggatttcctgccggaatctgtcctggtttaggcgctggtggacattttaagcggtggaggttacggaaacatgatgaggaaatacggtttatcgatcgataacattatagacgctaagatcgttgacgctaaaggaagagttttggaccggagctcaatgggagaagatcttttctgggccttacgtggtggtggagctgctagtttctgtgttgtcttagcttggaagattaagcttgttccggttccagctaaagtcacagtctttaacattgaaacgtttggaaacacaggaagcgtgaacaccacggaacttgtagccaaatggcaagagatcgcagacaagattgacaatgatctgttcataagattaactttaggctcaagcaacaaaaccgtgaaggcttctttcatgggaatgtacctcggaaactcatcgaatcttctagaaatcatgaacgcgaaattccctgagcttggtctgatcaaaagagagtgtattgaaatgaaatggatcgaatcggttctgttctggctcggtatcccacccggtacagcaccaacaacgaatatgctaaaccggatcccacaaaagcaaatctacctcaagagaaaatccgattacgtccaaaaaccgatttcacgaaccggtttagagtcaatattcaagatcatgacagagaacgagaacgtcacaatggcttttaacccttacggagggaggatgagtgagattccatcgaccgagaccgctttccctcacagagcaggaaacatgttcaagattcagtacgcagcaaactggttcgtgccaggtgaagcagtggctaaagattgcttgagccagacggaaagattgttcgaggcaatgagcccttacgtgtcaaagaatccaagagaggcgtttttgaactatagagacgttgacattggaaagagcttaaactcaacgtacgaggaaggtaaagtgtacggagttaagtattttaaggataacttcgagaaattggttaagatcaagagcagagttgatcccgacaactttttccgatacgagcagagcattccagtgctctccagccactagagagactagagacacacttctattaacaattgctaccaaaaatttatattcaaatgttaacatgcaagaaatagtactataactatttgatgtaaaatgcgaagagttaatttgagctctctgtttttatcgaattcagacttaaacctgtgtcttggattagaagatgaggaagtagtcatttgttttcctgtatatgaactttcaaaatttatattcacattatatgacaaaaaatttatacattttctttat

SEQ ID NO: 147644 - DNA, 1543 bp, Arabidopsis thaliana landsberg
ctccgacgccaaaattctgcttccggtaacagatattttcgtcgtcgagaagaagcaggagtttagaaaaatggcgacggaggcagctccgatggacgaaaaggcgaagagaatgagagatctattgtcgagcttctacgcaccggatccttcaatctcgacgagtggttcctccatcaacgcctctttcgataacatcaacagcacttcctttgatgctgatcagtacatggatctcatggttagtcttcgtttcttgtcagaatattcgtgaatcgtcaacacaagcgtcaatagcttgtatattgtatcaaattattgagtaattcgattcactgaagttagattcggctctttgatcttggtctaagtggttagttcgaaatttagaatatgtttagatccgactgttatcttctggagcaggaatatagttactagttttgaattctacccttcggatgaagtttacagtgcaaggttcttgtagaggtctcttgatcaatgtggtctggtttggttattttctatgcaaacttatgagaattctgcaaatttagttgttcttatcaaagatcttcctgcaatggttgatagttcggaactaaattgggtttatgaggtttgtgttaagtgtggtgacagtagtgctagcgatctgattgagatatatgccacagtctggtgattttattggcttgtgcagatcaaaaagtcgaatttggaggtgcttctgcaaagacatgttcaaatggctgctgagattaaaaatctcgacacagacttgcaaatgctagtctatgaaaattacaacaagtttatcagtgcaacagatacaatcaaaaggtacttgtaatggttcatggatcgtttcaggtgttaagtgtgtcatttaacacttttctctatatgatttgatttcaccactcggtagtatattaaattcaaaatgttgcttctttacctggtaggatgaagagtaatattttcgggatggaaggcaatatggaccagcttcttcagaaggtgttttgaacacatatgatacacgtagttttggatttttttatgggaacttctcactcatagtatatctcccaactgactcatgcagataatgtcagtacaatcaaagagtgatggggtcaacacttctctttcgaaaagagagaacatatagagaaactgcaccggactcgtaatcttcttcgtaaagttcaggtatgtaatgagtcatttttgctagcttatatatctgctgtgttgtcacctgatcattatagcaataatatgaatttactcaaattaatttttgtgagaaagagcagttcatctatgatttacctgcaagactgcaaaaatgtatcaagtcagaagcctatggcgatgctgtcaggttctatactggagcaatgccaattctcaaggtttacatctgtcctcggataacttttccatttttttgtagtattcttttcatgttactggggcatttaacattctgaagatatatatgtggagatatgtttaaaatatagtttct

SEQ ID NO: 147645 - DNA, 288 bp, Arabidopsis thaliana landsberg
gaacttcaatttaattccattaaatatatcatgaaacctcttgattaattacaaaatccattaacaaaaaaataattaatataattttgattgagattaatgaaaattgtttcagattctttgagagacagtagagagacaaatacttcattgacatgttgtggtttaatctcaatcctcgtcctcgtcatgagtaactttcgccgaacttaatgttctacacggttgtgacggcagttgctgcggtggtggcgcgtcgacaactaacgctgacgacatctccatttg

SEQ ID NO: 147646 - DNA, 285 bp, Arabidopsis thaliana landsberg
gagctgtactttagaagatttcccagataagagattcaaattctgtacttgtttacccggcggagcagaagatgaagcaaccggcgacaccaaacgcggcggaggaacccaaatcagaacaaaagcagaaatcgaagaaattcccaactccgtcggaactaatctctcactaccagaaacgagggctggaaccagcagaagcttcaattaaggtcatcgaagatttacaaaacgcgcacgtccgagtagattcgtcctccagaaacgcctcgagcaaggataagc

SEQ ID NO: 147647 - DNA, 459 bp, Arabidopsis thaliana landsberg
ctccttcttttgctcagagactcagagatctccccaaagacttcccctctaccaacgccaaacgtgacgcctctctggtaaaagaacgaacaaaaaagaaaccgttttttttattgagtatctacaaaattgcgatctgggttgtagcaaatttctcgtctttcttctgatgtcgattaacaaattcgtctgtgttaacgttgtagcttattgggaaaacgcctcttgtgttcctcaacaaagtcactgaaggttgtgaagcgtatgttgcagccaaacaagaacatttccaaccaacttgtagcattaaagacaggtgctttgtgaaatcttagtcttcaaatccttcaaaagcactagtagcaagtattgattttgttccatttcctgtctttagaccagctatagccatgattgcagatgcagagaagaaaaaactaatcatccctggaaaagtaa

SEQ ID NO: 147648 - DNA, 598 bp, Arabidopsis thaliana landsberg
atgttcacattcggagggaaggattctacttgtcctctgaaatctatcctcaagattcacagtcctcaattttactggaaggtacatataaataaatatgacaatgaatagtctttttattattccattatttttgaaatttgattcttgattcttgatttttgtctcttaggttatgacacaagcggatttaggacttgcagatgcttatatcaatggagatttttctttcgttgataaagaatcaggacttttaaatctgattatggtacataatatatacttgtagaagcatagatacaaaccccaagcatagatatcaatggagttttttccgtcttttcgagttatgtctaaagttcctctgcttaattaataaatcttctatgcagattctcattgctaacagagatacaaaatcaaatcttactaataaaaggtaaaagctttgaatttttctgcattaagtttttggattggcatgcaagctttgtctcctaagcttttcaattgtcgcaggggatggtggacaccgatgtttttaactgcgggtttagcatctgcaaagtattttctaaagcatgtctctaggcggaac

SEQ ID NO: 147649 - DNA, 745 bp, Arabidopsis thaliana landsberg
gaaatgccttgcagctgttgcagaatgcatcagttcaaagaatttgggagtctcgtccagctgtcttcgaacaactggtgcactgatcaatgttcttggaccaaaggcgctcattgaacttccatgcataatgaagaatttggtaaaacagtcgcttgaagtatcatttgcatcccagagtggtcgaaacgcaacagctgaagaacagttgcttatgctgtctgttctagtcactttggaagcagtgattgataaacttggaggtttcctaaatcctcatcttggagatattatgaaaatcatggtgctacatcctgaatatgtatctgacttcgacaagaatctcaagtccaaagccaatgccattaggaggctccttactgataaaatacctgtaagttcttcacatacatatatgaatctagtacttctttgcttgtaggtagtgctcttaatagtaacctttcttccaggttcgtctcactctgcaaccacttctacgaatatacaatgaggctgttagttctgggaatgcaagcttggtgattgcttttaatatgttagaagatctggttgtgaaaatggatagatcatctatcgttagcagccatgggaagatttttgatcagtgcttagttgcccttgatattcgacgtctaaatccagcagcaattcagaacattgatgatgctgagagaagtgtaactagcgcaatggttgctctcacaaagaagctgaccttagg

SEQ ID NO: 147650 - DNA, 670 bp, Arabidopsis thaliana landsberg
agattgattcttttactctgtctcgtctcttcttccttctcctccaccacttcttcctccaactccactgccgccgatcaaactctccggccgcaagaagagctccagaagctaacactgattagacaagaactcgacaaaatcaacaagccggctgtgaaaactattcaggcaatttctctattctcaaatatctcaatttgataaatgtatatatatacagacatctttgtttactttgttactctgtttcgactctgtttttgctctgtttttactctgttttgttaattaactgacatgcaagttttgttactctgttcttactctgttttttgctctgtttcttttccatgtgttatgtttgcagagctcagatggagataaaatagattgtgtttcaactcatcagcaaccagctttcgatcatcctctcttacaaggacaaaaaccattggtaaatattattttccctcctcttctccattttatctcttttcattagtattcttatcaaagatttcaaatgttcttatttaggatccgcctgagataccaaaaggatacagcgaagatgatggatcatatgaaaactcccagctttggagtttatccggtgagtcttgtccggaaggtacgattccgataagaagaacaacggaacaagaca

SEQ ID NO: 147651 - DNA, 410 bp, Arabidopsis thaliana landsberg
atgtcggagtgtgttgtcgtgaatgctgtgagagatgggatgaatttggtgccttataagtacacagtgactcggcaagggagccctgctttggatgcagctttaggttttggggaggatgatgttaggaagagtgtgattattgtttctgagttcatcggttgttctccatctctgagtggtgcgatccgtgttaatccgtggaacatcgatgcagtcactaacgccatgagctctgcaatgacgatgtccgacaaagagaaaaatctgcgccaccagaagcatcataagtacataagctctcacaatgttgcctattgggcgcggagttatgaccaagatcttcaaagggcgtgcaaagatcattacaacaagagattctggggagtcggattcggtctttttttcaa

SEQ ID NO: 147652 - DNA, 977 bp, Arabidopsis thaliana landsberg
tctttctctcatctactcgatttctgaatcgcgaacgcagcgagcgatccggaatcgagagagagagctaccaatttttccaacttgttcggttccttataaagctgtttactttcccttgcgaattctctctctctactataaagcaatacccttttctttcttttttggtaacccccaaaccctactttgtccagcgagaaaggaagaggggtttcgtctgattccgctaaatctctagtctttatctaaagatcatggattccgatgatgatatgcacgatatggactcggtagattatgattattacagcggcggcacctatgatgacaacgatagtgatgaaactgatttcgggtttggtgaggctgacaccgacgatgccgccatcatcgcctcctatcgctctaaggtggcttcgattttagtgtcttgttttgggctgcttttgcagagatggcgaatgttggaagctgttttttgtttgtttgtttggtttggttaatatggcctctttgttcattactctatctggttgttaaagtttgcaactttttgccgttttgagcttactttcttagtctttggtaggttagtttttccattctgttccggctttaatggggtatgctgctgagctttaagaagtttttttttttttggtttaagacttttgctttattcatgcaatgtctagcctcaatagttctctccctgtttattggttttagttcatatctgctcttattttactttgaccatattgactcagtgttgttgtaatgatgtatgcttctagagtaattatgttgttctcaaggaagaagatattcgcaggcatcagaacgatgatgttgggcgagtttccgcggtcctctccataaccgatgtcgaagcaagtactttgcttcttcactatcactggtaaaatcccttttacatttactgtgtgattttgttataaatctttcggttt

SEQ ID NO: 147653 - DNA, 783 bp, Arabidopsis thaliana landsberg
  unsure (1)..(783): unsure at all n locations
gatattttagctgtatggttttggttccgatcacaaagagcatcgaatcgagctacttcctccgccggctttgctgtgtgtgtgatcgttcgtttactaaatctgaaacaagtatctaacgccttgccggagatgtcgagctcaggccaaactcagttccgttatacacagacgccgtcgaaggtggttcatctgcggaatcttccatgggaatgcgtcgaagaggagctcatcgacctttgcaaacgattcggcaagatcgtcaataccaagagcaatgtcggcgccaatcgcaatcaagctttcgtcgaatttgtgagcttaattgaaattgtttttgttcttacagtcccccaatttctagctcccgggatttggtttaggaaaggataaagagaaattggaattgcagcgccaaacatcaaaccctagaatcgagcttttctcgaattgtagtatcgaataggtttctcaagttttatagctnnnnnnnnnnnnnnnnnnnnctttcgttttggcgatttctattgatgaaccattcatttgattttacaggctgacttgaatcaagctatatcaatggtttcgtattatgcttcatcttcagagcccgcacagattcgtgggaaaactgtctatattcagtactctaatcgccatgagattgttaacaatcagagtcctggagatgtccctggaaatgtcctcttggttacctttgaaggagtggaatctcacgaagtcagcatcgatgttatccatctggtgagtgcatttacttga

SEQ ID NO: 147654 - DNA, 843 bp, Arabidopsis thaliana landsberg
atgtattcttcaagaggcactggctacggtcaacagcaatacggttcgcaatctggttattctcagaatgtaagatcatcaatttcaattgaaaccaaattatgcttaattatgcttaatttatgtgtaattgttatgtagcttggatctggctatcctggaagttcagtgagtggtggcgcagaaggaggctctcagatttctttgagttctcgccatccatcaattacaggtgctcctcaagagactgacattggtggtggatacagatctcatttatctacagctgctagtcattacggaacacaatatggctctgtgtatggatcaacttctcttagcagctctcagcctttaagcaccaatggtttaggttcatcagttttggataaccgctcgggatatgtccctactttacctgattcaccaaagtttgcatctggaagctatttgtctccctcgagccatggttatggtcaaaagacggacgatttgtattccgataagctgtctggttacattcccgttgatagaaggcagtatggtgaacaatcaagctcttatctcggtagggagttgcaaaatgaaccaactaggcgatatgctgatccatctaattttgctcgccaggtgcgcctactctcatatttttaagagaaaatcttatgaatttggttggtttctgttcaatgttgttacaattggcttgatgatactcgttattatatgattttggcagactgacttgtatgatcgcattgatcaagcatcgcttctccgaggagaacaattattaaaaatgcagtcgctccatacctcttctgttgatgcaggtgtcaacag

SEQ ID NO: 147655 - DNA, 1410 bp, Arabidopsis thaliana landsberg
tcgaaaaatccagttttcattaaccatgcttctccttggtgttggaattgcaaccgtcacagatcttcaacttaatatgctgggttctgtcttgtcgctgctggctgttgtcacaacttgtgttgctcaaattgtatcctatgcctagcctttggtttctcattgctttattctttcacctttctatatatcttgtcttaaaccaattcgatgctgttatcttaaccaattgtacacagatgacaaataccatccagaagaagttcaaagtttcatccacgcagcttctgtatcagtcttgcccatatcaagcaatcactcttttcgtcactgggccatttttagatgggctcctaaccaatcagaacgtgtttgctttcaagtacacttctcaagtagtggtgagactcaatttcccggggattctaccaaacttattaactgatcttcttgcttccatgtcgatcctgcatattaacgagtgcttctttgttgattgcagttcttcatcgtcctgtcttgcctcatatcagtctctgtaaacttcagcacatttcttgtcattggaaaaacatctcctgtcacatatcaggttctaggacatctcaaaacatgcctggttctagcatttggctatgtgttgctgcgagacccattcgactggcgcaacattctcggtattctagtggctgtgattggaatggttgtttattcctattactgctcgattgagactcagcagaaggcaagtgaaacctcaactcagttgcctcaggtatatttcttcatctctctgttccctctaatatatttctgttggtaattagatgagtccctcaaatcatattcctttttatagtaccattgattttgcaattagattgctataaaaaagcatcagtatcataggcttttttcaggtctatctatatatactgacttgttatattgcttaatttggtttactcgggtttgtcagatgaaagagagcgagaaggatccgctaatagcagctgaaaatggaagcggagtgttatcagatggcggcgggggagtgcagcaaaagacggtggctcctgtatggaactcaaataaagattttcaagcctaaaagctttgatcatcgctatttttttatataatatcaaactctctttgtattgtccccaaaaaaacacaaactttttaatttctctttttttttttttttgttccctttttaaatatgcatagcagagaagtaggggagactgaaaaatcaacaaaccttccacaccatatggaaaaaagaagaaagtagcgagtgaggggagaaaagggaacagctttgatgacccattttattatacacagcagctctcttttttttttttttttttttttggatttagtattacaactctgtattca

SEQ ID NO: 147656 - DNA, 1709 bp, Arabidopsis thaliana landsberg
ttctttacttgattgcttattcatctgttgattctgtggttaggtttgattcttctggctctgttttgttctgtttttggtgtttaattcttcttagcaagcaagtaatattcgatcgtcactgtttttgctttgattttgtgatttatctatcaaagatttgaactttacgtgaccctttaagcgatcaacaattatctcattgttttttcagagaagggtatatgagtttgttggagatgggtggagatatgatggaagatgattgggaatttgcgtcatcatcaaaccctaaaagaaccctagttcttgtgggccgtactggaaacggaaagagtgcgacaggtaacagtatccttgggaggaaagctttttgtcaagagctagaactgtaggagggacaggcacgtgcgagtcacagagagttgttcaagaagatggtgatatcattaatgttgttgatactcctggtaagctccccaattgtgtaaattgtttcacttttagtctattttactatttgagtgttatgttaatggtgagttttgtgtataggtttgtttgatttgtctactgcagctgattttattggtaaagagattgtgaggtgtataagtttggcagaagatgggattcatgcgatcttgttggtattctctgtgaggcggcttgctgaagaggagcaaactgtgcttagtttcttgcaagcgctattcggcagtaagatcgctgactatatgatcgttgtttttaccggtggcgatgagttggaagagaatgaggagacattggaggagtatttggctgactattgccctgagtttcttaaagtaagctgactttggctattcttttcttgagtctttcattaaagaagtataatttgaattgtgtgtggcttgtaggaaattcttgggatatgtgacaatcggttggtgttgtttaataacaagactactgataatgtcaaaaaggctgagcaagttcagaagcttctctcgcttgttgaatctgttgtcaaacagaacaatggaaaaccgtattcagatgagttgttccatgagctacaggtggagattgttgctttcactcacttttatgagttaattctgttttagaagcagagaggattctaactgtggttgcaatttcaggaagaggctatcaagctaagggaccagaaaaaggaggttgagttacttcagggttactctaataatgagatagatgagttcaagaagcaaatagatatgtcctatgacaggcagcttagccgcatcaccgagatggtaattttatttatcaatagttatggtctcacaggagagtttcattgaccggcagctttctgttttgttgttgttcaggtggagactaagctgagagacactgctaagagactagagcagcaactaggtgaagagcaagctgcaagacttgaaaaggaaaaaagggcaaacgaagttcagaagcggtcgagcgatgagattaaaaagctcaaagagaatttggagagggcggaaaaagagccgtaaggacctccgagaaacaaactgggaaagtgcatcaatctatgatatgttgagatgttgtagctccagtgaaatctgataagattattcatgtcaagttttttatgtagtttattttttcttttggttttttaacaatatggttttgttaaagacagtgtgttataaggtttgctt

SEQ ID NO: 147657 - DNA, 422 bp, Arabidopsis thaliana landsberg
ttactgttgtgtctcaagagacaatcagattctttactctttcttcggtggagaccaaaccaacgagagtcttgctgctctgtgtttagaaaagtctcctccttttcatacttggtactttgaaactattggtaaaagaagatttgggtttttaattggagatgggtttgtttatttcgccattgttgatgaggttttgaagagatctagtgttcttaagtttcttgaacatttgagagatgaatttaagaaagctgctagggagaattctagaggaagttttactgctatgattggttctattaatgttgaagatcagcttgttcctgttgttactagacttatagcttctcttgaacgtgttgctgagagtagtagtaacaatgaattgaagagtagtaatcttggtgaacatagcgaag

SEQ ID NO: 147658 - DNA, 1200 bp, Arabidopsis thaliana landsberg
gcctgtcatctcttgtgtctcttatcaaaagagctactgggagattttgaggcatgcgctgagacgtttattccagtaagcttaacctcctgtcgtttactactatggcattcaacacatacacattcttgttaatattggtatatggtaatcaggtgcttttcaagctggttgtgattactgtgcttgtaattgcagaatctgctgataactgcataaaaacggtaaattattagctcgcttattttggtttctagaaccatgcctgctcggctaagttttgtgcttacacagatggtttcttgctattccagatgctgcgtaactgcaaagctgcccgtgtacttcctcgcatagctgaatcagcaaaacatgaccgtaatgcaattctgcgagcaaggtaagctggagcatttgtatcccattttcttgtatacagatttatgatgttctggaattgatcccatttttttgtatacagatgttgtgaatatgcattgttaacacttgaacattggcctgatgctccagaaattcaacgatcagttgatttatatgaagatctgattagatgctgtgttgcagatgctatgagtgaggtaggtttctggtaccattttccataatacgagatgttgaagtagggtttatggttgcttgtttatatatgtggtaatgcagttattcggattcgatgcaacttttaatgaatgtatgttttgcatcaattgtaacaaatgatttgtatttactgtattgcccagctatctctctcccatgtgccattgaaaggttttaatatattgaataacaggtgcgggcaactgctagaatgaactacagaatgtttgcaaaaacttggccggatcgttctcgccggttgttttcgtcctttgaccctgtcattcaaagggtaaggcttttcaactctctatattctgcttattatcatcaatgaggcttgataaagcattccatatgttctcagctaataaatgaagatggtggaattcataggagacacgcctcaccatctgtccgtgagagacattcccagccttcattttctcagacgtctgctccttctaacctacctggctatggaacatcagctatagtcgctatggatagaagttcaaatttatcatctggaggatctctttcttctgggttactcctttcgcaatcaaaggatgtcaa

SEQ ID NO: 147659 - DNA, 2988 bp, Arabidopsis thaliana landsberg
  unsure (1)..(2988): unsure at all n locations
tttcaactgaaattgtcggtcatactcatcggtgcatcggaaagcttcgaaaacgtaccaactatacgtgatttacgtgcatatgttgctaaaccacaactaaataggaagaaaacattgttttggtttgttggtgtgttgtacagtgctgcattagtacatcgtggcactcaaaatttggtaaaacaaagtgcattaactttcttcaatatacttagagatttatatcaaataaattattgtcattgcaaagtattgtcttatacgtatttatcggaaaaaaagaaacggaagtaacataaatgtagattaatcaaaggattacataagcaattattccgagaaacacaattgttttataccgaccaaccttttgttttgccacgacaaaagctagatttggcgaattctgtttatttataataaaattgtaaaatgctttcttaaattcgatatgtgtatcaccgaattattaacaattcaacatcattgcaaaaaaaaagaaccccaaaaaagcagatggtgatgaaaagaatggaaattgacgccaaagctgtgatatgaatagcgaatccacaagacgctcgagttctgtctctcttttttcattttttgaaaagcgatttttatttttatgaatcgtagaatgtagtgaanaagtaccaaaattactcatataaatcttttaaaaaggagatgaaaatatcaaatggtattggagtggtcaaagaatgacgaanagagtaggaggaaggccaaagtttgtaataattggatacagaacagaggggacacgcgtcacctttttggaccatctccaattattccactttccttgcactattttgtagtaataattaagctctatatatataaactccacaattaattaaaaaattagcctaggatcgaggctaagcctcatcgacaacaatgaggaaatgtaaacaataagacccataatcaagattactggtttaatttgacatggtattggtaatcttatgaagtagaaaaaatttctgcaaataatgctacatttacataagataataacatttggattctatttcggaagtgcttcccaacttgcatgacatttataaatatatttacttacaaaaaacaaatgttcaaaagattcaccgtatgtgttataatacgtagaccgttcgtccttccacgtcgcaagaaagaaacacaaaacagaaatacacaatgaaataaaaaaatcaaaaataaaatgaaagtgacgtgagatcagtcgccgcccagttcatcccatcaaaagcttccacttgcccttttgctgtcttcctctctctctctgctctactattttcattatacattttacacacttttttgagaaataatttagtttcatcattacattctttggtaaatatgtgacttttttttgtagcagctggtgacaacactgatataaattgattttcttatgttttattatcagcttaaaggaataaaaacttcagattaagtggaagagatgtggtaattgaagaacaaaagatgtgcgaatgttaattttaagtattttttgtgttaaatactaaaactagttaatatagatctatcattagctaaatatatacatccgacattctaattgttttatactagtattgattatacgtagtctctgcatgtgattttctaaccaaaattatcaaaataattttatttagcttggaatatagactacagagtctcgacgctcgtgttctctctctcatatacatttcctcactcgtctctctcatcttgacctctatatctgtgtcggggcctctctctttctctctctatctatctctcaaaccctagaggaaggagttaaaagacgagagaccttccactatttccaaagtcgtgaaatcaccagagatctttctctctctctcatccaaagacttcacgagtccccaaagaaaaaaaaaaacctattcccaaagatgaagaacaataacaacaaatcttcttcttcttctagctatgattcttctttgtctccttcttcttcatcctcctcccaccagaactggctctctttctctctctccaacaataacaacaacttcaattcttcctcaaaccctaatctcacttcctccacatcagatcatcatcatcctcacccttctcacctctctctctttcaagctttctccacttctccaggttttctttctctccccctctctctcaacttattagtgtttttgtcttttgaaattttgtatgaattaggacagaccaactttgtgttctgttgcacctagaccagttccttaccttttttggtttaattaaagttttgcttactttagatttagtaagtagtcaatttttaattaattgcttctgtttctcttatatcatttttttcgattcggtgtacttggaatcagtcaaatctagtgaatcctgtatctataagatctagttataaaattaaatagtatctattaatttcccctatagaatctttcactagatattgtctccttcaaagtaaaacactaattacctcaataccctttgtaaacgataacaattttcagtcgaacggcaagatgggtcaccgggagtttcacccagcgatgccacggcggttctttccgtataccccggcggtcctaaacttgagaacttcctcggcggaggagcctcaacgacgacaacaagaccaatgcaacaagtgcaatctcttggcggcgttgtcttctcttccgacctacagccaccgcttcatcctccgtccgccgccgagatctacgactctgagctcaagtcaatagccgctagcttcctaggaaactactccggtggacactcgtcggaggtctctagcgtacataaacaacaaccgaatcctctagctgtctcagaggcttcgcctactccgaagaagaacgtagagagttttggacaacgtacctcgatttatagaggagtcacaag

SEQ ID NO: 147660 - DNA, 1713 bp, Arabidopsis thaliana landsberg
atgcaggcaaatgcaggtatgtttttgttacttctattgcgaataagtgatttgatgatacaagagataaagagagccgattgtgatattctaggtctgtgctgagatgatacacattaaaatggagtcggtagagaaagggatcatccaattgatctcagagcgcaatgtcaagaagctcgtcatgggagctgcgtcagacacacgctattcaatgtacaaagcacaccggcataactaaatagttttggattttcatcttctcatagttcttgttatttcaccgatggactcatcattaatcttaatttgtaggaggatggcagatctgttgtccacgaaagccatttacattcgtcaagaagcgcctgctacttgttgtatatggtttacttgcaaaggatacctggtatataaaaggtctacccctagtccctgtaatctctgtacaactgtaaatactacttcagaagtttttttttaaatgatatttgtgttttgtcacactcttgtgagttttaacaggaactgagattgtgagaacaatcacatgtcacaagctctaatatatctggtgatggtataatgcagggaagctatcatgggcaacacctctctagagtatgcatctacaagttctggtcaagattcagtccgttcacgaggatctgttataccttcgcgccaattcgcgatatctagaggaaatggaaatgtgtatcagttagctgtctttgaagctgagaaatcgaaaaaagaagcaagcttggaggctttcaagcatcaagaagttgtaaaagagaaaaatgaagcaatcaaaagggtaacatcttcttggaatctcacataagctattgccattgcccattgggaatgttgtccttttttcctgatgataacgaagttttctgaccaaatgtagggtaaagaatgggaaagtgcctatttggaggagttgaaacaaaggaaagaaacagagatggagctgaagaaagtgagagaaaaactcgaaaagatgaggtatatatctgagaaccgaataaccgagtcttatatgttggtacaaaagttgcaagacaagtataacttggcaacgaaagtgttgagaaaagccaaggaagaacgagatttattgattaaaggacgcgacatagcaattatagaagtagaggagctaagaaaagaggtctctcgatctgatgagcaccgtgaagctcctcagtacttcatctgtcccatttcactggtaaataaaaaagtcaatatggagagaaacagaagattttatcgaatcagttcacaaattaaaacctttgttttcaatgtttcaggaagtgatgaaggatccacaactagcagcagatggatttacatatgaagcagaagccataagtacatggcttcagggaggacatgagacttccccaatgacaaacacgaagcttcatcatacaaagttagttccaaatcttgctcttcgatctgcaatccaggaatggcttcacgcttcatcctcttttagaaagtgaacagaaataaaatcacactaaatatatattcttaagcatttgcttcaacgaacacgtctacttgtactttatattaaacccatgtaatgaaaaaccttttcttcatttttctctccattttctatttattttcttagtaatacaatctgaccatatgtattacgttgaaaacagccaattaacg

SEQ ID NO: 147661 - DNA, 817 bp, Arabidopsis thaliana landsberg
atacatggtccaacaggcgaacaaattcatgacttcagggagcagataagcgcaaagcatgattttgttgtccaaaagaaaggggtttacagattctgtttcacaaacaagtctccttatcacgaaaccattgacttcgatgtccagcttggtcactttgcatactacgatcaacacgcaaaggacggtaaggattatctgtttagttttgtatcagtttcgtttgctgatgaggtatttagctgaagatggtttttgtgcagagcatttcactcccttgatggagcaaatatcaaagttagaggaggctctttacaacatccaatttgaacaacattggttagaagctcagaccgatcgtcaagccatcggtaacattttttcctctaaaaaccacatttgttgttctcacttcaatattgagtgatggtttgaatatggttgttccttgtgcagtgaacgagaacatgagcaaaagagcagtacacaaagctttgttcgagtcgtttgcactgattggggcaagttttctccaagtttatcttctgcgtcgcttgtttgaacgcaaactcggcatgtctcgtgtctaaaagtatcgagtttattacgactttgaacttattttgccttaaaatgtaccagggaatctttacttaaaacctttttacagacagatcgtagttcattggaagatttgctttctcccatgttcaagaactaatcctctcgtgatgataattcttttttttctctatattaacagacaacttttccacaggctaggttttcatttcaatagagaaaatagcgattcctt

SEQ ID NO: 147662 - DNA, 1175 bp, Arabidopsis thaliana landsberg
atgagcgaggccccagctggagcttcgattgatcaggaaattcctaacgtgctgtattctccctctggatctgccacgaccggctttagtggtggaagctccctcggtctaccatacaaaggagcatggtgcactcctcctagagtgtttgttgattatcaggtattatttgctttccactgggtctctgtttagttattgatatgtccgcttgatacttgttatctatgttacaggacgaagtgattcctcatttggatcctcggatggttccatcaaccgtagatccagatgcagctgaaacagcagagaggggcaacaagattccaaagagacctgtcaaaattagtgcttggaagcttgcaaaactgaattcaaatgaagctacaagagcagcagccagagccagagcatcctcatctgtcctaagaccaatagaaaatcgtcatttacatgatgatgaacttagttccagaagtggcaccatcagtgttgtaagcagtgtaagcacagaagcaaatggagctacgctgagtagagagataagaaacaatgatccaatgttgtctcattgtagaaactcttatgctccaagccaaggtagtcgggacgagtacgacacagggacccatagtatgagcagtctcagcagtccaagtcatgttcatgagaccgtcacacttagtcctctccctcagcatcatacagctggccaccgcttcactgcagcggccgcgtcgaattcttcccggccacctcttaatcaagcaactaatcacatgatccactcaacctttgatgaaaagataatgcagaaaggaaaccatgtagatccactgcttctccctgctcctgctgcttctcttctgagagatgtgagaagaacatcagttgtttgggaccaagaagcaggtagatatatatcagttcctgcaacaacatttgagccaagaaccagattctcctcacagagccagccaattcctagctcacacatgggtaacactcagaatccaagacccgttggtcatccgcctcaagattcttcatctggaagggctccacctcctacgcagcagcagcaaggagagagactgatgtatacaggtgaatcaatattctttggaggccccctagtaaatatcccaaatagagatggcctaagacacgatgga

SEQ ID NO: 147663 - DNA, 1423 bp, Arabidopsis thaliana landsberg
atgcaggatttcttggagctggatgatgatcttggtgcagcatctactccatgtgaagtagcagaaaaacagaatgccttcgaagtagagaaaagtcatatcagcatgcctataggggagaaaccacttactccatctgaagccatgccatctacatcatatatttctaatggtgacgcctctcagggtacttctaatgggtctctggaaactgaaagaaacaagtttgttgctttccccattgaagctgttcagcaaagtaatatggcctctgagccaacttcaaagttcatccaagggactgagaaatcgagtatttcttctggcaagccaacctcagaagagaaacgtatccctctggaagagcctaaaaaacctgctgctgtatttcccaatatctccttttcaccgcctgccacgggcttattaaatcaaaacagtggtgcatctgcagacatcaagttagaaaagactaacaggtcggtggcatgatatttttcctctcagcttgataggcttttatatcactacttgtgcctaagtgagcctcatccatattggttatgattttttttttctggtttactcgcttccgactctctttcttgatgttacagcactgcgtttggagtatcagaggcttgggcaaagccaactgaatcaaagaaaacgttcagcaacagtgcttctggagctgagtcatctacctcagctgcaccaaccctcaatggtagtatattctcagctggagcaaacgctgtcactccacctccgagtaatggctctcttacttcaagcccttccttcccaccttctatttcaaatataccttctgataattctgtgggtgatatgccgtccactgttcaatcttttgctgctactcacaattcctctagtatatttggaaagttgcctaccagtaacgacagcaactcacaatcaacttcagcatctcccctctcttccacatcacctttcaagtttgggcaacctgcagctccgttttctgcgccagcagtgtctgaatctagcggtcagatctcaaaggagactgaagtaaaaaacgccacatttggaaatacaagcactttcaagtttggaggtatggcttcagcagaccagagcactggcatcgtttttggtgctaaatctgcggaaaataaaagcagacctggttttgtgtttgggagctcctccgttgttggtggcagcacattaaacccttctactgctgcagcttcagcacctgagagctctggaagtttaatatttggtgtgacatcgtcctcaacccctgggacagagaccagcaaaatttctgcgagttctgcagctactaatactggaaatagtgtatttggcacttcctcttttgcatttacaagctctggtagtagcatggttggtggtgtatctgcaa

SEQ ID NO: 147664 - DNA, 618 bp, Arabidopsis thaliana landsberg
cggatcatacatcagttgtgatgtctcttatttgctgggatcagtttcttttgtcttgttcattggacaacacggttaaggttagttcgtctttctttaactttcataaatttcttaagtttcattcttcctcttgttaacgtgttttttccgctgtagatatgggctgcaattgaaggtggcaatttggaagtaacatatactcacaaagaagaacatgtatggtttcttttataaatgtgttaccttctcttatggtcctaatctatatgttatgtgactaataaattttggcaatgtttaaactggattcagggagtgctagctctatgtggtgtacatgatgcagaagccaagcctgttttgttatgcgcttgcaatgacaacaccttgcgcctctacgacttaccatcgtaagactttcaacgtttatgtatgaattcttcatctctttctctcttattggttctgatagcttaggtttgttcattagatttacggagaggggaaaaatctttgcaaagcaagagatacgggcgatccagataggtcccgggggcatatttttcacgggtgatggaactggtcaagttaaagtatggaaatggtgcactgaac

SEQ ID NO: 147665 - DNA, 694 bp, Arabidopsis thaliana landsberg
acccttgctttacattcgtgtgattgatggacccactcgaccaaaccgttaacattagtcttttcctgagttatgttttaagaaaatccaacattacctagaattgaaataaaaatgttcctcgcttgacacaagaatggtgatgcaggtgatagcaaccatgcgggcagaggtgtcagatgtatcaaagagcgcgatcagcaattcatttttactagacgacgattcgaggtaaacccttgaaagaaacattaacaaaacaaatcactttttagaagattgatattttgataaaaaaaaattatgtgtcttggtttgattgctttttgcagcatcccattctcgcttgacgatatctccaaatcgatgcaaaacgtagaggttgcagaggttgatcctcctccgttgatccgccaaaactccaacttcatgttcttgttggaaaggtcagattgaagtagtcaaagttccctatacccgatcgatcgctaggaccttttcagattaggagatcagtattgtgctttcaaaaacaaagcctgtacattagtacatatgcctatctttgccagtggctttctggtactgttctactattaataggggtatattgggtaggaaaaaatatatatatgtgaactaaatatttgttgtgtccatgcgttgataggccatttgcttaatgaattttact

SEQ ID NO: 147666 - DNA, 1217 bp, Arabidopsis thaliana landsberg
gtactgtttggtctcccagatcgaatgttgctgaatcgacacacagctatgttgtggcaatagagctaccaggagccagtatcaatgatataagagtggaggttgacaacacaaagtaatcctgctgatacacatcttttttcaatctgttcccattactcacacagtaaaaatgcattgtgtaacaaaggtacttaccgttctgctgcagcttgactgtgacaggtagacgcacatctatctgtcaaaaagttgatgcaggcaccaaagcttcgatccttggatatcataagcaagaaatactacaaggaccattcaaagtttcctggccactccccagcaatgtgaacaaggataatgtttccgctgaatttatgtaagtagaagctatacttactaacaatctaaccgtatgatcaaacaactattctccttaaatctttcaatcctagagttcataatgatagattctgcctgtaggttttagctagtagtgcacacctaaaaagtagtcgttttagaatccaattttacatcttagtgccagtcagtcattagcttgaattagtttagatagaatttagcaagttttataaagagcactaacatccaatttattattgcgtttgaaacagggatgggattctgagaatagtaattccaaagctttgagggttcatcgttctgaaaccatatatagatacggtaaacattgtgtgtgatatagcagtttgtgtggaaaagaaaaatatcaaatcatgaagaaagtttggtcttttatgtaaaatagtttggtcttttatatatcacagattgcagacaggcattactcaaagtgaagccatgtaaacaatccatacatatataaaaataaagtcttcattactactaccaaaagccagaaaagaaaaagaaaaaaaaaaaaaagaaaaaagctcagaagcatctaatcatcctaaagctggggaaatctcaatctactcaactacgtagcaagcattattgttgtaataattaggaactggtccaagataatcaacagtagcagatggcgtctgagacgggtatgcaaaagtgcttgcaggtagatgagtaagctgcacatacgtaccggtagcattacagaacgcccatggggcacctgaaggatcgtaggagacaagctgaggctgctcatagttctggacatatccattgtggaacacaggatatgaagc

SEQ ID NO: 147667 - DNA, 404 bp, Arabidopsis thaliana landsberg
ttcatgaagttttagcaataaagcattctcattggatttagacaccagatagtttaacagaaagaccaaactactacatatatttttgactctcttgaggatctcaaactcactcatgcatagtccggaagggcttgtaggttttgacactacttataagtcctgcgatggatccggctgcagctaagagcgagacgatcaagcaaacatagcacatcgttttcagcgcaatccatctagcagagtacttcttaatcttggtttgtgcaatgtgcatctccacagggaaataaaccgttaaaggccagaaggaagctgctccgataagacctaagatcgcgttgaagaaagggaatatcatagctacaacagtggttataaccacataagctgtccctcacacc

SEQ ID NO: 147668 - DNA, 595 bp, Arabidopsis thaliana landsberg
ggactgtcccctataactcgaggacacttaacaaactctcccctaatcatgtcttaccattgaacacttcacagcattaatttaaacagataaacaaattatttctccactccataaccatagatgtcatatacagacttttctgatagtttatgagtttcaaaagtgaacttcttctatcattactaacgcttctgtaatcataacccgaacataattcactttcaccactgacgttaactttccaaaatgtaaatcaagaggctcttgccgaagaagacttgccccggaaaccaacaacacttagtttctttcctggtcttctatctgaacccgtcttccccctcgcagcaatcgatctggatccaaccgtttttaatatttttctttttggctttgaagatttctctggaggagatgatgcttttcttggtttcgaaaacgaacttgaacttgactttctcacgggtgtcttcccacctgtcgatcttgcaggaggagatgatgatgatggtttgtctctggagtttcggtgcttgctcacttttctgatctgcttaacgcttcttcctttttcttgagtgatatgggttct

SEQ ID NO: 147669 - DNA, 951 bp, Arabidopsis thaliana landsberg
cttgtctccatgtaaaaaacctccgtcgtcttcttcctcctccttcataaccctaaaccaaaaaccctcatttccttcaatcttcttactcacatggcgctaaggagattatcaaagtctgtttcgtcagccatcaaagctcaatacactctctcgagaccctctcctctcctccgttctcgcgctctctcttcctctcctcaccacacctctattggccggccaacaaattcattcatcggaaaaatcaataactcttctatcactcatgcgactactactcatggtcaactcttccctctttcttctccgcgacgcttttgtactaccacagctcaggttcgtgctcgatttcagtgttagttgctcaattgtgaacttggaattgttaattttatggtttagtgataataggttaatcaaaatgagtttacggagatggcatgggaagggcttatcaacgcctttgacgcggctcgtgaatcgaaacaacagattgtggaatctgaacatttgatgaaagctcttcttgagcaaaaagatggtatggctagaaagattttcactaaagctggaattgacaattcctctgttcttcaagctacagacttgttcatatctaaacaaccaacggtacggtgttgcgcttaatctctctttttctgtgtatcagaacataattttgcaggtcaatttaagttgttgtgatgttgcaggttagtgatgcaagtggtcagagactagggtcatctcttagtgttatattagaaaatgcaaagaggcataagaaagatatgttggatagttatgtatccgtggagcactttttgttggcttattattcagatacaaggtttggacaagagtttttcagggacatgaaacttgatatgcaagtgctaaaggatgctattaaagatgtacgcggtgatcaacgagtaactgatcgga

SEQ ID NO: 147670 - DNA, 473 bp, Arabidopsis thaliana landsberg
tcagagatctatccatctctgtatgaagctgaagaacaatgggtgatggtaacctcaagaaaagcaaggttttgttttctctatctctctcaattgattatgatgttatctcctaagatgatctctatctaaatctccttaaattgtttctgctgcagctgtcatggcccaaaacgttggtcaagaaatggctcaacatcaagagcaaatcagaagattttcacgcagacgacttggacagaggtaagaaagaaaaaaaaaactcaagacatttatatttttaggcttagctttaattataagtttgttaaatctctagtaagtactaatagggatgaccatctagggaatgtgagaagagaagagcttttaacgagtttctctttatgttgttgttgcaggtgaaggtggagattggaggaacaatgtcattgaaagagaggaagcatgctctgtccgtaaaagcaaaactg

SEQ ID NO: 147671 - DNA, 3252 bp, Arabidopsis thaliana landsberg
agcttttcaaagttaaaaccttttttccccccgaagaagaatcaatacgaccgatcaaatcaatccattgaatctatggcgatggctatgagacttccagcgatatctagagctgtgacggaagtagcttcgtctccggttggtttgagacgactgttctgttcaaatgcttcaaggttctcttttctgtctccaccggctcgtcgtcaggctgaacctagcaccaatctcttccactccggtaacaaacccttttcatctctcagttaatttctggttctttcgagggtttatcgttgttcgagtatatgtttgatgctttttaaagatccttcctttatgaattcagatttagattatcaggttcgtctaagatgaactatatgtgtttaagaatttgataagttcaattattcattttggttctgatttccagaaaaatgtctgctttcgattgcttaactctagaaatgtattgtaagagttaaagagagtttctttgcactcaattacttcagaattcggtttgttcggttaaaatttggatgcttacgtgatgctatgtgtaccggatcaatgtcttgtttcaagggtctatgtgggctgtttctagcatcttcaaggcttctgtttttgtaaactacttcctagtatcaattagtttttgaaatactgcttaacattgggctttgatgcaagcaattttgattaggctcttacttttgttccttcatagcctctgtttctcacttttatcacatggccattatctcatacatacatctaaggaatgttatgtgttcgatactgtgtctcagtttcgtgaaagtgtctttttgtcatgttatctttatctttgtgtcactggatatttcagggcttagtaagcgcaccacttctgaaaggtccttatggaaccgaatattctctcggaacatgggtggtggtccgagaactttccctggaggactaaacaagtggcaatggaaacgtatgcacgagaagaaagcaagagagaaagagaacaagctcttggatcaagagaaacagctttacgaagctcgaattcggaccgagatccgagctaaaatgtggggtcatccagattccggtgagaaaacgacgaaatcgaagcagagtcatggaccaatgagcccgaaagaacatatcaaaaccttggctgatcggtttatgaaagctggtgcagatgatttgtggaacgataacgatggtccggtgaagaaatttgatcaagggtcgagatcatgttcggattcgattgattctacgcctattgatgtgaggagattagtttctgcgacatgtgattcaatgggtaaacatcgtgtttttatagtagtaggagaggtttttcgagtatgagtagatttaagagaaatgagagttcttgtgatgaaggagatgacgttgatgctaaaaagttagatactttgagtcctttttcttctaaattttctggtaccaaggagaaagtgaagagctcgacgagtgttgttggagttataaggaacaaaggtttgtttggaagaaggaagtttaggaagaacgatagttcaactgaagaggattcagatgaagaaggcaatgagggaaagatgataggttggatggatttgaggaaaacaggaagcagtgcgtcgttaggaaaccacgatatcaagctgacgaaaagagtgaatcgtaatgtcacggatgaagagctttatcctcctttggatattaatacagttagagaagatctcagtaaaagaaaatctgtggataatgtaatggaggagaagcaagagcctcatgactcgatttacagtgcaaaaaggtattttaaactggctgtgtaaaggaatttgatttgtcaagtttaaatcttgatgaactctgttaatggttgcagatttgatgagtcttgtatatctcctttgacgctaaaggcactttctgcgtctggcattcttaagatgactagagtacaggatgccactctctctgagtgcctagacggtatgtattcttctagttcttttctgattactctgctggttttagtttcttcttttggctcaaatggttagcatttgacaacgtattatcttttatataaagcaggtaaagatgcattagtcaaagccaaaactgggacgggaaagagcatggcgtttttggtattttacaatcccttatcctgagattatgccttagcttttgttgtttcttaagataacgttgtaagattgaaaaaaagcttcctgcaattgaaacagttctgaaagctatgaacagcggtaagggcgttaacaaagttgctccgatttttgctcttatcctctgtcccacaagagaacttgcaagccagatcgctgcagagggcaaggctctactcaaattccatgacgggattggtgttcagactctaattggtggtacgcgcttcaaacttgatcaacaacgcctagaatctgagccatgccaggtttgaccaaccgtgattccctgttttacaggaattgtttatattttctagttgttgtggtgaatcttcttttgtttccgtaccttgttgcagatactaatagcaactccgggaagactcttggatcatatagagaataagtctggcttaacatcgcgtttgatggcccttaaattgtttatagttgacgaggctgatatattgctagacttaggattcaggagagatgttgaaaagatcatagattgtttgcctcgtcagagacaatctcttctcttttccgcaaccattccaaaagaggtacaattgctatatagctaacttcatatattcttacctttatcacaaaatccaatgcggacacaaacgtctaaaatgtagattaaattcaggtccgtcgagtctcacagcttgttttaaaaagggatcactcttatatcgacacaatcgggctcggttgtgtagagactcatgataaggtaaaatctgaagctcttctttttgtctcaaaagcttgttacttgaatctggttattgatttttttttgctttggtttcaggtgaggcaatcttgtattgttgctccacacgaatctcatttccacttagtacctcatcttctaaaagagcacatcaacaacacgcctgattataaggtaaaacaaatcctcttaaacaattgtttttttctttcttaccttggtaattctcataactatccaatttcattctcgcagataatagtcttttgctcaaccggtatg

SEQ ID NO: 147672 - DNA, 872 bp, Arabidopsis thaliana landsberg
ctttttttgcttttttcccctttattcatctttcccaattgataaagcagtaaatagatttcaaatttttttttaaccttctctttcttttgagtaacttccagttcctccagctgcacttggatccagctagcagtaacacactcctggcaagcggtagtggtgccatcacgcagaatctaagagtcactaacagccagcaggggaaggtatggcacattctctgttcgtctttctatctaactttatgtcttcaacattccgtgctcagcattgatgaatagcacttgatgatccacaacataatctatgctcaaataaagataggctgagcctgtggattcagtgacttaacataacactaagggtttaatgtttattgcagaaatctcttgtgatgcgcatgaggattgggtacaaactgaacggaaaagatgtattagaggaaggacaagtcagcaacttccctcgcgggttgtgaaactcatcgatcagccattgtattttcagcataaggacttgagtgtttctttctatcaaacccaactaaaaaagaaagacaagtcttgcccaagccgttgatgcagctttctccttccaattttttcatccgttttatgaaacaagtagtactttggcctttgcttgtgatttgaggttcttgggttttctttttgtacaaaagttttgatgtttggaatcggaaagtggtcaagaagtagaatttgtctctcatgtgtctctgagactataaaaaagatgtgatttatgacccataaccataactcatgatgtatctactacagttacaattttcgtcttgcaaagaaggagtattggattttggatcatgtcgtagtttgcatgtgtta

SEQ ID NO: 147673 - DNA, 1006 bp, Arabidopsis thaliana landsberg
ctgggaggtttccgcctgtatgtagcaaggaaattaactgacgaaagtagtccaccacctcagcaaattcagcctgtggttgctgcaagcgcaactcctgagggggttcacactaatggctcagctacttcttcgtcattggctatcacaaaaacatcatcttcttcggcagacagaccacaaacactcgctaacaaagctgctgatcagggtttagtgattctccaatctccaacggttagagactagatcatttctttgaaactgacatgaaatgattaaaattcatgatctctcaactggatggataattatttgttgcaggtcggttatttcaggagatccaagaccataaaagggaaacgcactcctacaatctgtaaagaggtacttctctcctatgttttgaacaagtctttcaaaatatccatcttcaaggagcatttggaatctctcaattgattatatatttgcttttggttattctacagaaagacatagtgaaagaaggtcaagttctatgctacattgaacagctcggtggccaaatcccagttgaggtaacaatcgtaatccctttcggtttctttacttttttttgctttctcagacttcttattgtgttctttcttccagtctgatgtttccggagagattgtcaaaatactccgcgaatatggcggtaagaccctatttgctatatgtctttgaatcggtactcatatagctatcaattctctgtactgacttttgtttttttcttcttctgttttgtgtttcggcagagcctgtaggatacaacgatgctctcatcacagtacttccctcatttcctggcatcaagaagcttcagtaagaactgattttggcttaattgtgtttgtgctttgtgtattttgcttcttagtttttctccacatagacaaaaataagctctactccaaaaactctttgtccgtaccattacctttgttttaccaaaatttaattgaaacttttttgttta

SEQ ID NO: 147674 - DNA, 1572 bp, Arabidopsis thaliana landsberg
ttctcttccttttttttgtcgctagagctggcgagagatgaattacgctcaaaaggatttcatgttcttggaggatatatgtctcctgttaatgatgcatataagaagaaggtatttgtcatcttgagaatcttagtttctttccataatgactctttttttctgaacctatgctaatggacatgttatgtgtgatgaaactaagagcttctttttcttttttagctccccaaagttcttctgtttactattctgtttagtttcccttagaattaataatttcatcagattatgtgtagggccttttatctgcccaacatcgtttagagatgtgtaatgtatcatgtcaaagctctgactttgtaatggttgatccgtgggaggtactttcttattcctcgaaaagcttttaatcagttctctttagtggaacaatgcgttgtttacaaaaatgtggaagctgtttctacaggcatctcaaagcaactaccaacgaactttgacggttttatcaagggtcaagactttcttaacaacaaatcgacgtgtacccgagggtaagataactgcaagaagtgtcctgtgtcgcctttagcatctttctattcaaagtttatctcacttacattttgggagtaattgctgggtcgtctgaatagtgttgcttgctatgtttttatcatacgtgctagccactacgcaaatgacaaacacaaatttattctaatgctagaatctctcaaagtcatgctactatgtggctcggatttactgctatctttctgcactcccggtgtttggatccctgaacaggtaaaccaaggtagcattgttatataaacgtagatgtgtttatcaaatttactcacagttatgctcctttttcaacacttggtttttgaagttaagaactatttgcaaagattatggcattgtgtgcatccgtagagaaggacaagatgttgaaaatatgatctctggtgacgaaatcttaaacgaaaactgtgtaagtattaccaggtttctgttctgactctgctgtatcagtccgtgattgtgcacatggtttactgaatagtgccccctcgatttctttcgcaggctaacgtcaaaatcgttgacaatactgttcctaatcaaatcagttcgagtagattaaggtagtgtgagatttatttatccttcccgagaacagttcatatacactaaaaaatgatttctcttgctcattcctctgcttctttcaggcaatgcatttcgcgagggttatcggttaaatacttgactgaagatggagtaatagattatatcagacaacatcaactatacactgagctcacatgacaaacgctgagaggattattatacttcatcagatcaaatattacaacacaactcatcaaataatggtgtgataaacagatcagatatatttgttgagtctctgtattttaagattcttatttatcaactctttgtatcatattcatatgtacaacaaatgtgaagaaaaaaaaacacaaaagaggcgagagaaatgtgaaactgtaaaactgatgatggattacttct

SEQ ID NO: 147675 - DNA, 1020 bp, Arabidopsis thaliana landsberg
tcagctcattatgacaaccaagtctgtgaactatgtgccaagtatgtcacgctagtcattgattactttcaggagtacgacagccagaatgaactcgttaggccccttcatatcagctgctctcagattcctcctctcaaaaaacaggtcttcattgagtccttggttgtttttgctttctctattccttttctcagacgtggttatatgttaactatgcccaactcatgtgtttgttgcagtgtctttcaatggtagatcattacacccaacttttcttcacacaagtctctactatcaaatcagaccaaatctgcaaacggcttaacctctgtcaagctgtgacaccggcctttgcctctcaagtccatcaaggaaactgcgaggcttgccgcgagactgtctctgaggttgtcaccaaactcaaggatcctgagactaaggtttgctcaaccttcattccttctattatcacatacctattctgtgtcgcaaaccttaggcttagcactaagaattatatcagttagagatatttattattgctgctgaagattgacttttgccttgtgaatgttgcagctgaagataattcggttacttctcaaggaatgcaagtcgcttaacaattaccaggacaaggtagctaactaataaagaatgcccgcaaagctctctctatttaagctgagttttgtgatacttttatggatcatcatcagataataacaatgtgtttgtttatgatggtgaatagtgcaagaagatggtattcgagtacgggcctctgatgcttacggatttgcagaagtttctggagaagaaagacgtgtgcactatcctccacgtctgtccaggtccagccacccaccgtgactacgttcctgcggtggagtcattggcagattcgtaaattcggccaccttggtttcgtcgtcattcacactaataccatgccatgatcgtgatgctaatttaatttggtaacccggtgctcatgtaaatactgattgatatatt

SEQ ID NO: 147676 - DNA, 2092 bp, Arabidopsis thaliana landsberg; identical to SEQ ID NO: 57903

SEQ ID NO: 147677 - DNA, 451 bp, Arabidopsis thaliana landsberg
atggagtactacacatttaccgaaaacgacgaagaacgtgtatcgagaaatcatcacgtgaagaacacgtgggtgaaagaacgttacgagagcgatgaagaagatggagaggtgaacaaactcatcctaaaggaagatgaagaaactaaagatatggtgacatcaccgagtggtgagaggatgatgttaacaagtaaggtgaggtatctaacctatggagctctcaaacatgacacggcggcttcggcagcttccggtggtggaggaagagccttgcctcatccgtcgaacaagtacaaccgtggccaccccaagtactacagatgcagaggttgaagtgaaaactctctgctgataaaataatttcgaattaattgtaataaccctatattgtataataagtttgttgagtatgtatactccatgcaacgtgtgttatctatgtgcttgc

SEQ ID NO: 147678 - DNA, 893 bp, Arabidopsis thaliana landsberg
cagagtaagagagacacagagagagatgagtagcttcacgattccatctccttcctccttctctctttccaattcctataaccaaccctctcctcattccttcattctccgcaattctcgttccaattttgagtttcaccggttacgattagatgtggagtctcgaagaagaagcacttctttacggtccaattgctccaccaaaggtacagattcaggtgagaatctctttcaatttttgtttcctgaggttcaagttttaaatttctagggtttgagaatcaatttgatagaaatttgtttgggaaggtgaaaatgagaacaaaagtgtgttagatgctttctttttggggaaagcattagctgaggttatcaatgagagaattgagtctactgttggagaagtgttgagtactattggaaagtttcaagctgagcaacagaaacaagttcaagagattcaggttactttttcaaactctcttcttgctttttgttaatggagaagcattgttgttaggtttggaaactctattcaccatagaagatacttaaaaagttagttagtattgagctgataagctgattaggtttgtgagctttgtagaacggcacttgaaaaccgcggagattactgctactagttaagtcgaaagcgtcttgattgaatgattgattgattgaatatataggaagaggttcttgaaagagctaagaaagctaaggaaagagcagctcgagaaactatggaggaacaaggacttgttgcttccaaaccagtagccattactcgaaatccggatgctttcgttgttacctctgtaactcctacatcgaccgttgagagcaagactataatgggtgatgtaaagggaaagctcgagttccagtga

SEQ ID NO: 147679 - DNA, 721 bp, Arabidopsis thaliana landsberg
ctttaatttagagagaaaaaataagcattcttccttctctgttttcgagcgggaaattctggagatggctatacaagcgcagttgaattacaacgctccgaatgcgaatcaaatcggttttggtgggtccgagttttctttgatcaacaacaatggcgttattggaatcggtaacgatcagtcttatcttgcaataatctccagttgcagaaagatttcaaccaacatgctctgtttcatcatcagcatcatcaacaacaacagtctccttctcaaagctttttagctgctcagatggagaaacagaagcaagagatcgatcagttcatcaaaatacaggttcgttatttcgtaatccaaaccaatttttcatcgaaagtttcggtttttaagacgtgggtactgataaagattcaaccttttttgctttgttgataacagaacgagaggttgagatatgtgttgcaagaacagaggaagcgagaaatggagatgattttaaggaaaatggagagtaaagctttgcttttgatgagtcagaaggaagaagaaatgtcgaaagcattgaacaagaacatggaactcgaagatctgttgagaaaaatggaaatggagaatcagacgtggcagagaatggctcgtgagaacgaagcaattgtgcaaacgctaaacacaacgctcgaacaggttcgcgagagagccgccacgtgttacgacgctg

SEQ ID NO: 147680 - DNA, 1347 bp, Arabidopsis thaliana landsberg
atggggatatcgggttcaaagcgagttacgacgattctatctaactcgcccgagtttgactcggcttgtgactcagcatacgacgaatctctctctcttgcacagcatgctttcgccggagttcgtccttaccagctcgtctccgccgccgcccacatccaccggaatctttccgctcttcgtttccctctaatcaccagatggctctcttctcctccgagtcaatcccaagtcgactcagctctccgagtcaccgtctctcgagtcacggcggcggatgaggaggagatcctcgggcaagaggagttcaagaaatgggccgtcgaggttttcgcggaagccgttgtgggaaacgcgaggaagacaatagcgagtcggattccgttaggaatcgtcggaatcggtgggatcggcgccgtgactcggtcgggtcaaaacttgatcggagctgcgattggtgtgtacgcgataggggttgctacttccgtttttctaagcctcactgattagaagaaaagattacgttgttgttcttgatttgctgaaattaataaattttaacaatcttgtttaaacatcaaccctatatttgaacaatcataaacttcaaactcttacatgtggtttgattgctaaacataaacatatctgtttaatccaagataaaagacagaactagtggagcttaaaaaagatcacgtgaaaaacgtctttacctacaaagcaatataatccagatttgcccaatctagtagggactgttcgtgcctccgatatttgtagtttcctttttttttggctccgaatatttatttgatattaataagattttacaaaagaagctcaatcaatcatttcatatcactttaaaagcagcaatgtccggatacatctccataggtagcactaagcgaaggggaagcagtttgtttccgtcttcctcgttctgtttatcttcttcctcgtcgttcttggtaagtactgaatctatatacagttactgcattatttacgatattacccactcttacaacctcataacaatatgcagaggccccggagaagatagaagccaaagacgacaagttcatatgtgtggttgagtatggaggagacgtgggtccaacgttctgtaaccctaaattcttccccacgttgtgccgtcaaaactgccggagcttcaaaggtgccaaaggcggtaaatgcgtgaagcaacccaaacacaaacatatcaagtgcttctgcgactactgtaaagacgactagacttcacagtaaagtaccaaaccgctggtttcagcttcaatcgccaaacgcaaccgtcccctacggccctaagtgtttgta

SEQ ID NO: 147681 - DNA, 1053 bp, Arabidopsis thaliana landsberg
atgctactcggtgtcataattgtagccgccgccatctccaccgtctccgttgagggccgtaaacatcacgtaaagaagattaaacccaaacaccgtcgtcattccaaaaacactcctaccggctctccggcacccgcaccttacccgtccaccaacgagggcgttttcaacattttctcctatggtgccaagggtgatggagtctctgacgactcaaaggtacgtccatatatttttaacatcaacttgatgcttcaaagaaaaagaaatattaatcttttatcaaaaaatatctaaattagtgtctcaattcttaatttacgtttgcgtttgatttttcgtttatatttagagtcaatgtttttttccaagtaaactcattacataaataatcatattaaccaaaactgttttggtaattgtacacgtaattaatcgccaaacacaagtggaagaaaacattcgtatgcatttgccgaatacattctgtccaaataattgatagtttatgaatttgagcttctcatgaaaataaaaacacaatttgtttatgaggcatttgtaattgagtgcgcaggcattggtcggagcgtggaaggcagcttgtaaagtggtcggagggaaagtggagattccggcagggaaacagtttttggtgaaggcagtgacactgcaagggccgtgtaaggaggagacggtggttcaaatagaaggaatcttagtggctccagagaagatagggtcatggcctaattcaagcttgtttcaatggcttaacttcaaatgggtcagtcatttgaccatccaaggctcagggactcttaacggtcgtggctctaactggtggaacttagacacttatcaaactcaggtacggacttaattcacaatgtaatactaggaatcactacactgatagtttaagatctttgtcatcattataattgcaatcaagatcttttgtgctatgtactttgaaagactaatgttttgtcatatgttcgtttgatatcttttcgaaattgtattatgagactttcaaatatgtattgg

SEQ ID NO: 147682 - DNA, 1933 bp, Arabidopsis thaliana landsberg
gattgtttcaatggaccaagatatccgactggatacaacacgagcaagatgtgagtaaacagcttttcttgtgcttcagatccttttctttctttttttggtttaaagctttctggtaataattagtcaatctttatgctcttttcctagtgtcaaaccttctcaagaggcatcgagaattgtcagaccgtcttactaggtaggaaatatgcttttgaactatatagttcacttctcgatctttatgtttgctaactttgtatttggtgatcattcattttagggattctgataagacaatgttagatcgcttaaacaaagagtttgaagctgcacggagatcccaaagtcagggtgggtatggatagctgaattgcagaattggacgaattatctgactgactttttttttgcttcataagtatttgctcatccgtgtatctattttaatcaaatgctgtattcgctcctatcctctgcagaagtcttcttagatggggaagagtggaatgatggtttgttggccacattaagggaacgggtatggcatccatcattgtgtgcttccttttattgtcaacattgttgtgtacttaaaagaggtgttccaagccttggtatctagttgaagaagacttagtagacactttaatatgggcagatctagatttgattatgtcgttctgataaaaagagttatatgttctttgtgctatgaaatcttttatgccatctttttcttttcttctgttggctttattgaatttttcctgaacttgaccatgaactgtgtaggtgcatatggaagctgacagaaaggcagaaaacggtaatgcaggttttgcactagtttgtcatcctgaagaacgaattacttacagagtgggaaataaggtactcctgaggtcttacattcttccaaatttcttctgtagagaaattgattttgtttgtacccaaggtctgttggtgtaagccttatctaagtctatatagcacagaatttaccatgattctttcaagatacccgcaaggaagactacttctgtcacaaaagatatactatatggctgtagaaatttctggatagtccaaaggaaacctatagttttgttcattcatcttggcctgatgcaatgtttgcctaaaagatagatccaatcagaccaatcttggttgtatacttgtatatctttgttgaagaatgttgatagttgtaatgttgtgtcttcccccaaattttgtagttgctaaaaactttcctgattttaaagttttggctgacacctggctaatcttaagtttagaatgacctctcactttgaatcgataccaggtcgtttttgcttatatatttggtgttttatcaaacaggtgatatgttgcctagatggatcgagaattggaatacagtttgaaacatctactgcaggtattttgaactataactggcattttgtcacaatttccaagtgtttttgctttaccaaaaattattagcagttatcataatgattttttcttcaaaggtttcttaccttttggcgtgtcagtgaaagagagttagctgttttgtctccatatttttatgtatatgaagacattgggacttttcctaaccctttcatctccctgtatatgataatttaatccgttttatataggagaaacttacgaggtttaccactgtgtgcttgagagcaagtcgtttttggagaagatgattgtgcttgagcacacaattcctttctttttgccgctaagtgacttggaaaatgatcttcttttttcgaatgctaaggtacctgatcttcagtttatcctcttacttctttgtctcttatatgtttttggttttaacatttttcgatgccagaaattcatcgataatgttggggatctcctgcaagcatatgtggacagaaaggaacag

SEQ ID NO: 147683 - DNA, 533 bp, Arabidopsis thaliana landsberg
agagcatctggcagtgagcttatgatagagggaatggtggagactagattagcaatggggttctctggtcaccttgctgctggctttggatgtttcaggtatactcaaatttgtaaacaccatatttctttctaatgtgaccatcataattctaacaagttaagaaggaatacacagattcatcgacttggacactccgcttcttctggctgatgatccagttcaaggtggctacaaaggtaaaatagtctctgttttcttcatcttgcatttttccttgttaaaaagatgattgaaattcaaaatgaacaagtctaatgcttgtggttttgttggcagcatgtggtgctgtctatgagtttaaagatgaaggcggtcacggaggatatcttcagtggaatgatgttgctcagtgaaattccttttgtctacttaggtcccttttcttttgttcaataggattttaatcgtaagtttaatgttggttttggaatatgtaaaggctaatcttggtcctaaattctcagtatgtg

SEQ ID NO: 147684 - DNA, 1867 bp, Arabidopsis thaliana landsberg
ccaaacaaaatattgtacaggtccatctgtttcgttctccacatgttcggcggtcacggtcaccgcaggtctgtcatcaagttcttcttcttcattcaaccatcttaaatccacacagattcttctgtgattgtctccttaaaatctcgactctgcatcgtacagtgacttgtgaaattaggatcgttgtgtctgtgttttctagttacagtttgtaagtatctcaatatttgcgtgtaaagtcagattcagtgtcgtcagctgtttggatttggtttgggggtatatatatagcgaggtgtaatcattataggaggttttagtttcccattttttctctcgtgtgaatacgtttaatgctgtatcgtcggcccgagtttatcggagctccgggtctgacgtgagttttccaaatggcggcgtctgagagatcgattgacaaagaagtcgacatgggttcttcctttcttcaaaaattcaggctttacgagacccgctcggtgattattctctattgattctcttctttgggcataatttgataaaatccgtagatttgctaatctgattaacctatgttttgtggaacagagcttctatatgattggaagagataaaaaccgaacgtcttggagggtcctgaagttagataggacagagccagcagaggtcaatatctacgaagattcaacggcttacacagaagctgaatgctttgaaactttgagaaggatacacgagggaaacagatcatctggtggtttgaaatttgtcaccacctgctacgggatcatcggtaatgaaatgtctttgtagcatctgattctatactagttgtttcttcttctttataatctcaattttttcttggtgtaggattcataaggttcttgggaccttattacatgctgataatcactaaaagaaagaagcttggtgaaatttgtgggcacactgtttatggtgttgcgaagagcaagatcatcacgattccacatgcctctgtgctatccaatgtggcttattctaaggacgagaaaaggttttcttatgttacttctgcttgtaaaatggaaaacctgtaccttgctacctttatccttacattacttttcgaaattataaagctttatcacttgtatttagattttaagaccattctgctatctttttttttctctctattgtgaccctctttgatctgcacaataatagtgtcacaggtttctattagacaagttaacagttgttgaggtaactgtgattgaattcgttacatgttcctctttactttgtctatcgctgttggagataatccagcagcttagagtttcaaatcttatttagtctgtagtgggacaattttttgttgcgcatttttgctttttactatttctaggtattcttctcctctgtttgtacagtggacacacttctatttgttgtatttatcttgatatgttatatgacagaggtactatcaagaaagggagagctcatttttattctctcctactgtcatttaatctgttatattgtgaactttgtattatcttgttaacttccttctttttcagatactgatccaggttctaaatcatgtttggtttttgttttcttctgtcttccatggaaattttgtaggtacaagaggctgctctgcactgttgatctcacaaaggacttcttcttcagctattcctatcacatcatgcatacacttcagaggaatctgtctaacaatgtggaaggacacacttactacgaatcgatgtttgtctggaacgaatacttaactcgaaggattcggaataacgtgaaggactgtatgtggacagttgccttggtatatggatttttcaaacag

SEQ ID NO: 147685 - DNA, 1696 bp, Arabidopsis thaliana landsberg
  unsure (1)..(1696): unsure at all n locations
ctttctctccctcaacgacggacctctctcngagtagccgcagccagagccactcccaaactctccaaccgtaaactccgtgtcgccgtcatcggtggtggaccagcaggtggagcagctgcagagactctagcacaaggaggaatcgagacgattctnnnnnnnnnnnnnnnnnnnnnntgcaagccttgtggaggtgcgattcctctctgtatggtcggagaattcaacttgccgttggatattattgatcggagagtgacgaagatgaagatgatttcgccgtctaacattgctgttgatattggtcgtacgcttaaggagcatgagtatataggtatggtgagaagagaagttcttgatgcttatctgagagagagagctgagaagagtggagccactgtgattaacggtctcttccttaagatggatcatccggagaattgggactcgccgtacactttgcattacactgagtacgatggtaaaactgtagctacagggacgaagaagtcaatggaggttgatgctgtcattggagctgatggagctaactctagggttgctaaatctattgatgctggtgattacgactacgcaattgcatttcaggtcaaagttctttcttctttctcaagttttagttttgttctagttgttttagggttgtgagaatggtgttattatggagttgagtggtgtaatttggaaattttcaggagaggattaggattcctgatgagaaaatgacttactatgaggatttagctgagatgtatgttggagatgatgtgtcgccggatttctatggttgggtgttccctaagtgcgaccatgtagctgttggaacaggtactgtgactcacaaaggtgacatcaagaagttccagctcgcgaccagaaacagagctaaggacaagattcttggagggaagatcatccgtgtggaggctcatccgattcctgaacatccgagaccacgtaggctctcgaaacgtgtggctcttgtaggtgatgctgcagggtatgtgactaaatgctctggtgaagggatctactttgctgctaagagtggaagaatgtgtgctgaagccattgtcgaaggttcacagaatggtgagttcaaaatttttttgcttttataagattcttgtgtttaagttttagtgaagactaaagtcttgagtgtatttgttgctataggtaagaagatgattgacgaaggggacttgaggaagtacttggagaaatgggataagacatacttgcctacctacagggtacttgatgtgttgcagaaagtgttttacagatcaaatccggctagagaagcgtttgtggagatgtgtaatgatgagtatgttcagaagatgacattcgatagctatctgtacaagcgggttgcgccgggtagtcctttggaggatatcaagttggctgtgaacaccattggaagtttggttagggctaatgctctaaggagagagattgagaagcttagtgtttaagaaacaaataatgaggtctatctcctttcttcatctctatctctctttttttgtttgttagtaatctatctacactaatgttgttactcttcaatgtattcagtatcatatttatgttttctgttcattgaattagtcaaaaagcatttggctttacaatccccaatttctcactaaaaacagatttc

SEQ ID NO: 147686 - DNA, 760 bp, Arabidopsis thaliana landsberg
ctctacgtgctctctccacttccttaatgcatccgattgacacaatcaaggtgagtcctgttggtgcttttgcaagctgtatataagtaaatgctctgtttagacaagtttaggtgagaacttggctaccacaaaactctgcgtaattgacatctgcttctacaatatttgaatatttaaatagatgagtatgccaataattcctcctggcttcttgtggcatactgttgacggattcgttatcactttcatgccagacacgtgtgcaagcatcaaccttgtcatttcctgaagtaatagccaagcttccagagattggtgtccggggagtatataggggttctattccagcaattcttggacaattttcaaggtcttttcagttgtttcaaatcaaagatattttcacttctacctgttaaatttgatttccatgtggcttaatctctttcatcattgtagccatggcctgcggacaggaatattcgaagcaagcaaacttgtgttaatcaattttgctcccaatctcccagaaattcaggtgatgatcactctctattcactgtttggctggtttcgtcaagattctaattttgtgcttcaagtatatgtattattatgtgttcttatagatgttgtgttactgaagaaattagtattgaatgacttcaaaagtccacttgtcctctggaatcccaacattctatcgttttcctagaacctcggcactgcttttgtcctgtatagttcatggcatcta

SEQ ID NO: 147687 - DNA, 2218 bp, Arabidopsis thaliana landsberg
tgaaaacattcatatgttagataaacatcaaaattatagagagttcctttaactgaagattatggtaaagtaaaactttatgctataaatagagctttaaaattatacagttttagttaaatctattatttcagctattcttccgtgttattagttatcccacaacccccacttggcacttgtttacacctaaatcgtataaatactgtagaccagctccgtcccaaacgcaacaaaaactttccttcgtctccataactatcaaacgacactcatctatgcgtttaatgctctgtttctgaagatacactcgagaataaccatggccgtttctttcttaccttattttctcattctttccttcctctcagccattgacgcacgttagtttttcatctcttcatatacctatgtctgtctctgtatttgccgtgtctactacgttgttcttattttgcgttttttttgtttttgtttccacagattctggaatggtcggagtcaattatggtcggatagctaacaacctcccgtcgccggagaaagtagtgaacctcctgaaatctcaaggaatcaaccgtatcaaaatcttcgacaccgataagaatgtactaaccgcacttgcaaattccagaatcaaagtaatcgtcgctctccctaacgagcttctctcctccgccgcctcccaccaatcattcgccgacaactggattaatacccacataatgccatacttcccagcgacgaagatcgaagctatcgccgtcggtaacgaagtatttgtcgatccgacgatcacgccgtatcttgtcaacgcgatgaagaacattcacacctctctggttaagtataacctcgacaaagccatcaagatctcgtctcctattgctcttagcgcgcttgctaattcgtacccgccttcctctggttcttttaaaccggaattaatcgaaccggttgttaaaccaatgcttgctctgcttcaacaaacgtcgtcgtatcttatggtaaatgcttatccgtttttcgcttacgcagcaaacgccgataaaatctctttagactacgctctgtttaaagaaaacgccgggaatatagattccggtaccggattgaagtataacagtctcttcgacgctcaaatcgacgccgtttacgcggcattgtccgccgtcggatttaaaggcgttaaggtgatggtgacggaaacagggtggccttccgttggagacgagaatgaaattggtgcaagcgaatctaacgcggcggcgtataacgtcggacttgtgaagagagtgttaacgggtaaaggaacaccgttaagaccgacggagccacttaacgtctatttattcgctttattcaacgaaaaccagaaaccggggccaacgtctgagagaaactacggtttgttttacccaaacgaagggaaagtgtacaacgttccgttcactaaaaagtcaacgacgccggtcaacggtaacagaggtaaggttccggtgacgcacgagggacatacgtggtgcgtttcgaacggagaggtagcgaaggagaaacttcaggaggctcttgattacgcttgcggagaaggaggagctgattgccgcccgattcagccaggtgccacgtgttatcatcctgagtcgttagaagctcacgcttcgtacgctttcaatagttactaccagaagaactcacgtcgtgttggtacgtgcttctttggtggagctgctcacgtcgtcacgcaacctcctcgtacgttaatctaatccctctcctgtttttatcataacattacatctattttgctttagttcaattcagaagtgtatatttagctgttatttatgcttaaaaattcatttggtatgtttattgaaaaaaagaaaaagatagtggcaaatggtttagtagttggcggttgtgaaagttgagctatattgggtcattttggcattttaagatgttcacgtttctgtaagatatatatggtgacctttaatatttttatataattctaacaaaattattttttcgttgattgcaggatatgggaaatgcgagtttcccaccggacattgaggcggaatagttggcagcgattttctgttttttttttgcctgatttattaagtacattgtttgctaatcgggaatatattttatattgtgtataaaatatattaactttgttgaactattttatatattttaattt

SEQ ID NO: 147688 - DNA, 1800 bp, Arabidopsis thaliana landsberg
  unsure (1)..(1800): unsure at all n locations
cttttaaaacttatctaaagagactaagcttcttttgagatggcaccaacggagatgaacatcgaaagaaaggtagaggctgacgtggcggtgattcctaatgatggaaaaagggcttacgtcactttcctagctggtaaccaagactattggatgggtgtggttggtttagccaagggacttcgtaaggtgaaagcagcttatcctcttgttgtggctatgctcccagacataccgaaagaacaccgtcaaatcttggtggctcaaggatgtatcatccgggagattgaaccggtttatccgccggaaaaccaagctggttatgctatggcttattacgttatcaactactccaagcttcgaatttgggaggtaggatcttacttacatgcatatatccgtatatcactgtatcggttttctttgtcaactatcgtttattgcatgtaaacacgtacccacaaattactttgagtgacacgtggatttgaatgttgtgaattttttaacagaaacaaataataacgcttatcattttatctaacaaataaattgtcatgtgccgtatactaatcaagatttatatatagtcacaaatctataataataacgcttattattattctcagaagttgttttaatttagtaaataacatttcaagaacatatgtataaagtttgtcttaagtcttatagtatatatattttattctaaccatatgattacatatataaatgcagtttgtggaatatgagaagatgatatatttagatggagacatacaagtgtttagcaacatcgatcatctatttgacactccatctggctacttgtacgccgtcaaagactgtttttgcgagggttcttggtcaaaaacacctcaatacaagattggttactgccaacagtcgcccgaaaaagtgaggtggccgatgaacagtcttggtcatgtgccgccattgtatttcaacgcgggtatgttggtctttgaaccaaatctcctcacttacgaggatcttcttcaaactgttcaagtcaccactcctacttcattcgccgaacaggtccgatcaattaggattttttagacttttattttcattatttacatttattttacaaatctaatattattgtttattctatttataagattttctgaatatatactttacagatatttacaagcccatcccttcgacctacaaccttgtaatggctatgctttggcgtcatcctgaacacattgaccttgaccaaatcagtgttattcattattgtgcaaatgtacgttttaattccttatttcgtctctacatatatgcattaatgtagatttaatgtatttctgttactcaaattttgtagggttcgaagccttggagattcgatgaaactgaagagcatatggatcgtgaggaccatnaatgttggtgaagaaatggtgggatatttatgaagattcgagtttagattacaagaactttgtcgagactgagtccaaactgagtccgatcaatgcaaccttggcttccaaggaatctgttggcgatgtccttattagtcttgccccttccgctgcataaccaattctttatgtggaagctctatctatgcaactttttttttcctttttgttttaatgagaggtttaggctatatataaatttttatcataactatatagcaacctcgtttgagtttgtgtttgtgagattagagtggttggtcttgtgtttgtgtcaatgtcgaccttgaccaccctttccctctctctttttttgttttagaatcaataa

SEQ ID NO: 147689 - DNA, 923 bp, Arabidopsis thaliana landsberg
atttttgttttgtcggaaaaaaaataaaatgaagagcaacacaaacactaatctgattctcttccaccaccactctccactaacttcaaaatcaccctccgccgtcgccgccgcgaatcaccaccgtttcttattcatcttcttcctctctttcttcactctcctcttctctttctctctcttctcctcctcaatccactccaccacatcctctcactctctctcctcatctccctcctcctcctctcttccaccaccagtcctcgccgcacttctccactacacttcctcatcaccaccaaacacatctatgtcctttcttgaactctccaccatctccaacatcattcactctcatggcccagcttgtaacctcttaatctttggactaactcacgaatctcttctctggagatctatcaacttccaaggccgtactgttttcgttgatgagagtccttactctgtttctaaattcgaacagagtaaccctggagttgaagcttacgaggttgtttactcaactaaagtctctcaagctaagaagcttcttggttattacaagacccgacccgagtgtagacccgttcagaatcttttgttctctgattgtaaattgggtattaacgatttgcctaattttgtttatgagattgattgggatgtgattttgattgatgggcctcgtgggtatgcttctgattctccgggaaggatggctccgatctttacttctgcggttttagcaaaaagtaaagattttgggacgaagacgaagaagactgatgttcttgtacatgagtttgggagaaagattgagagagtgtacagtgagggagttctatgtgaagagaatttgattgaagtggtcggagatttagggcattttgttgtggcggcggccgaagaaagaaagagttatg

SEQ ID NO: 147690 - DNA, 985 bp, Arabidopsis thaliana landsberg
aactggacattggttgcacagtgtgtagatgatgtcatcagaacatatccaaaactacggctaacacatggccggaaggtaaaaaacatctgaattcttacatattccaacaaaaagaagttcaaagttttgattttgttctcttggtttgtatgttttgcttaaaaggtgttagagatccgtcctgtgattgactgggacaaagggaaagctgtgacatttctacttgaatcactcggtagttaacaaaatccttctcatctgcttctgttctgaatcttggtttggtttggccattgactttaatacatttctcaggcctaaacaactgtgaggatgttcttccaatctatgttggggatgatcgaacagacgaagatgcatttaaggtttgtttttataaacttatatagctaaaacatttcattaagaagtagttttgacttaaggtgcaagtaatgtcaggtattacgagatggaccaaaccacggttatggtatattagtctctgctgtgcctaaagacagcaatgccttttactcgcttcgtgacccgtctgaggtaaattaagaaatcattcaactgaaaatacttgagctacgattttagatcatacgagtttgatatttttgttatgtatatatcaggtgatggagtttctgaagtcattggtgacatggaagagatcaatgggttaaagtagaagaaaaagatgtagaagaaaagtggttaacgttaatatatattacaaatatgcaagttagaggttaattgttacttttaggctttatacaaaaactaccgttgagatttaacttaacggtatcggaggagagatcacatgatggcttaaaacatgccggagatactttttccgaccaatctctttatcttctacaactgtaaattcctccatctccggattaattcaagacatttttgtttaaaattttatgtgaagtaataactttttaatagaacaaaa

SEQ ID NO: 147691 - DNA, 193 bp, Arabidopsis thaliana landsberg; identical to SEQ ID NO: 58913

SEQ ID NO: 147692 - DNA, 210 bp, Arabidopsis thaliana landsberg
caaacaaaatttcagctcctccatatccatcaagaaagatcaagaatcaagaactaatcaatatcgatcgatccgttaaaaaaaaatggatatgattccccaattgatggaaggctcttcagcttacggaggtgtcacaaacctcaacatcacctcaaacaactcctcctccgtaaccggagccaccggaggtgaagccaacgcaaccac

SEQ ID NO: 147693 - DNA, 2208 bp, Arabidopsis thaliana landsberg
acaaaacaacaagactttcctcggaatcttcatgatcttggttctaagctgtataccaggtagaaccaatctttgttccaatcattctgttagtaccccaaaagaattaccttcttcaaatccttcagatattcgttcctcattagtttcactagatttggagggttatataagcttcgacgatgtccacaatgtggccaaggactttggcaacagataccagttaccacctttggcaattctacatccaaggtcagtttttgatatttcatcgatgatgaagcatatagtacatctgggctccacctcaaatcttacagtagcagctagaggccatggtcactcgcttcaaggacaagctctagctcatcaaggtgttgtcatcaaaatggagtcacttcgaagtcctgatatcaggatttataaggggaagcaaccatatgttgatgtctcaggtggtgaaatatggataaacattctacgcgagactctaaaatacggtctttcaccaaagtcctggacagactaccttcatttgaccgttggaggtacactatctaatgctggaatcagcggtcaagcattcaagcatggaccccaaatcaacaacgtctaccagctagagattgttacaggtatttcattcatgctttatctctgcggtagtctcaaaaaaatatgcacctgtaaagaatatccatctcttcatgagcaaaaacactgacgactttaaataatttttgactataaaacaagagtgcataggcacaaatgtgaaatatgcaacacacaattgtaacttgcaccaagaaaaaagttataaaaacaaacaactgataagcaatatatttccaatatttaatcagggaaaggagaagtcgtaacctgttctgagaagcggaattctgaacttttcttcagtgttcttggcgggcttggacagtttggcataatcacccgggcacggatctctcttgaaccagcaccgcatatggtaaagttctatcttgaacaaagttcaaacaatatacgctatgattctaagaaccactttcctgacacagtcaaataacttttaataggttaaatggatcagggtactctactctgacttttctgcattttcaagggaccaagaatatctgatttcgaaggagaaaacttttgattacgttgaaggatttgtgataatcaatagaacagaccttctcaataattggcgatcgtcattcagtcccaacgattccacacaggcaagcagattcaagtcagatgggaaaactctttattgcctagaagtggtcaaatatttcaacccagaagaagctagctctatggatcaggtaagatgtgaaagcaatatataactagacttagtttccacagagagctccaaatcaaccgttggctactagcctactaacataatgaatggttgccgtgcaggaaactggcaagttactttcagagttaaattatattccatccactttgttttcatctgaagtgccatatatcgagtttctggatcgcgtgcatatcgcagagagaaaactaagagcaaagggtttatgggaggttccacatccctggctgaatctcctgattcctaagagcagcatataccaatttgctacagaagttttcaacaacattctcacaagcaacaacaacggtcctatccttatttatccagtcaatcaatccaagtaagtgagcaaaatgccaaaagcaaatgcgtccagtgattctgaaacataaattactaaccatatccaacattttgtggtttcaggtggaagaaacatacatctttgataactccaaatgaagatatattctatctcgtagcctttctcccctctgcagtgccaaattcctcagggaaaaacgatctagagtaccttttgaaacaaaaccaaagagttatgaacttctgcgcagcagcaaacctcaacgtgaagcagtatttgccccattatgaaactcaaaaagagtggaaatcacactttggcaaaagatgggaaacatttgcacagaggaaacaagcctacgaccctctagcgattctagcacctggccaaagaatattccaaaagacaacaggaaaattatctcccatccaactcgcaaagtcaaaggcaacaggaaagtcctcaaaggtaccattacgcatcaatactgccgaaacctagaactgtataaaag

SEQ ID NO: 147694 - DNA, 626 bp, Arabidopsis thaliana landsberg
atgcattacatagagtttcttcacgaacaagtgaaggtctgcagttcaataccaagcatgattcattcatctttatctgagttcccatgttcttttgtacaggtgctaagtgctccgtatctgcaaccggtacctgatgctacgcaggtgagtatgatcttgaatctcaacttcatttatacttagttcactagttctactctgcatctgacagatcttcacttggaacttgaataccttgcacggactgattttcccgtcttttgtaaccaggaggagctggagcagtacagcctgagaaacagaggattatgtcttgttccaatggagaatacagttggagttgctcaaagcaacggcgctgatatatgggcgcccgtgaagactcctctatcaccagctttcagtgtcacatctcaatcaccctttagatgaccaattcgactaatcacctactacgatctttgtgttaagcctaaaaaagaatgaccaattgttatttttctgatgatgcctctgtaacatatatagacagagagcacatgatgttggtttagaacagctcatggttggcaatgattgttattattattcgactgcttaatgcatccccttactttggactt

SEQ ID NO: 147695 - DNA, 1430 bp, Arabidopsis thaliana landsberg
gaagcgattctcactaaaaccctcgaacacatcgcctttatctctttctctagatctactcgctatggctactatcaccgttgttaaggctagacagatcttcgacagtcggggtaatcccaccgttgaggttagattctccgatcacttttgtatttcccatcactttccggctttgtacagtattcgggacggatctgtttgttagatgactatccgatgctaaaaccactattcaatcggttttctgtaaacctgaattgatctagtagtcgtacgggaatgagattagcttcttgtgaacgatgatcggtgatttgatctcgcgatctaggatcgtgagttgtcgatgatggagttgattttgtttatatgatttttgcgacggatctatttatttccatctggtttttacgatttcgattgtttgctaatgacgaatttgaaaagaaagctaatgatttctctgatgatgttggtttaggttgatatccacacgtcaaatggtattaaggttacagcagctgttccaagtggagcttccactggtatctatgaggctcttgagctgagggatggaggatctgactaccttggaaagggtgtatctaaggtgagagactgcgatctgttctgtgtgtttttttagtgttagtagagttatttcaattgatcatgttgactgattcgttatttgttaatatcactaggctgttggcaatgtgaacaacatcatcgggccagcacttattggaaaggtgagtgactcactttaagctactctcagaacatcaaatttgtgtctaattctatgcgctaggctcactcattttatttttgttgcttttattatttcttgcaggacccaactcagcagactgctattgacaacttcatggtccatgaacttgacggaacccaaaacgagtgggggtggtgcaagcaaaaggtacttaaaagggaaaattcattttttgtgtattcacttaagaatagaaggcaagtctgaccatcttgcgccttctatctgtgtttagcttggagccaatgcgattcttgctgtgtctcttgctgtctgcaaagctggggctgttgtcagcggcattcctctatacaaggtagaacgatctggcactattaagttgggtccctctgcccatggaagataagattgttactgttctgtgttacttggttctttcggagataaatgttctaagctttttcctttgtgtggtattagggtgcagcacattgccaaccttgctgttaaccccaagattgagctaccagatcctgccttcaacgtcatcaatgggggagcccatgccggaaacaagcttgttatgcgggacctaatgattctccctgttggagctgcttctatcaaggaagccatgaggatgggtgtggaagtttaccaccacttg

SEQ ID NO: 147696 - DNA, 782 bp, Arabidopsis thaliana landsberg
caatatgtttcttagtggtgatgttctcttttgctttgttggtggattcttaggactgtattgactggccatggctgctgataccacagcttcaagttactggttgaattggagggtcctcctctgtgcattaatcctcttagctccaatagtattagcagctgttctcatttggaaatatgaaggcaagagaagaagacaacgcgagagccagcgagaattaccagggacattgttccaagatgaagcttggaccacatgttttaaaagaatccaccctctttggttgcttgcctttagggtattctcgtttgttgcaatgttgactttactcatttccaatgttgtgcgcgatggagctggcatattctacttctatactcagtgagttttaatcattatacttccttctcacatttctgaatccttgaaatgaatgaaaaagatctaaactttttttttgaaacaggtggacatttactcttgtcacactctactttggggtacatctgttggaaattccgttgttgaggttactaccttagttttagatactaaatctgagatactttttttcttcgtagtatgctgcggtgctatctgattatggatgctgcatctataataaagaagctagtggaaacatggagagttatacacgtataggtgatactgaacaaggcgcttatagaccaccaatcgctcttgatggggagggaaatacgtcaaaagcttacaatatacctttagaagcacccgcccgaaaaacagcggggttttgg

SEQ ID NO: 147697 - DNA, 388 bp, Arabidopsis thaliana landsberg
aaccagaatcttttcctctttctctaatcatatcaaaagctcccttaaccatctctctatagctgcttatatatatataagcaaaatctgttctcttcactagattacaaaaccagtcaccaaaaaaataaaaacttgtatttttgttttctgtgatctctctaatggagcaacagcaacaacaacaactaccttctactactactagacccaagcccaagctactaaaccggctcaatacctacgtcggttcgagccgggttggcaaacggttcaaactcgccgaacgtaattcaactttcacgacggagctccgtgctggtaccgccactttcttaaccatggcttatatcctctccgaaacgctttaatcctttctgattccggt

SEQ ID NO: 147698 - DNA, 623 bp, Arabidopsis thaliana landsberg
atgcaagccgagctgatacccgaaggtcctaacggtgagggccgtttatcaaaccagaacagcaaccctaatttactctcttctgcttctatcagtattactcagtttcctggtatgttgcattgatttaaaagttgtgcttgtatgcttgttttgttagcttagttgattttttttaatggaaatggcgatgttgcagctaagaagccgactaggcaatgggctgcttggacacatcaagaagaggaaagtttcttcactgctcttcgtcaagttggaaaggtatcaccttgacgttcttcttctctatgttgttaacctgttatgtgtgtgaaccttctctttgtgttgttttgtagaattttgagaagataacttctcgtgttcagagcaaaaacaaggaccaggttggttgttttagttttgtgtttgttttcttttcgcttgcacttgctggtgtttgcttttagtttctgatggttgtggaaacttcttgtgatttgcaggtcaggcattactattatcgtttagtgaggcgtatgaacaaacttttgggcccggatctgagccttgatgccaagaacccaaaggacaccaatgctgcaatgctacgatggtacttg

SEQ ID NO: 147699 - DNA, 5764 bp, Arabidopsis thaliana landsberg
ttctcaaaacacatcagttaccaaaggcagctcatccgcgaatatcgttccttacgaacacgacgtaaggcttttcaacccataccatgtccgtaagttgtgttagtccatacaagtctaatatcagaagtaaacaaggcttttaaagaaaatcttctttattcaataaaaaataaaacacttacaatggattgggtacccgagcctaagagcatgtatgggggatactcatatagtatcataagtattttttagtattatttataatatttgtttattatcagagattttttatgatactcctactaaatatgtttgataagtgtgtattttacatgttttgagcatccatttgtcatcactttaacatcatagcatcactgttttatacaatctcatcatttgtcatcactttacatgtttaggatagatttgtatgcatgttgcatatttgcgttgatttcaggtgatttggagttgttgacgagctatctggaagaagcagacgtggtgatgtcaaaccactcgaccaagaggtcgagtaggagcttcaaaatctcaagagaccactcgacaacgaggtcgagtagagcacatcaccacttcacctcaccactcgaccccgtggtcgagtgccatcatctccatcaccagacggtcactcgatcacgtcactcgacctctaggtcgagtgccttcacctccatcatcagacaaccactcgacctcctcactccacccagaggtcgagtatctccatcacaccactcgactgcatactcgatgacaagcttcagagccttcttcattccgcactcaatcagacactcgagcacaaggaagaaaagaagactccagctatacactcgagctctcactcgaccacgtgggtcgagtacagttcttaatccgtcccaatacttcgtcgttttgagtattagggtttcgggatatttggctataagtagcatgtacttctcattttcgagaggggagtttctaaaaaacctagttttatttccgcagccttgtgttctagactttttgtaatccggatttctctttatcaattcagtattcagcttctgttcttgattttcgtttattgttgttcattctattatcatactattgttacactgctgttatcatgtcttcaacctgttcaacgtttatgctttctgttatgatgtctgagtagtgaataggtttctgaggatgggttagagtagtgtagaattctcagtatgctaggtgattgagtattgattgatagatcccttctggattagttgttcttaatgcctattgctttctgatcaactggaatttgagcccagacatttccgcgcccaaaaggtgttcgatgaaatgtatgaaccactaattccagagattcgtgaccctgtaccaaggtattggttgcagggagcgttttggctttaacttgttgattcgtaatgcctgttaggttagctctcgtcaatggtgattgagtctgggactaggttagcttgagagtctctgttgcggtggcacttagatttggttaatgaacttgttgtctagggttaatttattgagcatgtcaatcacctgtaaactgaggaaacgaaactactcaattatcccatccttaggaattctttatctgattgattttattgtttactctactactgtttactgcatcctgtcatctgttgtttagtttctgcaattctttactgttactcgacctgatactcgaccacccagttgtctggcaacagactgtgcagtcgagtatccctgtttcattttctgtctgttactcgacctgtcactcgacctcacccagtgctctgcaaagagctgtgttggtcgagtgttttactgtttctgtttgattttctgttttctgcatgttcacttaggactgctggaacacaccaaaacctgttattgcttggcttgacttagtgacttctgatcacatcttgattgttagcatcacacccatttggattgacaacctaaaatactacaatgatatgattggtgttttaggataattgactaaaaacctattatcagttggtacaccttctgctttaatagaggacactatgtcttcgaagacttacaaatgatctaatggtgattcatcgggagctccttgatatagctcaaattatccttaagcttactccctcaaataagagatcgtcgttagtacttaagggtcgaatttcactgagctctcgatgttcacacaatagacttatgatgattaatattaagctagacaaagtagatgaatgtaaaagacagtaaagcaataaaatgagtagtagattcaagtggttaaagcgtcgggtcttaggaattgtctggagagatagataaattgtagatctagctaatattaggattgttattgcaccgttctcgaactcaaactatgattttagagtgactggtggtgttccgcaaaactctctatacttagagctaagataacctgagaagccgagaaatcctatactaaagcatgcattattatcaagtttgattagttcacctagtatctaaaccagagcccttctatgagcctacctgttctttcttaaatgcctaggctcatctatgatagttcaaataacaagtgcctatggtgggcatacctattatctaatatcaagttctaggtgatcaatctagaactagcaataagaataatcaaaatgaagaactctaagaataatcctaaggggttttcgatctaccaattcatctaaatccctattgagactccctaaacccaacaaggtgattactcagacatgataacagaaacacaaatcataatcttaatagtttgcattgatggattagaaatagagtaaaaggagtccagaatcctctctacaagaattggattcttctctccaaaatgtatctcaatctctaaaaaaataaaacttaggtctaacaatgaccaaaatattagagactactttgcaaataaggaaaacttcagggcttttcaaagacttggcagaaaacaggaattctctcaatcgaaataagggtgtcgatcgacaccatcttctgaaaaaagtctttgataatcttcattgctgaaaagctttcaaaatttcttactatgctccatagctcccagatgtgtagtgtacctaaaatgactcaaaacatacgaaaaagactagaaagactctaaaaaccattctgaaactatgttagaaatcaataaaaaaaccaggacatatcaacttccccagagtaagcctttgcttgccctcaagtgataacactgtattttactcatttttggtgtgtgtttatcatcatttagctttgcatttgctcattgtatcatatcattttgcaccattttagcttattttgcacacttaggcatttaggatcatcttgcatacatattgcatgttttggtgtgttttcaggtgcagaaggagcttaaaagcattctactcaatccattcactcgatccaggcagccatagaggaggcagcaattcactcgaccctcttactcgatcaaggcaacctcagaagaagcagcagatcaatctactcgccccttctactcgatcctctactcgatccatttactcgaccaagggtgaccaactctacaagacgtgttgagctatcaaagcgtcttcggatcttcctcattccccactcaaccagacatctgagcatacagataggagaggatgaagcatctactcgacaaattgatcactcggagtatagacacaaagacgtagactttgcaacaccctctttactcgatccccaagatggagtattcgcccaagccgcctcaagtctcttgtcttctagtgaatctagggtttccaacattttagtataaatagatcactttgggatttgtccaaaggatgtatgctttatctttcagtttttctttgtgtttatgaatcttaaaactttaattactcttaatctatttcgtttttgcatttgattttttaagtaaagttgtttagcttgtttagatgtacattttggtatgatttcaataatttctgggtttgtgttcttgagaatgttgcatgagtagtgattagggttcttgtggatggattagattagggtaatctcaaggttagttagggggttagtgtttaggtttatacccttctggattcgcttggcccctatgcggtttacgccggctaatgtggagattcgatcatagacgtccagcatccaaaagacgttcaaatggatgtctgacctacgaaatccagagatttgtagactcgaccaagggattggcttgtctgcctattggctttggtagattgtttcttaaacccttctttgcaatgtttcatcaacgagagttgagattaggaagtggtagagttatgggggtctctgtcacggtagtggattgacccggttttagaatctatcgtcatgggtatctatctttcgcctattagccatttgatgaaccctagagttgcccttatcaatggatccatccttagaacttctattagatttttttgtatcccctgatgattgcacttttatttacctgttatttgtatcccctatttgtatcccctgttgattacatttaagtttcttaattttgtcactagttggttctactcgacccattgattgagtaaggctctaaagttctcatttttacttgtttgaatcctgacttaggattattactagaaacccaccatcattataatctggcttgacttagtagtttatgtacacatcttgattgctagcaatacagtggactggattgacaccccctatagctgcatcgacatgtttgtgttttaggggaattgaatgaatctcacacacattcaacataagtaggcctgaaaaacctgcttatcagcagctagtcggtcgttataaaggatgcctcctcatagcatgtgcacaagacgggaacttccaaatctttccattagcttttggggttgttgacggcgggaccgatgcttcatggatttggttctttgagaacttatcagagattgttccagatactgacgatttgatgattgtctcagacatgcatttttaacatatataaaggcgtcagtgtggtgtacccgaaaacccatcatggagcatgtatagtacacgtggagcgaaacatatcggtgttttacgcaaggtacggtgtgtaaagtttattctttcgcgccgctaaagcatatcggattagagattttgaaaactactttgaagagttaagaggtcggagtcccggatgcgcaaagtatttagaggatgttggatttgagcattggacaagggcatattgcaaaggggagcggtacaataacatgactagcaacaactccgaggcaatgaacaatgtcttaaggaaggcaaaagcttatccaattgtctatatgctacagttcatccgagaggtcatcatgcgaaggtttgcagcaaggcggaaaaaagtgttgaagtgtaactctttggtgaccccggaggtagatgaacgtttcctccaagacttgcctacgttaggaaagttcgcagtcatgatgtctgggccatggagttatcaagttacttcaaagagcgttgagcattttcacgttgtactagatgagtgtacgtgtatttgtcttaggtacacgatgttaagaattccatgcgagcatgctctagctgccgcaatacattttggcacaacccgaag

SEQ ID NO: 147700 - DNA, 1264 bp, Arabidopsis thaliana landsberg
atgcagctctttccggtcatcctaccgacactatgcgtcttcctccaccttctaataagtggctctggctctaccccaccgttgactcactccaatcaacaagtggcagccactcgttggcttcccgccaccgcaacctggtacggaagtgccgagggagacggcagcaacggtaaacatctctttacaaataatttgttttttttactcacaatttgtttggtttttactgtaacagacaaaaagtttactgcgaaatcaataataatggaaggcttaattattaatgaaaccgcaggaggagcttgtggttacggatcgttggtggacgtgaagccgtttaaggctagagtcggagcggtgagtccgattctgttcaaaggtggtgaaggctgcggtgcatgctataaggtcaggtgtctcgacaagaccatttgctcaaagagagcagtcaccattattgtcaccgaccagtcaccgtcaggaccatctgctaaagcaaaacacactcatttcgacctcagtggcgccgcctttggacatatggctattcccggccataacggtgtcatacgcaaccgtggcctattaaacatcctctaccgccggtacctcttcgcgctatcttattattttatttgactactatatgctaacgaacaaataatgagtacatttaaatgttttttttcttacattgggaggagtaaccaaataaagaaatcttaacggcgttcttgttttttatcgatggtcccattattttgagctttgactacacataaacacacatatggatctctgacacacttgcacttgtttgttttttgcaaaacagaacggcatgcaaatacagagggaagaacatagcgtttcatgtgaacgcaggatcaactgattattggttatcgcttctcattgagtatgaagacggtgaaggagacattggctctatgcacattcgtcaagtaatatttctcattattaatcattagtctctcccacattttctttaaaatgtatacttaatattacttcatttgtatgttgaattatgaaggcggggtctaaagagtggatagcaatgaagcacatttggggagcaaactggtgcatcgtcgaaggaccactcaagggaccattctccgtgaaactcacaactttgtccaataacaagacactctctgcctccgacgtcatccccagtaactgggttcccaaagctacttacacctctcgcctcaacttctcccctgttctctaa

SEQ ID NO: 147701 - DNA, 664 bp, Arabidopsis thaliana landsberg
atggcagccttggagagggttgagagtgttaatagtcatgttgagcttatggatgattttctagaaatggagaagttagcttgtttaccaaatctatctagcagtaatggtagtatagattctaaagatggttcaggtgatcaaaagtcagaaatggtgattcttgatgctcataccgaccttgaggattccgatagaggtagtccagcagtgatgaaatttagatctagattatcaaaggttcttgaatctgtatctcctgatgctgacatacaaaagatagtgggggatataaaatgcattttgcaagatgtgaatgcttgtatggaccaggaaaagccttctgaggtgcatgttcatcctgaagaagtgtcagatttatgtccagaacaaaatctggttgaagattgtcatttggcagaacaaaagctgcagagcattcaccaagatttgaaaaatgctgcatctcggattcatgattttgttttgttgctaaaaaatgaggtaaaggcgggtcaagacacctctattgagggaaatgattttgtatgagctgattgagggcttatatgtcacgttcaaccatgttttaagcggtgataaaagtatggacgaatttgtttcgaatcttgctaatgtcttcaacgaggcgatggagcgaaag

SEQ ID NO: 147702 - DNA, 298 bp, Arabidopsis thaliana landsberg
  unsure (1)..(298): unsure at all n locations
gaagctgggatcgatgtccgtctctgtgatatcggtgctgctattcaggaggtcatggagtcttatgaggttgaaatcaacggaaaggtcttccaaggtatccaatgtcacatctagattacggctcttacatcaatgtcacattttgacgttaatataataataaaccttaacatgttatgtccttttggcagttaaaagtatccgaaacttgaatggtcacagcattggaccctatcagatacatgctgngaaatctgttcctatcgtanaaggaggcgagcagacanagatggaa

SEQ ID NO: 147703 - DNA, 449 bp, Arabidopsis thaliana landsberg
gtcttccatcttctgtttcaaccactactcatgctactagttctgttagtacaacacaaccatctcttggtgtcacttcgagtagtgggacagcgattggttctccaaacatgccatctgaaatagctgagataattgtaaaggaggtagagatatttgctctcttttgcatttagcttttatggtatgttttgtataatatggtaatgattctcttttggtgtttgaaggttatcctcgtggaggggaattctgagtcacaagagcataaatggagatccctgaaacaggaaaatgaagtgctcaaaaaaagattgaaggtgatgaaagaagagctagaggataaggattctgagttagaacaacgagaagatttgattaatgccctcttggtgaaagaacgatatgcctatgatgagatacttgaagcacagaaactgttgatcagt

SEQ ID NO: 147704 - DNA, 1961 bp, Arabidopsis thaliana landsberg
  unsure (1)..(1961): unsure at all n locations
atgtactgcaaatgcggtgatttgaaggatgcttttcgtatctttgaccagttttcaaacaaagacgttgtttcttggaactctatgattgctggttacgcgcagcacggccttgcaatgcaagcaatcgagctctttgaattaatgatgcctaaaagcggaacaaagccagatgcaatcacatatctaggagttttgtcatcgtgtagacacgcaggtcttgtaaaagaaggaagaaagttcttcaatttgatggcggaacacggcctgaaaccagaactcaaccattactcttgtctagtcgatcttctcgggagatttggtctgttgcaagaagccctggaactgatcgagaacatgccaatgaaaccaaactcggtcatatggggatctctgctattctcttgccgtgttcacggcgatgtctggaccggaatcagagctgcagaggaacgactaatgcttgaacctgattgcgcagccacgcatgtccagctggcaaatctttacgccagtgtagggtactggaaagaagcggcgacagtgaggaagctgatgaaagataaaggactgaagacgaatccgggttgcagttggatcgagatcaataactatgttttcatgtttaaagctgaagatggtagcaactgtagaatgctagagattgttcatgttcttcattgtctcattgatcacatggagttcctctaatattcagggttctctctcattagttttatagtgcataccagatccagatcttttctataatggatcaagttttgctttgaacgttttcaacataacctctattactaatgaaaagactttaatttgtatagttgagtaatataaacacactaatttaataattaaccaggtaatgaaatgaatgtagctgtataatgcggtaaaatgcaccaagagtttctctatgacgtaatgtgaagttgagaaacacacgccatcaaaattttctttggttaataattanaattttaaggtccaagtttgcacgattaattcaaaatttactacacaagattcataattaaggaatcgaatataggaaagtgtccaactggtcctctcttatatacccttctccactaataccgcgctcagaagacgacgacaaaacaaaaaagttgcgagagacagagagaaacagagacatggatctgaaatgggatgattttttcaacgattacgaatggctgatcgtgtttctgaaaggtatggtgaagccagcggcggcgctcgtggtggtgcttttggcggtgattctttcatactcgcagaacctatctttggaaggagaaatgatatactctgtttcccgatcgtttcttcaactctctgttatcggatttgttcttcagttcatctttaaccaagagaactcaggctggatcatccttgcgtatctcttcatggttagtttcaatcaaactcaggatctgctgctctgttttttttaattattctttttatttgaaatgatttggtttccgaacaggtctctgtcgccggttacactgccggacaacgtgcgaggcacgtgccacgtggaaagtacgtggccggattatcgatccttgccgggacttcaattacaatgttcttgctcgtcctcctcaacgtctttcctttcactccgaggtatatgatcccaatcgccggaatgttggtcggaaatgccatgaccgtcaccggagttaccatgaaacagcttcgagatgacatcaaaatgcaactcaacctggtaaaaaaaactataaccaaaccaaattcccggttttattagattttccggtttatttgattttgtcgtgaaccgtaggtggagacggcattggcactaggagcaacgccaagacaagcgacgttgcaacaggtgaagagagcactagtgatctctctgtctccggttttagatagctgcaaaaccgttggattga

SEQ ID NO: 147705 - DNA, 1709 bp, Arabidopsis thaliana landsberg
  unsure (1)..(1709): unsure at all n locations
caaaactccggtgaaaatggcgtcgcttactctccggtgcgattcgacgcatcttttgccttcccggtaatcaaattgaattgtatttctctcggtttcactgaatttgaattgatagtttttgattagatctgtttatcattcggaatttgaaattacgtttgcttatgattcgattttggattcaattggaacacatatctatgtatttaggttttgatggttatgttgtcttcatgggtttttcagtgatgttgtcaagggaacaaaaccatttggaacgagcttggtgtatcctaggatcatatcgaagaagtttaatgttagaatgagagtgatacctgaggaaggagatgtgttctcttcttctaagagtaatggatcatcaatggggattgagttacagccagatttggtttcgtttggaacattagcagctgaaatgattcctacaacaatggattctcctgaagttgaggatgaagagtttgatttagatcgacctactgatggatttgcgtctattcctcaagctattgaagatattcgacatggcaaggtttgtaatagtagcatcgtgtctgcttactgtcttattagaaggggaaggtcttaagtgnnnnnnnnnnnnnnnnnnnnnnnngatggtagttgttgtagatgatgaagatagagaaaacgaaggagatttgataatggcggcatctttggctacacctgaagctatggcttttgttgtaaagcatgggactggaatcgtgtgtgtgagcatgaaaggcgaagacttggagaggttagagcttcctttaatggtaacgcgtaaggataacgaggaaaaactccgcacggccttcacggtttcagtggtgagtaaaagtatgtttttctttggtgttgagaaaaccacaagactcttagtggtgtgtgatgaaaagaatgttgaaaatatttgccaggacgcaaaaaagggaacatccacaggtgtctcagctcgtgatagggcgcaaacaatattaacccttgcatcaaaagattcaaaacctgaagatttcaatcgtcctggtcatatttttcctttgagatacagagaaggtggtgttcttaaaagagcagggcatacagaagcctctgttgacttgactgtgttggccggtttagaaccagtatctgttttatgtgagattgtagatgatgatggttccatggctagattaccaagactccgccaattcgctcaagagaacaacttgaaattaatttcaatcgctgatttaatcaggtacaatacattcaattcaagatcagctactggtgtttggattaagaacactcaactccctctgttactgatgttttcctcttgatttctggtagataccgaaggaaaagagagagactggttgagtttactgcggttgcgcctataccgacaatgtggggaccattcaaagcacattgctttaagtcattacttgatggagttgagcacattgcaatggtcaaggtaagaataaaccctatttgaaaccatgagagacttccgtttcttataaaccatattatgattaaaatacagggagaaatcggagatgggaaggatattctcgtgagagtacacgcggagtgtatcacagatgatatattcggaaatagctctggtggaaaacagttagcgattgcaatgagactgattgaagaaaatgggagag

SEQ ID NO: 147706 - DNA, 395 bp, Arabidopsis thaliana landsberg
aagcttcatcaactgggtctggatgctgctaccccagaccacgggcctatccggagaaccatacattcacagatcaaggattcacaatacgaaagagaatggcctcgggtaaaaagtgactgttgtctcttgtcatatatctctagaagtctaaatttacttataacctatttggttgcatgcagcgatggattgtcctcgacattgaaggaacaactacgcccattactttcgtcacagatgttctctttccttatgctcgtgaaaacgttggaaagcacctgaatttgacatatcacacagcagaaacccaagagcatattaagttgttgcgggctcaagtaagaacaaattaaaaatcctctgtctaatcatctcttctcataaacaagtga

SEQ ID NO: 147707 - DNA, 734 bp, Arabidopsis thaliana landsberg
tttgtcagtgaggaacataaagaactggggaacattttggatattttttctccaagtgaagttaaaaggaacaaggagacaaggtaaggttttggcttttctttatgtttctcactagacatgtaaaagctcaaaaagtttttattcttctcttcgtctttcattgcaggttggagtcgaccaatcattgatcgagctagagaaatctggctacaattcaatttcagatgaggtaaagttcttttgtttccctatagacttggaaaatcatggctcagacatgtatataaggttgtaaagttttgatttttctcttcaggttttcaaaaacacagaagatgaatgttcaaatagcataagaagctgtgaattttcttctttcttttttgtccaatgggaacaatggcagaattgggaaccatgggaaaatttggagccatggcagaagagcagcaagttaaccagatgatcatggataaacaatcagtagaagaatggctatcgcgcgtcaactcgctaataccatccgtcctcagcaaggcaaaaacggttaagaagtttacaggaagatggaagacgatcatctcgaagatcgaacagataccagcttgtttatctgacctctcaagccacccttgcttctccaagaacaagctctgcaacgagcagttgaaatctgtggctaagacgcttagtgaagtgatagagcttgcagagcagtgttcaactgacaa

SEQ ID NO: 147708 - DNA, 1023 bp, Arabidopsis thaliana landsberg
attttgatctgtaccaacatttgcttcatttggctactcagacatctctaacagctgctggttgctaccttagtcctgctccagggtcgaagggtaccaaaattatagtctcatgttctgttgactgtcctttaccatcaaagacagaactcttgaacatttccttcaatgaaactccatctgatgaccttggacaaatcatagcagacgcaaaatcgttttcagaccatgtggctccaaccagcttgtttgaagtccagtttctggatgttgcatctgaatccgtattgagtaaagccagagagctcaatcttctcagcgaatcgacgtatacaaccattggtctactgcagagggatgaaactaaacggtttttaactaaaacagaagagaaatcagtggaattagagcatggaaccaacattccagcttcctctgataaagtacatctttgtctagggcaaaatctctacttcatgaaccgttttctcatcagatggaacctaagtgaccaccaatgtaatgaagcaggctgcagaaattgtccagtgagtactgctacatcaatggaggttcggcacatggttgaatccgactggttatatctaggtgagctttcaaaatgctcaacctcaaatcattctatttcatcctcacaaaaagctctcaggtccttaaagttgatcccagccgctgcaagaaaaagccttcctgtcttgatcaatcactgtggattactactctgcataccagtatgtgaaatcaccattttaaatcatttgttttgtcggatttaactataagaccatagattgattctcttctctgtgttttcaggctattggcttcagttattgttcatgccttgaggcatctgcagtgtttcttccaagagtaccacttggaggcggtcatagctcatttctctagtctagccatattctgtttcattcattcaattctaacagacatttattcacttgtactgaattctcgtgaaacgaaataatatttggtcaagaa

SEQ ID NO: 147709 - DNA, 544 bp, Arabidopsis thaliana landsberg
  unsure (1)..(544): unsure at all n locations
ggcgaaacagagaagcacaggcgacaacaacatttcgagcacttgcntaagaacatgatctcttccttaacccacatgggaggatataaggcaggacctatccaatacgatgaagaggaagatggtatcagagtcatcacactttctggatccaaccttggagccaccatgaagaccgagcttgacaacaatcatggagacagagaccaaaatggcgaccacgagcttgatttcctaagcacttatgttaatagcaacttccaagctgtgaacaactcgattatgataggggccaagtacgagactcatgatcctggtgttcatcttgacatttcgggagatgtggagaaaccttcggtgaagatacctgcgaggagttcaaggggaaagaagggtaagactcctgccagaagtgaccgtcgagaatctgaacatactaattgaatggtatggtatattcatggatcagtgntaattctctttttattttcttgtcttgccttctctaaataatcagagaagtggtgcatgccaaagcacttta

SEQ ID NO: 147710 - DNA, 1996 bp, Arabidopsis thaliana landsberg
  unsure (1)..(1996): unsure at all n locations
atgagttgttacgatcaacttccggagttgacgggaattccccagtgagtgtatgcatttcgcctggtgaaaggttttcaacttcttcagaggcatctacatctgatgccaacagcccgtcgagggaatctacagagattctgccacaggcaacaaatgcaatagtgacttcgaatcggttaaatttaaatggaatttcaatgttccaagggtacgtgtactttgtattacagatacaaattccccatactagtagatatgtaaaatcttaatactatgaatatgtgaaactgaagcaatacaataatctctatacactactacttcttgtcaagttttcagcatttgggtgattgatctattttaattcaatcaggctcattgagcgggcacggaggactgttcgtggctcggcagatgacataggatggttacagcgtgccccggagatgcctcctgttgaagatggaactgataggttcaataaaattctggaagacatcgggtatgaattggttgtagttgcatgttttgtgtgctttgtggccttttcaatatgctgtttaacatcctgttttttactaaatggctgcgttgatctggtttttatatccaggcatggtgtacacaggcttccaaatacagtggtgtacttattggttccaggtagcaattcttattctttgctgccagccacttaaactacattactgtatattaggactctcaaaattagttgaattttttttaggtcttttcagcaatcatggacctctatattttgtggatacgaaaacgaaattctcaaagatgggtttggcgtgtcatattgcgaagattcacagcgaggtaatcataactaactcaacttagtacagttacatttggtgtatagcatactaatatatggagaaatgtttatatatcagtcctcggttgagaaaaatgcgagagagataaaggaatacatagaggaactctgttggggatctaataagcgggttctacttcttgggcatagcaaaggaggcatagatgcagctgctgctttatcactatactggcctgaactaaaggataaggtcgctgggttggtactggcgcagagtccatatggtggaagcccaatagctacagatatcctccgtgaaggacaactaggtgattacgtcaatttgagaaagatgatggagattctaatctccaaagtcataaaggtttgcaacattcctgatctaacaaagtcatttcagttgcattatatcagcttcttgtgattgcctgttaaaatccttagttaggtggaaccgagaaactagggataaaccaaaacttattttgtttctggattctattgctctgctgatctttctgatgaattccttggaacattgtgaagggtgacattcaagcattggaagatttaacatacgagagaagaaaagaattcttggagaatcatccgcttccccgagaactccccacggtttcattccgcacagaagctagcattagcccagcggttctatccactttatcacacgtagcacacgctgaacttcctctgacaaaccaagccgcaaaactgccagtggtaatgccacttggtgctgcaatggctgcttgcgctcagctacttcaagtcagatacggtgaaaagagtgacgggctagtgacttgctgtgacaaagaggatactggttctgtggttgttagacccaaacggtaaactagaccatgcctggatggtgtactcttccttgaacgaggttcctttaaaagctgatgctgctcaagtttgtgaagcgctcttaactttgcttgtccnagttgagcaagagaggcaacaaaaactcgcaacaaaaatcgattgataaaccaaattgttttatttctactttcgtcttgagacttcaaattactgtatttgtttctatctttttgttttatttcttactaatttactatcaggtttgaatcacacgataacaaaaaa

SEQ ID NO: 147711 - DNA, 1323 bp, Arabidopsis thaliana landsberg
aaccaaaaagatggcctcggcgatggttacatcgctcaggctgaggccaaacttcaccgcagccacgtcaccctcctgctctacataccgccggaaatgtcaagtaccgacccgccgtaattctcccggtaaataatctccgtcctttgattgagacaactatggcggaaaatgtgtggttccaatttttttttttattattttcactgaattttctgtttcttatatttttaagtgttgtcctgcattttcctttagaaacatatttaaagtccaaaacttggtttttgtgttatatgattcaatggtgggtttagtgtcactatggctgctttgtggaattggtttattagggtttagggaataatacaggagactacaagaagctggaggtaacattgggtgaatacggtgttcctgctgtggttgcagctgtatcaaggcttgattggtttagaaatgcagccggtttggttgatccagcctactggcgtggcacgctccgccctcgtcctgttcttgattggtactgattgctcaatgaatgtatcacttgttttgtgttttgaattttttgactggtttcaaatgatgagtcttttatatggttgatcaggtacttgaatagaattgatgatgcagtccgtgaagccaatgagctagctcaaggtaaatctcacatttgatttgaagctttttgttcttggatcagacttagctgctagtttcagttgtgaatcgcggtaaccataaaactcggtagttttgcgtcatttataggtcaaggattgtgtttgattggacactcagctggaggatggcttgctcgagtttacatggaagaatacggaaactctgatatctccttgttgttgacacttggtacgcctcacttgtaggtaacatacatgtcgattacattttttagacctttcaagagatattgcttcgatgttttgaccatgtatggttttgtatcccgtttagaccaccaccgagaggacttccgggggttattgatcaaacaagaggtcttctctattatgtcgaagagaattgtgcaaaagctgtttacactcctgagctgaaatatgtctgtatcgccgggaggtaatgcttcttctagaaaccatatatgtgtggaacctctgtccaatctgaatttagtacttcatgtgtagatacattcgtggagctcgtttggttgacaatgcagatgcagatattgattctgatgtaactgttggaatcgacagtggagaagggatttcagaacttgctatagcaagcaacaagaagagtggtactttccgtgctcgtttt

SEQ ID NO: 147712 - DNA, 415 bp, Arabidopsis thaliana landsberg
gtaaagctgtcggagcaatcaaagattccactaccgtaagtatcgccaaggtcaacagcgaattcaaggttaggattacattctgaaactttcaaattttttggtaacaaaaaaaatctgtaaatgactaataaaatgtatatgaaatcgagatatataggatttggatgttgcgatcgtaaaggccacaaatcacgtagaatctgctcccaaagaacgtcacattcgtagtaagtttcttaaattattcccccaaacacttgaatggggatacgatctttatgagagtttttatcattctatccaggaatattctcggcgacatcggtagtgcaaccacgagcagatgttgcttactgcattcacgcattagccaaaagattgtcaaaaactcgcaattgggttgtgagttcta

SEQ ID NO: 147713 - DNA, 484 bp, Arabidopsis thaliana landsberg
atataggtacagcttctgtaatctgttagaatcatagatatattcaaaacaaaatgcttttctatttccataaaaaaaaagtttcacactttagaagtgagtctttctatttgatcctatagatagcctactctcaaaaaattagcaaacgaggtgggcaaacaaaagtcattaatgtataagatccctttggggagaaattggaaagcaaagagttacccaaggtttcccattattattcctccagttggaaaatccggtgcaggcatgtattccagcagttcttgcagctgcccagacgaagaagaaagtggaaacaaaatcttatgagttgtctacttataaaacagaggatttttcatgtaaaacaaaagacccacaaattgataaatcacagaaaaacaaaggggagatgagtgataccgtcgcttctggattatggattaaagcgcaaagcacgtctaccaactccccaagattatga

SEQ ID NO: 147714 - DNA, 2414 bp, Arabidopsis thaliana landsberg
caaagcaaccccgaagcaaatactccgataacccaccggtattttcctcgttagcgtctctttacccatggtggaagccctttgttttcttctccggtagtcgagctcgcatcgactggaccgattacaacgcaacccgagagctcactcgtgtcctccttctacatgaccatggcgtcaactggtatgatttcaattgtacaaaggaactagcttttttgctctcaagaacagttagttatttaccaaagtcttatatatataggtggattcctgatggacagctttgcccaactgttcctaatagatcgaattacattcattggatcaatgatcttttgtcctctgggatcattcaaagtttgggtggtgatggaagtaaagtaaagggctttgacattggtactggggctaattgcatttatcctctccttggtgcatctctttttggttggagttttgttggctcaggtttttcttcttcttttattatacttcatctgcattatactagcttctttagcagttggtgctatgttctcaatttggtgacaatgttgttttgtatacagattttactgttgtagctctagaatgggcagagaagaatgttcaaagtaatccccatttttcaggccttatcgagatcagagactctaaagttcctccacagtgttcctctgtccctgaggttggaaatacagggagtgagaaaaccatacaggaggaagctgaaatttccaccacggttcagtctgattatcatgacaacaagagttttattgaaccagctgtactactcggtgttgtcaaggaaaacgaaacattcgacttctgtatgtccaatcctccattttttgagacctttgaagaagcggggctgaatcctaaaacttcatgcggtggaactcctgaggagatggtttgcaatggtggggagcaagcttttgtgtcacgtattatcaaagatagcgctgtactgaggcaaaggttcaggtaaattgtacccaaataaacctttggatcttccacattctggttttccatccatcaggacttatcgttttgtgaacatgtttaatattaggtggtacacttcaatgcttggaaagaaggctaacctcaaactcttgatatctaagctttgggaagtgggagtgaccattgtgaagaccactgaatttgtccaaggtcaaacatcccgttggggcctcgcttggtcgtttatgcccatagctaggaagattatagcacctcctgtagtcaaaaagagcgttctttcttttatgcttgaggtattctatctataactttcgtcatcctttacttatatttgctctgtaactatataaaagtctcgggctttacaaaagccttacattctttatggtggatttgtgtgtttatagtgcattaaacggcagtacagtgccgtagatgtgctgcaatcagttgaagaattcttcaagagctgtggcgcctcgtgcaagttaaactcttctacattttctgttgacgtaagtgcactacctgtattgttttgtcttgccatccaatcttgtttctactgtatctcaagctcaatggagtttctttctattgttgtgcagattgttgcatctaatgaccagtgcaaaacaatctcaaagaatgacattgcagatgtagatagtgtaagaagccatggatatgaaaaacagtcactggatggctccagtttgcaagtccctaaatataacctatctttccgcatcttggtatgtttggatttcatttgagaaatcccttgcaattgccttcaccttttcgaattgtttatgatggagaaacttctattacaggtgttccaacagatgccaggaacgttgcttataaaaggatcattgcagcagaaagatagtcctctctcaggttagtcattttgctcggtttccctaagttgctcgaaaatttttcacttctttattcatgaatctgcaaaagctttggttctattcatctgatctcaccaaagtcgcgaagtaccaaaactttcgctggtagttaccaacgtcaagacaactgaattgtcggtttaattttgcatatgcaggattgttctccggggtctttggttcgttggaagaaagtttgaagtccaaattttgccggtaacgagtcccagggtactgttctgacttgaagaatggcatctgtcaaaaactaaatgaaaatgaatatgaatcttcaaatcttagtaaaatttgggtactttttgacacatgacatgttcttacacacaaaaacaagccgtcttttgaattgattcctacataaattgagacaattactctcaacagaggcaagcaaacttttgtcagctaagattgttgtggatgaaaagtgttgcatagcagaccactcgtgtttctcaa

SEQ ID NO: 147715 - DNA, 430 bp, Arabidopsis thaliana landsberg
gtcctataaactttttattttccttttcatgtgttgtttctagaaaacaaaatccagattattataattcttgatatcacaaaaatgtagaggaaagggaccatttctaaggaaaagtaattttaaaatccctttatctatgggttgtgtcgtgtgtcggtgaagagtaagaagtcgagagacaaagttaaaagtagagaagaaaatgagtgaggagaagaggaagcaacacttcgtgctagtacatggtgcgtgccacggcgcatggtgctggtacaaggttaagcctcttctcgaggctttgggccatcgtgtaaccgccttagacctagctgcttccggtatagacccaaccaggtcaatcactgacatttctacatgtgaacaatattctgagccattgatgcagctaatgacttcattgccgaat

SEQ ID NO: 147716 - DNA, 956 bp, Arabidopsis thaliana landsberg
caaaatccatggccaagaaaggtatcccagagtggctcaacagttctctctggtcctcctctcctcccatcgacgatcgccacctccgcaatcctcccgccacttccatcacccctccatctcctccgatcgtcgagcgtcctcctttttcttcctctccctccgcgatttccaccgcaccagctcctcctcttcctgttcgtcctccttccaaatctgagattaacgatttgcagaatgggagtggtaacgatggtgctggaattgaaactcccgcagtttcttctgttgaagatgtttctcgaaaagcgcaggtcgtggctgaggttagttgcttaaaatcaacctcatgctctatgcattttgattgatttctctttgtgatatacttacatcttgattttttcagttatcgaagaaggtgatagacttgaaggaattgaggaagatagcttcacaaggtctacctgatgatgctggaattcgatccattgtttggaaggtaacgccattcgcatagtttcagtctagcttatggatcattattgttactgtgcttttagtaatgcaaatctattttgagttgttgaattttctttgaacttgcttgtggttttcatgaaatccttaagagtgtatggaaatggtacatgtttctagtgttttattgtttttaagaatgcaatttaagcaagatgaagaagatagagtttcttctccgattactaattggtgttcaaaaaaaaaaaaaaaaaagaatgcaatttaagcaagatgaagaagatacagtttcttctccgattactaattctgtcagtttatgcttcatgctgttttcttgaatttgacagcttttgttggattatttgtcaccggatcgctctctgtggtcttctgagttagctaagaaaaggtctcagtacaagcaattcaaagaggagcttctgatgaaccct

SEQ ID NO: 147717 - DNA, 1018 bp, Arabidopsis thaliana landsberg
atggatgggaattttccacaaggaggtgtagttcgtagtggagcttcatcttatggaggatttgatttacaaggttctatgagagttcatcaccaagactccatgaatcagcagcatcgacacaatcctaattctagaccacttcatgaaggtcttccctttactatggttacaggtcaaacctgtgatcatcatcagaatcagaacatgtctatgtctgagcaacagaaagctgaaagagagaagaattcagtgagtgatgatgatgaaccaagtttcacagaggaaggtggtgatggtgttcataatgaagctaatagatcaactaaaggatctccatggcaacgagtgaaatggactgataagatggtgaagttgttgattactgctgtttcttatataggagatgattcgagtatagatagtagtagtagaagaaagtttgctgttttgcagaagaaagggaagtggaaatctgtttctaaagttatggctgagagaggttatcatgtttcgccgcagcaatgtgaggataagttcaatgatttgaataaacggtataagaagcttaatgatatgcttggtagaggaacatcttgtcaagttgttgagaatcctgcgcttttggataagattgattacttgaatgagaaagagaaagatgaagttaggagaatcatgagctctaaacatcttttctatgaagagatgtgttcttatcataacggaaacagattgcatttgcctcatgaccctgcggtacagagatctcttcacttgattacgcttggaagccgtgatgatcatgataatgatgaacatgggaaacaccaaaacgaagatcttgatgatgatgatgactatgaggaagatcatgatggagctttaagtgaccgtcctttgaagaggttaagacaaagccagagccatgaagatgttggtcatccgaataagggttatgatgtcccttgcttgcctcgttcccaagctgatgtgaatcgaggaatatcgctagata

SEQ ID NO: 147718 - DNA, 2074 bp, Arabidopsis thaliana landsberg
tccacattgtcttctctctcctcacatcaaaaccgcctccatttctcattctctctctctctaaaaaaccaaatccagagtcagagaaaatctgtgatggctctttccaacgcctcttctctctccaccagatctatctacggcggtgatctttctcaccgtccaagcaaccgtcaatcatccttcacatttcatcccgccgtcaacaccaagcctaaatccgttaacctcgtcacggcggtacacgcggctgagccagctagaaacgctgtttcagtcaaggaatccgttgcgtcttcttcgtctggtgcattgaaatggactccagagagctggaaactgaagaaggctctgcaacttcctgattatcctaacgccaatgagcttgagtctgtgcttaaaacgatagaggcttttcctccgattgtgttcgccggagaagctaggaatcttgaagagagattggctgatgctgctgttggtaaagcttttcttctccaaggaggtgattgtgctgagagtttcaaggagttcaatgctactaatatcagagacaccttcagggttctgcttcagatgagtattgttcttacattcggtggccaggttccggtcattaaggtcagatcttcgaattcaatctttcttgttttttcttttgagcggaacttgagagaatttgtgtgtttaggttgggaggatggctggtcaatttgcaaagcctagatctgatgcatttgaggagaaggatggagtgaaattaccaagctacaagggagataacatcaatggtgatacttttgatgagaaatccaggattcctgatcctaataggatgattcgagcttacactcaatctgcagctactttgaatcttcttagagcctttgccactggaggttacgctgctattcaaagagttactcaatggaaccttgattttgttgaacaaagtgagcaagctgacaggtacccaactcatcaactcaattttgaaagcaaacttttctagatgaattagtgatggtgatagcagctatcctaggttatgtaaggtgctaaaggttttgctgtacaggtaccaggagttagctaacagggttgatgaggccttggggttcatgtctgcatgtggacttggcgcggatcatccacttatgactacaactgatttctacacatcccatgagtgtttgcttctgccttatgaacagtcccttacaaggttggattcaacttctggtctctattatgattgttctgcacatatggtctggtgcggagagcgtaccagacaattggatggcgctcatgtcgagtttctcagggggattgctaatcctctgggcattaaggtacttttaactttttcaaagaaaaatacaaaattcaacgcgtaggtagagcgataatatgcagcttcttactgatatacttaaaccaatgattaggtagatattacttttggtttatgataaagcaaaacagagtaacatttgagaggtttatgcttggtctcgtagcattttttgtttttttattctcttatcatgcaaatcagacggttgattttgattgtcttttcttcagtgacagattggtagctggtttgatttgccactgaataacgagagtttattaagttgagttttaagcggaatcgattgaataaccaaaactcttgttgcaggtgagcaacaaaatggatcccaatgagctggttaagctagtagaaatcctgaatcctaataacaagcctggaagaatcactgtaattgtgagaatgggtgctgagaacatgagagttaagcttccccacctgatcagagcagtccgcagatcaggccagattgtgacatgggtctgcgatccaatgcatggaaacaccatcaaagcaccttgcggtcttaaaacacgtgcctttgactcaatactggtacacacactttataagctaaacctctcataagcataacatagatttgccataacatagataaaaaaatcctgtctttttctacaggctgaagtccgagcattccttgatgtgcacgagcaagaaggaagtcacgcg

SEQ ID NO: 147719 - DNA, 1489 bp, Arabidopsis thaliana landsberg
  unsure (1)..(1489): unsure at all n locations
ttgaaattgaaaatcttaaaccacaaaaattagaaatggagcggaaagcgactgagtaagatctttcaccttctatataaaccttagttctgctccggcgacatcgtcgggataccgctagtgattaacggtggttatggataccctccgattcgagttaagctcagcttccttcacttccgccgtcaccgcctcttctttacacagtcagtcacggtatttcttctcctcagtgcaactcggccgagtcggctcatcatctccggcgatcacatcggtctcgaggacgacagtgaatgaaatctgcacggcggatgaacttcactacgttcctgttcccaactccgattggcgcgtcgctctctggcgatatcttccttccccaaaggtaccggtatatagagtcatgtaccgatgtgtccatacgtataggtgtatatgtatacgtattatcatgtttctacacttacaggcaccgaagaggaaccatcctttgcttctattgtctgggattgggaccaatgctgttacatacgatctttcccctgaggtgattatgatttagttattnttaggcgagagcttataatagtgttatagtgaaatggattcttgtaactcaagttttgtatttggaagctaaaaccttcttttgtgtttctgtggatattcatatttgtagtgttcctttgcaagatccatgtctggatcaggatttgatacatggattcttgagctccgtggagccgggctgagttctctcagtgttgatacaaagcttggtaaaggcaataaccagcagcggatagtctcgaatctattggagaatttcataagtgtatctgaaaggctggaaaatgttcttgatggaggttagttgatccattttatactgtcgatttggttttgttctgttttaagaacagagaagagaatcttggtctagttactgagaaagaacctcctacaggttccaagatccttgggatgcaagaccgtctatcaaagagagcgggagatttcaagcagcggtttgaacttatccctcattacaattgggattttgataactatctagaagaagatgttccttctgcggtgaggtgacacctcttgtgttgttttccttctgtagaactgaaccaaaaaaaacatcaatttgacattctgttggagttatatgtctaattattatatgaaatgttggtctcagatggactatgtaaggactcaaaccaagtcaaaagatggaaagttgctagcagttnnnnnnnnnnnnnnnnnnatcttgttatatgccttgctctcaagatgtggtaagcttataggctgatgatttctcttaaaatgtaatgctcagattttggctgaatcatgtttcttcactaggctttaaaggaatggattcaggtttggctggtgtcgccactcttgcatcaacatttgactattcatcctcaggaacactcctcaagtacctattaccaat

SEQ ID NO: 147720 - DNA, 759 bp, Arabidopsis thaliana landsberg
ggggaagtatccttttggtgattacattgcttactcaaatgctacgtttacaatgagtgaagtcaagcatctgtggcgacaaaatggctgcgtgaagaaatacaaaaggcggcttgttatgagattggatgatttcgagaaaccggctaagagtaatgttctatgcagtaattggaagaagtgggaagaagctattatatggtcagttgaagaaaagaaagtacagaagatacaactttgaattcattttgtgaaagttataatcattactgagtcgagcatttggttttcaggtttcaaggcacgacagacgctgtggcagctcagtttttcctcaagaatgtgcatcctgagatgagagctgctgcatttgagctatttggagagcaaggaaactcggcaccacgaggtaatgtgtttggagagttgatgatgagtctcatatctcccacaaaagatgttaaagaagcagtggactgggttctacacgagactggggatcctgatatttcagtgcacatgcgaatgttgatgagcaagtatgttaaaacgtgcatctaggtttgtttttttagttgttgagcttgttgactaagtcttcctttcatgtttttctccagatctgttagacctatgcgtgcagcgataaactgtctagggaaagcaattaacagacttggcataccgaacccgagagtggttatagtgtctgacactccatctgtagtgaaaattatcaaaacaaatatcagcaccatc

SEQ ID NO: 147721 - DNA, 1522 bp, Arabidopsis thaliana landsberg
ttcggaatctcagaaaatcaaaatgggtggtggtggtgatacaacagataccaatatgatgcagagagttaattcttcttctggtacatcgtcttcttcgatccctaaacacaatcttcacttgaatcctgctcttatccgctctcaccatcacttccgtcaccctttcaccggagctcctccaccgccgattccacccatttctccttactctcagatcccggcgactttacaacctagacattctcgctctatgtcgcaaccgtcttctttcttctcctttgattcattgccgccgttaaatccttctgctccgtcggtttcggtgtcggtggaggagaaaaccggtgccggatttagtccttcgttgcctccgtcaccgtttacgatgtgtcattcttctagctctaggaacgccggagatggagagaatctacctccgagaaagtcgcataggcgttcgaatagtgatgttacttttgggtttagttcaatgatgtctcagaatcaaaagtctcctcctttgagttctttggagagatcgatctctggtgaagatacatcagattggtctaatttggtgaagaaagaaccgagagaaggcttctacaagggaagaaaaccagaggttgaagcagctatggacgatgttttcacggcttatatgaatcttgataacattgatgtcttgaattcttttggaggtgaagatggcaagaatgggaatgagaatgtggaggagatggagagtagtagaggtagtggtacaaagaagacgaatggtggaagtagtagtgattctgaaggagatagcagtgcgagtgggaatgtgaaggttgcgttgagttcttcttcttcaggcgtgaagagaagagcaggtggagatattgctcctactggtagacattacaggagtgtttctatggacagttgtttcatggggaagttgaatttcggcgacgaatcatcgctaaagttccgccttcttcatcagctaaagtttccccaaccaattcaggtgaagggaattcaagtgcttatagtgttgaatttggaaacagtgagtttactgcagctgaaatgaagaagattgcagctgatgagaaactcgctgagattgtaatggctgaccctaagcgtgttaaaaggtaataaaatagtgatgcttcattagacattttgatgttgttgttgttgtgacttgactgttttgatttaaccatctcgttagaatcttggcgaaccgcgtatctgctgcacgttcaaaggagcggaagacgcgatacatggcagagttggaacacaaggtgcagacacttcagactgaagctactacattatcggctcagctcacacatttgcaggtgcgagacaaaacaacaaactatcatgtttgaataagtctgtagtcttatattgtttcctttggtggctcagagagattctatggggttgacaaaccagaacagtgagctgaagtttcgtcttcaagctatggagcagcaagcacaactccgcgatg

SEQ ID NO: 147722 - DNA, 598 bp, Arabidopsis thaliana landsberg
  unsure (1)..(598): unsure at all n locations
agacttgttactacacatcggtttttgatcaattaaacaatgatgaggtttgcctttgttgaatttggtttttaccttttcctgtatcaagagacgaattgaaatctgaagaatatcaactactttcntactgaatcacaggcttcaggaaacaagctagcattaacagcattgtactcgctagaatcaatcatttccaagcggaaagaagaatcaacagttcctcaagaaggtaaaccatcatggactcgacggttgttgacggatgacgctctgctttgctcaaagatcaggtactttgtcggttatctgtataattgaatttgagctatagattcttatgaagcttattgggatattcggcttcagggaagaagctgacgagttatgcagaacactggaggataatgaggaagtttcaagaacaccatcagagatggctgatgttttataccacgcaatggtgcttctatctaaaaggggtgtgaagatggaagatgttcttgacgttctcaggaaacgcttctctcaatctggaataaaggaaaagcaaaaccgtacaaagtaaccattttcttcgattgggcgtttagcattt

SEQ ID NO: 147723 - DNA, 260 bp, Arabidopsis thaliana landsberg
tcaatacctgatcccatggccagggccacaagcgacattctcgatccagaggccgttagtgccgggaccgatggagacccaatcatcgccggtggagattttggagttgaggatggagacggtagatgatgactgcacgtggatcccatcagtgtttggactgtttccgtctgcagaaactttgactccgtcgagctttacgttactgcagccgttaatcgcgacgtgaaacatctgactgttaagtgacgtcagcccgg

SEQ ID NO: 147724 - DNA, 1800 bp, Arabidopsis thaliana landsberg
tctatatattgtccgaagaaacaaagtcaatatgtcgtcttcatggatttcccgaatgatgttaatgctgctcctttgcaggaacttccctggattcctgaacattgcgacatttccaaaggggatgacttgtcttcatctggtaatgagattggtccagtggctgaacccaacatttcatcaggaaaagttgtatttaatcagacaagcaaaacacagtcttcagagaacaaacgtgaggacaaagagccgaacatctcgttgatgtctcttagtaagtctaagccaaatgaagagccaaaaacatgcggtgaagctgatggaaaggttagtccatgtttaaccaacagaaactctggtcttaaaagtttgtggattagtcggttttcttctaaaggttcgttccctcagaaaaaggcaagtgaaacggctaaagaggccaatgcttcagcctcagacgcagctaaaacccgtgattcacggaaaatgctggcagacaagaatgttataagacccagtatcagctcggtagatgggcccgataaaccggacactgtccttcctatagtttcgtcaatgagaatagagtcatcagaagcaatggcttctttgtttgctagaagattagaagcaatgaaaagcatcatgccctcaggttctttagctgagaatgcagaggaggaacagagggatctaatttgtttctactgcggtaaaaagggtcattgtttacgggattgtttggaagaactgatactgagctcagagatctagtacagaacataagtgtgcggaatggaagagaagaagcgtcaagtctatgcattagatgttttcagcttagtcactgggctgcaacatgcccgaatgctcccctgtatggttcaggagctgaaggtagagctatgaagaacgctttagcttctacctctggcatgaagctgcccataagtggtttcacagacgtaccaagggcggtctttgatgctgttcaagtgcttcgcctgagccgcacagacgttctcaagtaagatctaattcacacctaaaagactgtttcccttgtcacattatgaggctttaacatcttttgacatttcatttcagatggataaacaccaagaagtctgtatcgggtctcgaagggttcttcttgcggttaaggctcgggaaatgggaagaagggcttggaggaacagggtattatgtagctcgcatagatggttggtacactttcatataaatcaatactcaaactcgcgtatttctcgaatatttgcaactgaaatatgtttgttttaaccaggggacacagagggacaaagctcaaggagacattcagagaaaagcttaatttcagttaaggttaaaggtgtgacttgccttgttgagtctcagtttatctcaaaccaagactttcttgaggtatataataaaatttgaccaattatgtcaaaagttttgaaatttgctaatttgctaagttttcatctgaatattttgcattaatttatctgagcaggaggagttaaaggcctggtggcagagcgcggggaaaagtgccggaacaagcggctacgacggcatcccgtcggcggaggaacttagtcggaaaattcagcagagaaaaatgttaggcttttaggacatttgttcaagtagataaatgtttttaagttataggttttacgattacccgtgtattttttcggttgaaaaggagagtgtaaatttcttagttcagagggcatcgaatgtctcaaaccatacaacaatctaaaactggatgtccaatctatt

SEQ ID NO: 147725 - DNA, 986 bp, Arabidopsis thaliana landsberg
cggcttcttcgagttcttatacttgatgttttctcttttgccagcctcagaagcatgtttgagagttctcaattcaaagagaacttatccttgtttcagcaacttgtggcagatggtgtttttgagacaaattcgtcttatgcaaaacttgaagacattaagacacttgcaaagcttgctttatcagatcctaacaaatcccatttgttggaaagctattacatgctcaaggttttcatcatatactcttcttgaaaaaatggtttctataccttttgcttttgttcacttaactctttgcttcatgagcagagaagagagattgaagactgtgttactacaacatcaagggtctcaagcttgagtccatcgaataataatagtcttgtaaccattgaaagaccttgtgaaagcttaaaccaaaacttctcaggtcacttaagattcttgaatcatgtcaattcataactttctgctataatatctatctgtttctgattatattgagttttgcattctccagagacaagaggtgtgatgagaagcccgaaagaagtgatgaagattagatcaaagcacaccgaagagaatttagagaatagtgtatcttcctttaaacctgtgagctgtggtggacctctggtgtttagctatgaagataatgatatttctgatcaggatcttcttcttgatgtgccgtcgaacggctcattccctcaagcagagcttctaaacatgatatgaaagaagataaagtttctcaaactcattggttaaactcattgtgtttctcagaacaaagacagactttttaaggttatatatatatatatctctgttgaagagaaaactcttttgctctttaggcttttctgagaaaatgtggccaaatgagatttttatgcattagaaattgcaatttgcagatataaaaaaaaaggaatgatttttatgtaagggctctctttggtggtcttactatatat

SEQ ID NO: 147726 - DNA, 2417 bp, Arabidopsis thaliana landsberg
gccatatgtaagactgcaaagaatatagcaaaaccgatcattgaggagcagataccaaagtacaagattgactctgttgaatttgaaacacttactctaggctctctaccccctacatttcaaggtcggataatcctttcttctcatctttaatatctccttgaatgtcctgtttgcatagtggaactaagaactggaggatggatggtggtgaaatgcgaaagatgattatgaattgattccaggacttacgactattattcttctctttgcagggatgaaagtttatctcacggatgagaaagagttgattatggaaccatgcttgaaatgggccgcaaatcccaatatcttggttgccatcaaggcatttgggttgaaggcaacagttcaggtaattatgctgccaagtgcttaatcaaccttaaagaaggaacgacctacttaatattatcagtcatgattgtccctcacttaccaaggaatttttgtcaggtggtcgatctgcaagtttttgctcagcctcgtatcactctcaagccattagttccaagtttcccttgttttgccaatatctatgtgtctcttatggagaaggtatgtggtataacctttttctttataaggtcgatttgtgtagtagtcagcctcattatcagatctttggtagagattttgtgtttttgactgatccttgctactatggcagccacatgttgattttggactgaagcttggtggagcagatcttatgtcaatccctggcctctacagatttgttcaggttgatatctttctcttacatacatcattcaaatccctgacttgtatgagtaagaatttttttatgagggagaggtatgattgatcattatatgggctactcattctatttagtctagttttatgaagagtatttgtttcaatctgttaaggctgaagggcagatgaaactgtgacatttcgtttggccaatacatatgtatttggacattaaatctcttatttggtgaaagttgtttggtctttttgcttttacgtttctgctggatcaaatattcatttgtagttccattgctgcgttaattgtttcaggagcaaatcaaggatcaagttgcgaacatgtatctctggcctaagacccttgtagttccaatccttgaccctgcaaagtatgccattctgcctttatcttttgaatagtcaatccatgtcttaaatttaattatgctgagcaaatcttaatttttaaactgcagggcgttcagaaggcctgttggaattgtccatgtgaaagttgtgagggctgtggggctgaggaaaaaagatctgatgggcggggcagatccattcgtgaaaatcaagctctctgaagataagattccttctaagaagacaacagttaaacacaagaatttgaatcctgaatggaatgaggagttcaaattctcggtcagagatccccagactcaggttctagagttcagtgtgtatgactgggaacaggtaaagagctatcaaaagggtgactggtgccttggagtgggtatatatgtaatatttgttttagcaacgcaggttgggaatgccgagaagatgggtatgaatgtattagctctgaaagaaatggtgcctgacgaacataaagcattcaccttggaactgcgtaagactctggacggcggtgaagatgggcagcctcctgacaagtatagggggaagctggaggttgaactcttgtataagccattcacggaggaagaaatgcccaaaggctttgaagaaacgcaagccgtgcagaaagctccagaaggcacaccggctgctggaggaatgcttgtggtaatagtgcattcggctgaggatgttgaaggaaagcaccataccaatccttacgtgcgcatctatttcaaaggagaggagagaaaaacaaagcacgtgaagaagaacagagacccaaggtggaatgaggagttcacctttatgctcgaggagcctccagtccgtgagaagctgcacgttgaagtgctgagcacctcttccaggataggtctattgcatcccaaggtaacacactcgtttcgctcagagtaactaacactagcaagtgttttgtgttggtctaatctagaagtggttgttgatggacaggaaacactggggtatgtggatattccggtggtggacgtggtgaacaacaaaaggatgaatcagaagtttcaccttattgattctaagaacggaaagatccaaatcgagctcgagtggcgaactgcctcttgatttctgagttgattcgagaacaaacaaagagataattggtttgatgttgttaaaaactatgtgttgttgtacaaaatgggctttaactcttaaaaaccaacattcagatttgcagagccttcttttatttggat

SEQ ID NO: 147727 - DNA, 733 bp, Arabidopsis thaliana landsberg
atctggtaaaagtagttaaatgatgttcctaagacaacctggtattgccctctcaatgtaaggattctgtgattatcaaacaaaaccaaatcttaatttaagtttgtaaattttgtttttctttaatataacaaaagtcacgatttggcgagttatatatatactcccatgcagaagagaaaagcttagtcacttttgtttccggtatttgaccggatttgtgaatattctcgtctatgtacgagatcaataaattccggcttggagtcggactgttcctaccgtctatgtccggttctctgtctcgctcttagcgagattcgatctctattctatctatacatcttcaccgtatttctttgtttatcttccaatttctctctgtttccccaattgatcgaggagtaatatcttcatcactctccttttgctcaaatcgtgtgagcaaagatggatcttagctacaccaaattgggtgtaactggtggtggagcttccccggattggtgttaccaagagaattttgaagcaactttatagaatcgaaccaaaagaatttcggtgctatctatctttcggattggagatcggcggaagggaaaaggatttacatcgttctaggacagatcgacggtggttagtcagaatacggcgatgtccggcaacgttaacggtgatgcttgaggagtggacgcgtgggctggagcaatatacgtcttctacacgtgtctaa

SEQ ID NO: 147728 - DNA, 1213 bp, Arabidopsis thaliana landsberg
agggttcttcttcttcttcttttttctctaaactggaaaataaagaagaaaagaacatggatttgcattcttgtctaaactcatactttcttttgctcctcctctgtcttcttaatattaccaccattaactcaacgaagccattagaacaagaaacagtgctttttggcggcaactttccggctttttatgttattggagattcattggttgattcaggaaacaataatcatcttacaacgatggtcaaatcgaattttccaccttatggttcggactttgaaggtggcaaagccaccggccgtttcagcaatggcaaaacaattgctgattacattggtaagagcaaaaaaagaatcatgataatgttttaaattactaactcttttataaggatttatgttctatcgtgtgattaactacgtaaaatataatattgtcacatacgaattattagtatatatataatttgtttatatatatatttctgatatagtccatttcttatatttaaattattgaagaagtcttaaacgtgttcctgttatgttcatttgattcagctatctactatggtcttcctttggttcctgcttatttgggattatctcaagaagaaaagaatagtatctcaactggtattaactatgcttctgctggctgtgggattcttcctcagacaggaaggcaaatagtaagttttagtaatattctacaaaaaaatatttgcattattggtttcaaaagaaaaagtagtctaatgggttttatttgtatgaacagggaacatgtctctcgttaagtgtccaagtcgatatgttccaggagaccatcacaaacaatctgaagaagaacttcaagaagtccgagctccgtgaacacttggctgaatcgttgtttatgatcgccattggggttaacgactacacattcttatttaatgaaacaaccgatgcgaatgagtttgcaaacaagcttcttcatgattacttgcttcaaatagaagtaagaggaaactaaaaacatttcatttttttcttggccactactaagacacatttaactaaaaagattttgatttttgttgcagagattgcacaagttaggagcaaggaagttcttcatcaacaacattaaaccattaggatgttacccaaatgttgtagctaagaccgtgccacgtggaagctgcaatgatgctttgaactttgcg

SEQ ID NO: 147729 - DNA, 606 bp, Arabidopsis thaliana landsberg
cattctcgtaagcgtgaagtttcaaagtatcaggagtgcagctaaggtggttggaacagtaactacagttggaggaatcatggtcatgacacttgtaaaaggtccagctcttgacctcttctggactaaaggaccctctgcacagaacacagttgggaccgatattcatagctccatcaaaggtgcagttttagtcacaattggttgcttcagctatgcatgtttcatgatactacaagtaaggatattttcaaaaaatataaaaaaaaatacacttgtcgatcgatttggacgatgaatcaaatgcttttttcaggcaatcacattgaagacttaccctgcagagctctctctcgcaacatggatatgcctaataggtacaatagagggagtagttgtagcattagtgatggagaaaggaaatcctagcgtgtgggccattggttgggacactaaacttcttacaatcacctatagtgtaagatttagacttacaataaagtagtgcttttgagagtagcttgtaggttatttattataaaagtcaaaatgttttgaacataaaactcatgcaggggatagtgtgctcagcgcttggtgactaca

SEQ ID NO: 147730 - DNA, 1680 bp, Arabidopsis thaliana landsberg
ttcttcttcgtcttcgtctttgattctcctgattcatgtcgcttaaatttttagcgatcttcgaatcccattttccttcgggaatctgacattttttctcgggaaattttttatccaaatcggagtaaagtatcgaatctagagaatccgctatggatgagacctattttgatctattgaatttctttaagaatccctcttttacagagacatttgtcgacatcttactatgcgcagttccgatttggctcgccgttatgatcgggttattaatcggatggtcttggcgtccaagatggaccggtttgatctatttagggtttcgttctaagcttcggtttttatggaccgcaccgcctgggtttggtgctcgtcggctttggcttgctttcaccgctctctctgctttctccgtttgccgaaccatctggtcaaggaatgacaccagagctaataaatcggcgaccggttcagcttcgtcgcagacgcctgttgaggataatgatgaatcaggattggcctcaaggttagtgtaatgcttaattattggaagatgtagaagttttagttctctgttttaaaacgtaacgtttacttttaatttagctagataaggtatatagtgtttgcattatcttttagtttcgcaatagcattggcaaaagaatggttttttttttttttgcattagttgatttatggattggttatatttgcagaggtagcgataaccggacggtgacagaggatattgtgacagagaatgatttagagcatctgcttcagctgcttgaagttggaaatgcagctttggaatggcaatctatgatggataagactactccaaatatgagctaccaggcttggcgtcatgagcctgaggtaatctaagttttatactcttgctttgtatccgtttccttatgctacgcctgaatgatgtagctcaaggaacaagctaagtcattgagtagtaggcggaatagtcgaaaaaatgaattctttagagtaatttgaatgacatctgaatcagaccactgcttttaggtttattggtaatgacgagggagatatgtttctaaggatagctatagacgatcaatttttaggtgtctagtagtatacattgtgtttctttgtttagctttggttctttttgggcacgatgtgatgcgttgttgcatttacccctttgtgtggcatttttgtgacattttacttgaaactgtgttcttgctataatgaaatggggaattcttaaatactagatgatagaaacatttgatcaaattgtgtttgtagcctgataggtcgtattgtttatcagacaggtcctgttatttatcgcagccggactgtgtttgaggatgcaactccagatattgttagggatttcttctgggatgatgagtttcgacctaaatgggatttcatgcttgccaacttcaaaacgttggaggaggacactcagacaggaacaatgattgttcagtggagaaaaaaggtttctggacttttgatactttggtcatcttaataaacaattcccacattaaaaactgttgtcattactaatttcttttgcttgcagtttccttttttctgtagtgaccgagagtatatcattggccggagaatatgggagtctgggaagaagtattattgtgtcacaaaggtaat

SEQ ID NO: 147731 - DNA, 554 bp, Arabidopsis thaliana landsberg; identical to SEQ ID NO: 66163

SEQ ID NO: 147732 - DNA, 579 bp, Arabidopsis thaliana landsberg
aggcactgatgttgcaatcatttggatttttgatcgatgttttgctggcaaaccatctgagcaagaacgaatggtttgtctctgtacagctgatgatgcataacctaaaaaaatatttagacatatgttgaatagttcataatgacgtctatcttatatgcaaaaattatcagatcgatgacttttggaatgaggcacagaacctagctggcttgcaccatcctaacgtcgttgctttttatggggttgtgctggattcacctggaggttctgtggcaacagttacagagtatatggtcaatggttctttacgaaatgcgttgcagaagaatgttaggtatcgtattttttatacattcctcagtgctacgttgacacttcagattcatgcttagaataacgccatttgattgttatggtttattttacaggaattttgataggtgcaagcgtcaactgatcgcgatggacattgcttttgggatggagtatttgcatggaaagaagatagtacactttgatcttaaaagtgacaacctgctcgtcaatctcagggatcctcatcgcccaatttgcaag

SEQ ID NO: 147733 - DNA, 1405 bp, Arabidopsis thaliana landsberg
atggggttgagatatggctcaacgaatttgtctgtcggagctactgtcactccttttagtggtaagcgcataaagttgctctgtgaattcgcgttgttttcttttggacacaatgctgaccctttgattcttcaattcagcgaataacgaattgccaaagcatgcatggcttgtaagcaagatgggaagtcttacagtaggagtacaatatgagccgctacgtgagttagtttacattgttttatttctgtcgaacagattttacgcatcacatgtggaaactagtatctataaattatgtgattgaaagaaagtgagcatcaacaattgttattggattttgttttagatggaagcaaagatttggcaaagtacacagacccaagaaactggagttgtgctgctggctatggagtagggtcacaaagccccttgactccttcgtttaacattggcattgaactagcaagaagctctcaggtgattcttttaaaatccgtgtagatgaaaacatgttgttttgctgtctgtatgcacaagtcttaaccccaaacaatttttcagtatctcatggaacttgacaaacgaccatattatttatctaatggcatatcatccattttgtagcatttttagtcttgctgattatgttatctttcttgtaaatgcagtttattgcttcgttctaccaacacgtagtggtccaaagacgggtacaactctttcaaacaagtcctttttctgtgctgcatcttatactagtcttccatatataaagtttagcacatctttggctcaatatgaaatcgatttaatggacttggaacaggtgcaaaatcctttcgaagaaaaccaagtagttggaatcacaaactacattgattttggttttgagctacaatcgaggtagtgaacatctctaagtaaaaaaaaaaaaaaacattgtagctactgtttgtactatacagaaacagagctttatatttcgtcttaatattgaagggttgatgattccaagacgccacccaatgccccagattctttattgcaggtggatgcgtctaggcaggccaacaagaactttttgctgaaggtataaaaaaatatttaccttttatctcaaattttgctcagtatgtaacattttcaacttttgcagggtaaagtcggagctcatagctcaacattgtcattagcattcaagtcgtggtggaaaccgtctttcgcattcaatatttcaggtatgcgttgataaataacctgaatgcagcgaaatcaagatgaacataggttcttggtatttgaacatgtttggactcattttttatgcagcaacaactaatcataggactggaaatgtccaatgtgggttcggtctacgtgttgataacttaagagaagccag

SEQ ID NO: 147734 - DNA, 1417 bp, Arabidopsis thaliana landsberg
  unsure (1)..(1417): unsure at all n locations
gacaggcgttagtggcgattggcgatggcagctcctgcggtggaggcaaccgtcgcaagtgctctccgctctgtgattcttagagctcgtaaggcggcggagcaagtaggaagagatcccgagcgggtcagggtccttccagtctccaagactaaacccgtctcacttatccgccaaatctacgacgcaggtcaccgttgcttcggcgannnnnnnnnnnnnnnnnnnnnnnnnnnnnnnnnnnnnnnnnnnnnnnncaatccttgttatcttcactagataatcgatttcatttcaaaatccgaatctttatccttcaatcactaactactatgtgtctctccattttctgggaatgtgatatattttgtgcttttgatgctaatggagcttctccttcactttgtttgattgatatacagctaccggaagatatagagtggcatttcgtggggcatttacagagcaacaaagccaaaacgctattgagtctgacttttatccccatctttaatagtattgaattaggggtttagtgaaagtgaaactcgtttaatccaatgtttgcagctggagtcccaaatttggcaatggttcatggtgtggatggagaaaaggtattataactagcgattagaggttgttgtggcgtttcacttgcacaaattcactttactaggaggttattttggttacacaatcacttgggattgatttcacaggtagcaaatcatctagatcgagctgtttcaaatcttgggagacatccactaaaggttttggtccaagtgaacacaagcggagaagtttgtgagtattgcttccgtcctgtaaattgatttccttgtccaccctcttcagttggctgactgattgattattcctgtagctaaatctggaatcgaaccttccagcgttctagagctagcaagacatgtgaaacatcactgtccaaatctggtattctccggattaatgactattgggatgcctgattatacgtctaccccagagaacttcagggtattctactaaaaatctacttgattggatacttgttcctacaagttttacttaccaaagtttattcttttccccataaaccgggacagacactttcaaactgtagagctgatgtatgcaaggcacttggaatggctgaggatcaatttgaactgtccatgggcatgtctggtgacttcgagctagcggtaatatctttgtctctcttataatatcggtgatgcattcaacttaatatagaatcatttgaatgtattctttctttcatccgaggaaccacatatgtggaagatgatctttgactatgtttctgcagattgagatgggaagcaccaatgtgagggttggttccaccattttcggaccaagagagtaccccaagaaaacaacttag

SEQ ID NO: 147735 - DNA, 517 bp, Arabidopsis thaliana landsberg
atcaggtatttacaagtgtttccgaatggtcgtaatctttcaaagggaaaagccatgtcgctgtatcttaacattaacgataatttcaaaccctttgagatgatttatgttcgagggaagcttcgagttcttaaccaacgcaaactcaataacgtcgaaatacaaggtacgtaagaaaatggatatataacatctcatcgccattgactaatgggattttactttcttttttcgcagttagtaattggtacacttcttggttttattactcgggcgactttcagattatccctctagctgatctcagagattcatcaaagggttttgttgtgaatgatatgttgatggttcaagttcaactcgaggccatttcctcaaccaagtggtacccgagttagatttctcaaactataggaacttgaagctccatgtttttcctttgttaccaaaccacctaataataataaagggtaatttgtgtttgcatttttttttacatatattttctttctctagc

SEQ ID NO: 147736 - DNA, 1173 bp, Arabidopsis thaliana landsberg
  unsure (1)..(1173): unsure at all n locations
nnnnnnnnnnnnnnnnnnnnnnnnnnnnncgtagctgaagttggtaattcaaaacgaagcgggagtcctaaatataatgagcgtgctaagaccccacgtctggatccaaaactcggatctccgttgctgttgttgtctccagaagagggtggttttcgtctgtacaacccagaagatggtagggtttacgagccgaagagtgacttttccgggtatcgattcctgggaagctcaggtaagtggtttctggtggtagattctcgaatgaaactctatattatagatgtatttagcgagaagaggatcgaacttccaccactagaatcatttaagggtagcctttttaagattttgcgtgacggagaggagaatgtcaagcatatgcaaatggctgataacgatccatttcgtgatgaatttcctcatgctgccgaagatctgagaggtcgtttgtgggttgaagacaagaatggaaactacgttgttgtctggcagtttgaaaagaaccaatttctagggttttgcaggacaggggatgatcattaccgcgagattccaacacagctcgaggttcagagggagttacgaggtttatacgatatggtacttaaaggttacaatctttacgtctatgccacccgtgagttcattcgacacttggatttgtctggacaagatgaagatggtttcaagaatgtatccgagaaacataggcttccaatgtggaggccaagtatgacaatgaaggaacgtgaacgtatgaagcaaaggaggtctatcccatctaacaaaggcattgctgttacaagagcaggtcaagttttgcttgtctttacgtacgatttaggtacctctgaaagtcacaggatgttccatctgtacaagagggatcctaaagatcttgacccgaaaaccctcgacacccggcttcttgaggtacattcgttaggtgatgaggccctcttctatgatttgggtatcaccgtgcctgctgaccatacccttggtatagaaccaaactctatctatttcactcgtgatgatcgtatctgtcacaataaattgtcatgcctcgacatcggtgtcttcaatcttataccaaagaccgtcaaacgcttccacggtctctccaacttcaacttcaacgatgctcagtggtttcttccttcttga

SEQ ID NO: 147737 - DNA, 12461 bp, Arabidopsis thaliana landsberg
  unsure (1)..(12461): unsure at all n locations
atggaaaattactgtatctacccgttgagcttgagtacaaagctatgtgggcggtatatcttctgatttnnnnnnnnnnnnnnnnnnaggagaagcgattgatccaactcagtgacctcgatgagatccgtctagaaccttatgagagttctaaaatctacatggagagaaccaagcttttccatgacaagaagatcatcactaaggatttccaggttggtgatcaggtgttgctattcaactctcgcttgaaactctttccaggaaaacttaaatccagatggtctggccccttctgcatcactgaggtccgtccttatggagcagtcactctagctggtaagagtagagacttcacagtaaatggtcaaaggctcaagaaatacttagcagaccaaatccttccagaggtgacatcggttcatctccaggaacttcttaatgattaaaggagtaaaggagtcaagctaatgactttaaataagctcacttgggaggaagtcccatgactatctctgtaaataaatttttattttctcgttatttttgatttatcttggttatgtttgtggttctcaggaacaaaggaacaatgtggagatagagtaaaaattcaaaacttttactctacagaagacctggagatcgagtgtacagcacgttggagtacaaaattttgaaaatcttctgttgcacctggagaccttgcactcgagtacattggtatagtatgtgtgattttaaaaactcaaaattttgaaatcatatttatactcgaccaacagaagctacaaagacttacagaaatttcctacagtttatagtaggttttctgcaaaatattctcaatcaacagtgtgtggaccacgcgctgaggataagctggagagagaatctaaaattcaacctagaccactcattttgaagcgctactcgaccactccaaatacactcgaccttgctgttttcatttcaccgccgacactctaatctccctactccacaaatcgccgtccaaacagctactcgacctctgataattttactcgaccacctcgccgccgtcaccagctcattccctccgtcacccaaccaaaccacttcactcgattccttctgtatactcgaccaattgatccacatcaaccgtcgtctctttcataaaaaatcgctcgacctcgcttcccggtctcgtagaggcactcgactgacgccgtcctagccgacttcaaaaactcactcgacctcgtgaaagcactcgacccctgcaaaattctactcggcttcttgttcgtgaattcagtagagccttccaacttcagagaagctactcgaccactagctttcacgattcactctatctccacgattcactcggccggctgtagcattccaactcgacctgtgagaagatactcgattcaattcatctaagctcaggaacagctcaggttactcgagtacagaattgtactcgaccaattcaatctgtttcattgcctattgacaataattttggtttcattgctatctttgagactaacctattgacatttgagctttgagttctaaatccctacaggagaatcatgagcaattacagtggcagttcttctgttgatcctgactacaacatggaagagacagagtcgtcatcttcaaggccagaaagagaacagagagagtatgatagcttcagatgaaaagctgagatagctcgagggaagagagcaatgactgagaggtatgagcttataaatgaggatctagaagacgagtacatgcctgagcgtactcgcagagccaccagacttctgcacaaacctgatgtattgcctgctgaggattatatcaggctcttcaaactaaatgagttctgtagcacaaggtatccatgctcgaccacacttgcacaacttggattgttagagggtgtttagcacatgtaccagagttgtcatctagacactctgatggcttatccgtatgtagcatatgaagatgagataattcaattcctctccacgctgcaagtagagctctaccaaggtatgacctctgatgagttggattgtgaaggattgggattcttgtgattttctgtgtatggtcatgagtataggttatcaatcaagcgattggaaggattgtttggcttccccagtggaacgggatctaagcccaagtatgaaagagaagagnnnnnnnnnnnnnnnnnnnnnnnnnncagctctgtaccgttgaatgcttccaggtcaaagagcaatcagaaaagcagccctgtcatcaggtacttccagcattctatagccaatgtactctactcccgagagatcacagggactgttactaattctgatatggagatgatcgcaacggctctcaagggaactcttcaccaaactaagaatggtatgcccctccagggtgaaatcaatgacacacctctctctgtacttcttctaatccatctgtgtggatacaagagctgggctgttagcaataaccacaagagagcacgaggcgctctatgcataggtggtgttgtgacaccgattctgatcgcttgtggagtcccaatcacatctgatggacttgagctacgagcaatggatatcgagcatctacgtcactacgaattcctggagttcgcaatggttggcgacttgcaccggttcaggtttaagcactccacagacaagagagttagcatccttctccctatccctaaggttactcggataatagagggagataacattgatttttggcctgagattggaagcctctagtatgagaacgctccgccattggatgaggatgaccttgtagaagaagctgctgaggatggtatggatgaagacagagcagtggagttcgacactagcatgtatcactttggtgaatatgtgcctccagcaagggagagcaagagcttgagtgaagctcataggaacaacagtaaactgcagaagtggtgcaagaagcaggacaagctgctcgccaagtgtttcaagactatcaagcttctgacagataagctgagttgttcctcccccaccactgctattccacagggacagcctcctctggagatgccatcgaggagatttgatgagcttgagcacaggcctgagcttagcgagcagagagtatcacatgtcccggctaggcattcgtcgttcgagtcccgggagcacaagagaagaaggaaggctacactcactcgatctagcagcagatcacgcctcattcactcgagaaggtcactcgaccgcggtgctggccgcagtagaagaagagaggtcgagtatcctcagagcggtgctggccgccacagagctgatgaggtcgagtacccacctgctggagctgatacggaacaaggcggttcgtctatggcttgggagcaatcacaggcagccattgacgagcaactacgttcattcttcgactgaggtaagcgcctcacttcaccattgtattatatcatttgtcttgatttgtttcttcattttgtttctgtgattggatttgtcctgagtactctcttccaagtttattcgcacagtggactgtgtgatttaagtttgggggagggctcaggaagtgtgtgttgcattgtgtatatttttgagtctacattcatctaaggcatagaaaaaccaaaaaaaatttgaaaaatttcagaaaatgatttcacaaaaaaagagtgttcatgtagttgcattacatttaggatcgagtctagagtgtttcatttaggattattgcatatgcataggggatgatgatgagatagccttgtaagcattttgattcaccggataaactcagaagccctcgttgctagttgtctattgcgtagtcaatgattttgaaatgaaactgaaccatgcctagattgctctactagacctcactgtcatgatctgataccatccctatcaatttgaacctgcatctgatctttaattatcatgtctgcatcaaaatagaactcatggataccctaatatactcggattctattattcattttgatcactcttgttaatgcaagtagctgactcttcttattagagcagttaacccaaacccaaacctagactttctttcaagccctatatcactcgtgagtgtttgtgaggtcttattccgattaagcttggtagaaagtgttaggttcgtaacgacagagatagtgtctcatgtagttctagttcgcattcttcagactagatagaactaggtgggctcttatactttgggttgggatgtgtttaaaagaaaaaaaaaaggggttgattcattgataagaaaaggtaaaagactctaggtgaagtaagctaaagaagcagaaaaagtctagtaaagattttgggatttgtaaagaaaagaaagagttcttgttagctattgaagatgggcaaaagcccttggttttagaatgttaaaaacaggaatcttagttgttaaagaaaaccaaatccgctagatgtatcaaagtgttgagaaaccttctcctagagttaaaaaaaagaaaagaatgattagaaaaagggcttaaaagattcatgaatgcaaaaggtagagttaagctcttgtattgggattggagatgggattaccattagagcttcatttgatatactctgggtagatgggatcttatctctgtatgcatagcttgggacttacctttagcattctactaaagcttaatcattttttgagagatcccctgttactgaagcctattatgtaaggcaccatctttgtctcttgaccttttaccttagccaaatgagttcattgatgatgcattgcttgatttacgttccaaaactaatgaatgttaaagggattggtagatttgaaaacatgtgtaggtcgagcatatgagtcggattgattgatgatgaggcatggctaacgtttttaagtagaattcgatcttgcagcttataactttcaacttggacattgatttcatctggtttatctggtgctttggctctgagtccccgctttcaaacctcacctccagcttgttgttgattgtttgattgagggcaagcaaatactaagtttaggggagttgataagtgtgtattttgcatgttttgagcatccatttgtcatcactttagcatcatatcatcactgtttaataccatttctcatcatttgtcatcactttacatgtttaggatagatttgcatgcatgttgcatatttgcgttgatttcaggtgatttggagctgttgacgagctatctggaagaagcgggcctgatcatgtcaaaccactcgaccccgaggtcgagaaggagcttcaagatctcaaaagatcactcgaccccctggtcgagtagaggacatcactacttcaccacatcactcgaccccgaggtcgagtgtcttcatcccatcacctgacaatcactcgatcacattactcgatcacatcactcgaccccgaggccgagtgtctttacctttattgccagaccactactcgacctcatcactctacctggaagtcgagtatcaccatcaccaccactcgactgcatactcgatgacaagcttcagagctttcttcattctgcactcaaccagacactcgagcacaaggaagaaaagaagactccagctattcactcgacctcccactcgaccacatgggtcgagtacagttcttaatccatcccaatacttcgtcgttttaagtattagggtttcggaatatttggctataagtagcatgtacttcacattttcacagacaagtttttatctagttttattccgcataccttgtgttctagaccttttgtaatccggatttctctttatctattcagtattcagtattcagcttttgtttcttgattttcgtttactgctgttcattctgttatcatcttgctgttacactgttgttatcatgttttcaacttgttcaacgtttatgctttctgttatgatgtctgagtagtgaataggtttctgaggatgggttagagtagtgtagaattctcagtatgctaggtgattgagtattgattgatagatcccttctggattagttgttcttaatgcctattgctttctgatcaactggaatttgagcccagacatttccgcgcccaaaaggtgttcgatgaaatgtctgaaccactaattccagagattcgtgaccctgtaccaaggtattggttgcagggagcgttttggctttaacttgttgattcgtaatgcctgttaggttagctctcgtcaatggtgattgagtctaggactaggttagcttgagagtctctgttgcggtggcacttagatttggttaatgaacttgttgtctagggttaatttattgagcatgtcaatcacctgtaaactgaggaaacgaaactactcaattatcccatccttaggaattctttatctgattgattttattgtttactctactactgtttactgcatcctgtcatctgttgtttagtttctgcaaatctttactgttactcgacctgatactcgaccacccagttgtctggcaacaaactgtgcagtcgagtatccctgtttcattttctgtctgttactcgacctgtcactcgacctcacccagtgctctgcaaagagctgtgttggtcgagtgttttactatttctgtttgattttctgttttctgcatgttcacttaggactgctagaacacaccaaaacctgttattgcttggcttgactcagtgacttctgatcacatcttgattgttagcatcacacccatttggattgacaaccttcagtactacaatgacatgattgtgctttaggattaattgatcttaaaaacctattatcaatttggcgtcgttgccaattgggtgtttgtttgttacatttgagatttcaaacttgcttagatcaagttctttttcaattttcaatccggttgctaactgtgtgtttttcttgttgtcttcatgatccaggtacacctcagctgtatgcgaactcgatcaacaggcaatcagaacctccttttcaacgacaacatcgaccgaataactcgcgaactcagagaaagaagaacacaatcaaccttgtacctcagcaaccactcgatatggctgacgaacagaatcaacaaaatggccctgccaacattggtgttggagatgcaacacgggaccatcggcaaaggaaaggaattgctatccataacaacaacttcgagattaagagtggtctcatctcaatgattcaggggaacaaattccatggtctgccaatgaaggatccactcaaccaacttgatgaatttgataggctctgcaacctaacaaaaatcaatggtgtcagtgaagacgaattcaagctcgacatgggatgattgcaagaatctgccccatgactccatcaacttatgggatgattgtaagaaagcttttcttgccaagttcttctctaatgctcgcacagctagtttgaggaacgagatctcaagcttcacacagaaaaacaatgaaacttttttgaagcttgggagaggtttaaaagctacaccactcagtgcccccatcacggttttaagaaagcttcattattgagcacactctacagaggagctgtaccagagattaggatgctgctcgacactgcctcaaatgaaaacttcctaaacaaggatgtagtagaatgatgggagttagtcnaaaatctagcacaatctgatgggaatttcaatgaggactatgatcgcactaacagaggcagtagcgattctgaggataggcacaagaaggagatcaaagctcttaatgataagattgataaattgttgcttgctcaacagagaaatgtccactacattacagaagaagagcttacacaactccaagaaggggagaatcttactattgaggaggtgagctacctacagaatcaaggtggctacaacaagggattcagcaactacaaaccccctcaccctaatctctcttacagaagcaacaatgtggcaaacccacaagatcaagtctaccccccacagaaccaaccgcctcaagctaagccctttataccctataaccaaggctacaaccaaaagcagaactttggacctccaggcttcacccaacagccacagcaaacttcagcacaagactcagagatgaagactctacttcatcagcttttgcaaggacaggcctcatgctccatgaccatggacaagaaactagctgaactcaccaccaggatcgattgctcttataacgacctgaatttaaagatagatgcacttaacactagagtcaagaccatggagggacacattgcttctacttcagctcctaaacaccctggccaacttcctggaaaatctgttcaaaatccaaaggagtatgcccatgctatcaccacagtgcgtacttctgccactgaggacagtgggattcaagaaggggaggttttgagaccaaaatcaagacaggagattgaactcgacttctttgctcggcttgtcgaacgagcatatgacccgagcaacccaatccctattccacctacctatgaacctaaaccatactttccagaaaggattgcacaagttaatgcaaggatcttccagaaacacaagatgatgttcataaagtgtatcaaagagttagaagagaagatacctttcgttgatactcccaaggaagtaatcatggaaagatcccaagaagctcagcaaatagttgaattgagttttgagtgcagcgctatcattcaaaggaaggtgataccaaagaagctaagtgatccaggttccttcactctaccttgttcactaggacccttagtgttcaacaatagtctttgtgatttgggagcttcggttagtttgatgcctttgtctgttgcaaagagattgggatttgataagttcaagcctagcagcattcatcttattctagctgatagatcagtgagagtgcctcatggaatgctagaagacttaccggtaaagatcggatcggttgagattccaaccgactttgtggttctagagatggatgaggaaccgaaagaccctctcattcttgggagaccatttttagcaactgcgggcgctcttatcgatgtgcaaatgggtaagatcgacttgaaccttggtaagaatctccatatgagctttgatattgctaagaaaatgaagaagcccactatagaagggcagcttttctttattgaagaaggaaatttagatgctgagttgttgagtgggttggaaaatcctattccgtactccattccgactcgccacctaggagagcccgagaagcttcttatgatagaaggaggacctagcttaaaggttgagactaaggggaaccatttggatgttggtcctattgctagagagcttatggagctcaggaaacagtatggagctcaaggagagaccatggaaaagttggacctcaagatggaggagctgaactaagctatcctggagcttaaggagatgattaaaggttatccaggtcctgagatcgatgaatactttgaggaacccgatcttggagaagaggactatagtactgatgagaaagaggcttacttcgaggaaagatcaaatgagtactccacactccagctatcaagagaaaatgcggagtatgattcagactttgaggattcaacaagtgaggatgaggacttctcagttcctctcctcaatctcttctctacctaaacattgtgagagtcaagcttagtgactttaaacaagctcacttgggaggaagtcccatgtctatctttgtatatattgctttcttgttatttttgatgtttttgtttaagtgttttgatgtactactcggctacaggccgagtgtgggcttcaattgaccaaaggcccaagattgaatagtactcggcccacaccactcggcccaaggtcgagtatggacctcatcaggcccaacactgtactcgacacgcgcgtcgagtatgtcggccgagttcacacgtgtggagtcaacgcaattcaaatttgaatttgaatttgaatctactcggccccacacgtcaatcctggtccccaaaggccatcaaagctcattctgcaaatagttaaagcctgtccccttgactaaatgaagggtgaagatctagggtgtttgacgggctaggatcaaatcttcttgtctataaaccacactcaacaagctaagtcacttactctctcttttcactcaatcaattttgcattttgctacctctttctagacatttcaagactttactctctcttctctctagaaatcccagaaactgaaccataatttcttgctttctctccatataaaccttttcaaaacctctctcaaagcttttaatcagtttaaaaaacatcaaattctcttctactttcacctactttgggttattttgtggtgactatcttcagtacttcacttcaagaacatggatcctgaagaatcaagacgaagagcctctgctcgtgctgtggctagagggtttgctatgatcaacgagaaagatccggtttggaaccaggatgctgtgagtcctggttttactcggttgacaggccgagtacagtggccgaatatgaccccatagtcttctgtgggtcgttctactgctgctagagaagaaattgcaagaggaaagagggtttgggaggttgagccaactgcaatagaggaagaacatgtgctagagagggaagcatctgaggaagatgtagagattgctgaggaggtcttaccagttcctgcaaggagaagaaggaacaacccaagaaagaagaaggagcctaccattgaagaacactaccagtacctcatggagctgagttttgagggaacaagatctccccatagacctaccatgcaagctttggggatctgtagggacgttgaatacctcatggagatggccaagctggagacattcttctcctataagtgtgagggatacaaggaggagagctgcttgttcctagccaccttgaagctccatttctatgcagatgagagggagaaagagatacataaggggttggctatatcacattcatggtgtttgggattcactactccctccctattaggcagttggatgttgtattcaagttccccaccaagtatgggatccgccaaaacttcagcaaggacgagctccatgatctatggttgacaatcgccggtccactcccctacaagtcatctagggccaagagttcattgataaggagcccggtgcttaggtatctccacctttgtattgcaaatgccttctttccaaagaagacaaccggccatgttattgagggagagctgaagatgcttgatcttaccttatgcttcattttggggcaaacaaggaagaatatagtgatggaaggggatagggctgatacatccctttcggtggtgttgagagatcatttgannnnnnnnnnnnnnnnnnnnnnnnnnnnnnnnnnatccggttatggaggcaccttgtgtgctagaggagtgatcacacctattcttatagctgctggagtctctcttcatactctcaatgtcacagccaattacattgatatggagcatttgaggaaaaaaggcttcctggataggtcagctccagctgatcaatttcagttcaagtttaagcaccccaagctaggtctctctaggctagcacttccatgcaaggagtacaccacagttagaactgaaaacaacattgactttgatcctcctccatcaatcttagtcaatgtccatgtgcctttccacgacgagccaagcataaggagtgagtcacaagaagaagaagcggagttcaaccaagcggaagctgaacaggaagaacatactcgaccgagtacattacagcaggccgagtatggccaggccgagtacgacctgtccgaattcagtcgagccgagcagtttgatgagaaggaggattcgtgtgaaggtgcagcaaagtagtatttcttcgaagactatgctgagtccgatcaagaaagggatcccagccaagtgcacaagaagctaagaatgctaaatggtcttgggaagtttcagaggaagttgattagtgggttgaaaaagaaggtgagaaaaatgaagagggcgatgaacggtatggcggctcaaattcaagagctgcaaagaaggcagagatcaccaccacctccagctgagttcaggagaagcaactcgatgagtgtggcgccacaaaggaacgttcgtttccacccgtcaagagccttgtcttacgagcgtgggaggagctccaccttctcagatcgccgagccaacacacgcccacccggtccagtaaaccagttggttctgaatgccgacccgagccgcgaagagttatactcaggctacatgctcgaccggtcaaccgagtaa

SEQ ID NO: 147738 - DNA, 771 bp, Arabidopsis thaliana landsberg
atggaaaagatagctccggagctctccctcgtcgccggtaacccggactctttcgtcgtcgacgacctcctcgacttctctaacgacgacggcgaagttgacgacggcttaaacactcttcccgattcttcaacactctccaccggcactctcaccgacagttccaactcctcctcgcttttcaccgacggcactggcttaaccgaccaatatattccagtaattttccgttattattttctcaaatccacgccaatctttatgaaatagtaacacttttttcttcttcttctttttcttattttatcagaatgacgatatagcagaatgagaatggtggtcaaattttgtggaagaatcattcgcaggagaagaccaagacaagcttcacttattttccggtttaaaaaaccctcaaaccaccgggtcgaccctgacccacttaattaaacccgaacccgaacttgatcatcaattcatcgacatcgatgaatccaacgtcgccgttcctgccaaagccagaagcaagagatcacgttctgcagcctccacgtgggcttcccgtcttttatccttagccgattccgacgaaaccaatcccaagaagaaacaacgaagagtgaaagaacaagacttcgccggagatatggacgtggattgcggagaaagcggaggaggacgacgttgtttgcactgcgcgacggagaagacgccgcaatggaggacgggacctatgggtccgaagacgctttgtaacgcttgcggagtgag

SEQ ID NO: 147739 - DNA, 3326 bp, Arabidopsis thaliana landsberg
ctcttcctctttgaaaaaccttccctttacgatttctccatagcagacacagattcatactctgcgaattgctcaaggtagaagaagcagattcacgatcccaattcccctattaacggccattgaagatggtcgggagcaacaacaacgccaagtcatcgacgaacaagcctccagcaacttccatccccaccgctgcagcttcatcttcacagaaccataaacctcgtgtgaattcaactaacaacgatggtggaatcagtaacaacaacaacaacaacaagaaagaaagcaagccgatgatgataggtgtccagaaaaccgccgataagaaaccactgaagcctaatccatctcctaagctagctccgatcccgaaacaatctaatccgaatcatcaaaatcaaacgggtccatcatcttcacgaccaatggctccgtttcctttccctgattcatctcccgcgctaggtcctcctcctcaaccgacttatggattccatatgttagagcgtcgcacaattgttctcgctgatggtagtgtccgttcctacttcgctcttcctcctaattacatggattttcctcctcagagtcgattagctggaccggtatttgggagattccctcctttttacccggaagagtttcgagatcagcggatgaaacggaagtatccaggtgaagaagagattgataggagagatgagagagctgagatgatgagacagagacagcagtttatgcagtatgcgaatcctaatgatcactcatttatggctggtacgagtagggatgttggagaggatgttagagctgctaagcatatgagggtaggatcaagtaggcatgacaatggaggtttccaggttgaccaggttgctctaaagaaatcgtttttgggttttgttaagcgagttttcgaggatccgatggagaagaagaactacttggagaacgggagaaaagggcggcttcagtgtctcgtttgtggcaggtttgatggctttcaatctgacttttgtgtttgttttttggttcagtttagtttgcttgtgttggagacgctagttgccttgtttttgattgttgttttaattagtcttatatgtcttagaacgctaaatgaacatgaagaaggtaagagagaacactaatatacgttggaataattattgtacatttgtatgattagtatgttaattgttcacagtattgaatttatcttgatagtggttgttgttttagcaatatgttcaatttgttatgagctgctgaatggtgtttgctttccattgattgtgttcctcttttacgatgtatttatcattactggaattctttctttagtaatgtgctaacttccatatacttttatagattaggcatgtgtgatgactgcctgtcgataagcctagattattgaagttgtttacttagatattaggtatcattcaacttagttgagttagttctcattttctttctacctactgcttctgtgctactcttttgcagttacttttttggctggccttagaacagcaaaggttgtaggtttttatactgcagcctgcaggcattacgcttagattctattctgatccataatagtttttttttttttggaactaatcttgcatctcaatagttttaaactttttttaatctttggtccacagcttattaaatctttctcggtatctctcgactcaaactattagcccttgccttatgcatgcatattcttttctttctgaatttaatataatggtagtttttcgcaactgtttagatttagcttgctgatatttctttgttaattggtttttgatggtcatatatcttgcttactgtttattcgtcttaggattactcttatttgaattgattatcagataggtagttgcatttcagtttttcgaatcatcgttctgttctttggtatttgtgggtgaccttcaaatcagctctcaattatcagtagtaacccaacgagttggcattttttcccccgttttaatctacttgcttatggtcagatcatgaagtctgcaccatgcatttggtattgggcgtgtgcttagcattctttgcttgtcctcagtgctcgtgcttgtgatttgtggaactttcttcttgaatacagcatgttaagttgatcgacttcatattcataactctatagggaattgagatatctaactctatctttctttgttctaacttgctgattagatggaggttgacaattaatttggcatgatgagtaaatggtcaatttgatgaccatttcaatcagtgttaagggctaagttagtaggctttagtagcaactaatctttttttgaatgctcttttatgtcacggaataggcttgttttggatgtagaaagcttacgatgaagttctctaattcctttgctatcatctttattctttaacattattcaactcttctgctatgttatgatggtactcctcataattgcgcagaggtttatgtgtgtttttctttatgtttatatgttatccgtgcatcacttattacccctagtcttagcttaattttagaatttggttattccatctacatttgattcttgttggttgccaagctgatatgtggatgtgtctttcatattcaatcattttagtgtgtatattcattagtcttggtgtccacattgaagagtctttacttcatgattctgatttgcttgagtttaaataccttagagtattttatacggtatttgtgtggtaaatctgaatgagtgtttccaattcgacttgtgctaaaacacaggtcttctaaagatgtccaggatacacatagtttggtaatgcacacatactgttctgatgattctagctcacgcgtgcatcatttaggcctacacaaagctctctgtgtattgatgggatggaatttctcaaaggctcctgataattcaaaggcataccagaatctacctgctgatgaggcagcaatcaaccaagcccagctaattatttggccacctcatgttattgttcagaataccagtacagggaagggaaaagaagggcgcatggaaggctttggaaacaaaacaatggataacagaattagaggtataacatgcggcctttcactccttattcttgcgtttacatacctgggcagaaccatctggaacagttcatgaatcttgcattggttaatccgcacattaggattctcttctctcttttccttttttcttccctccatattagagatgtgcttggaaagtactaaagcaggttatcttaatcaattggatatagacccagagccttag

SEQ ID NO: 147740 - DNA, 1453 bp, Arabidopsis thaliana landsberg
cagatccactcacacctcgtctcctaatctgtacggttcttatttcgaaagggtaaaaaccaaaagcgacgcaaagggcaaaataggaaaaagtgttttatttatggccgccgttagtagttcgtcggagaccggagactgcggcgttacgggaaagagagatgagatcatgttgttcggagttagagtcgtggttgatccgatgagaaagtgtgtgagtttgaacaatctctctgattatgaaaagtcttctccggaggatgagatccctaagatagtcaccgccggagctggagatggtgaagataagaacgaaacggatgccacggtgattgtcgctgacggttacgcctccgccaatgacgctgtccagatttcgtcttcttccggcgggaggaaacgaggtactactctttttctgattctgataagagcttaggattctgattgattgtattattagaatgtctctaatttgaatcttatccaattcgtgattgaatctatgcatgttggaatttatgtcggtgattgattggttttgagctatggattcgttgtcgttgattattgtttgtttgtgttgaacaaaacaggggttccatggacagagaacgagcataagaggttcttgattgggttgcagaaagtaggaaaaggagattggaaaggaatatcaagaaactttgtgaagagtaggactcctactcaagtagctagtcatgctcagaaatacttcctccgacgaaccaacctcaaccgtcgccgaagaagatctagcctttttgatatcactactgagacggtaaatctctactcttatcctaaatcattttatgttagctaaatcatatgtgaatgaaaaggtctagactttagcttagttgatagaacttaactttcttactttctttggtgttctctgctttctcaaagctctttcctttcttaggtttttagtatttcttctttagaacttaaagacaaagtaatatggagaagtatcataatgatttttggtctaattgggtatatatcttttaagttgtagtttataaacaataatggtaagtgtgtgacagttaggtgtgattggtttgatcaggttacagaaatggccatggagcaagatcctactcaggagaactcaccactacctgaaaccaacatcagctctggacagcaagcgatgcaagtttttactgacgtgccgacaaaaactgagaatgcaccagagacatttcatctcaacgatccatatctggttccagtaaccttccaagcaaagccaacattcaatctaaacacagatgctgctccactttctctcaacctttgtctggcatcctcatttaatcttaacgagcaacccaactcaagacactcggctttcacgatgatgccaagcttcagcgatggagatagcaatagcagcatcatcagagttgcttag

SEQ ID NO: 147741 - DNA, 889 bp, Arabidopsis thaliana landsberg
gtctccagcaaaacgggaaatcaaacttccgatgatcgtcgtctccccgttgggaataattcattcgcagggagtaactctgttaccgaattctcgtacggcctgcgaaagttgaagactttaacaaaatatatttccccctttcgccaagtgttcgacgaattgcctcagcgacttcgtttcctcttgaacgactgaaactgatctcagcagctatggaggagaaagactgtgaaggttctccgctgagtgaaaacgaagctggtttactatgctatgatgacgaagaatatcaatttggtggtccagctcccaaattacaattcaggtggagagacttgattcaggataggatatgattgtccgtgttaagctaattgttcttagttcttacaatcaatttctttctttttgtgcttgcaaattatagagtaggatcctccaaggctcgttggaatgctgaattaggatttaggaatggccgaagttgaggtcaaaaggggtaaactttggacgacaactggaattatccgtaccggaaaaacatattgcttcatagaagaggctctgtatgtggcaaacgaaacattacaagtttgtttttaaagattgcagtgtttactcaaatcacctgatgaagtttcttcctttttcgaattgtcttctttctgatgcaggtatttgagtgaaattggagagttgcagctcttgggtgatgaggatgacgtagtgatttcattgaaggacttgtatggggaaatagcggagggaaaatatggctgctgttgggaaaactacgaggtttatagatacttaaagggtcttggttacattctaggcagacatggagttccttggactacaaaatatgctgtgaataccccaccaa

SEQ ID NO: 147742 - DNA, 785 bp, Arabidopsis thaliana landsberg
atggcatggccgtcagacctagagcaacccctctatgatgttgaccttgctgtaattctttgcgagatgaattcgttcaaggatggacttctgtatctgtatgaaaaaatgaaattttacaaggaggttattgcttgctacatgcagaatcatgatcacgagggactgattgcatgctgcaaaagattaggtgattctagcaagggaggggatccatctctttgggcagatcttctcaagtatttcggtgaaattggagaggactgcaccaaagaggtgaaggaggttctcacttatattgaacgggatgatattttacctcctatcattgttcttcagaccctggcaaagaatccatgcctcacactttctgtcatcaaagactacatagctcggaaacttgagcaagagtcaaaaataattgaagaggaccggcgagctgtagagaagtatcaggttagtgtttcatcattaatttcttgcctgatatttcaagtcaactagaaaaattgttctcttaatgctgatcctacttcttatccaaaagccagttgtctatcacaatcctctcccagtttaaattcctaatcagatttttgaacgatgcaggaaacgactaaaaacatgagaaaagagattgaagatctcaggaccaatgccagaatatttcaacttagcaagtgtactgcttgcactttcacattggatatcccagctgtccatttcatgtgtatgcattcattccatcaacgctgcctcggtgacaacgaaaaagaatgccccga

SEQ ID NO: 147743 - DNA, 1741 bp, Arabidopsis thaliana landsberg
agcgttcacatttctctgcaacaaaatcatggcattgaccttcttcttcttgttatcgaatttgttcttctccggtaagaatctgccagaaaaatctcacatatttaaagactctaattatttttaaatttcttcatttttttcaatcttaggagttatgtcaaggagcttcacattttcaaacaaatgcgattacacagtgtggccgggaattctatctaacgccggagtttctccattaccaaccaccggcttcgtcctcctgaaaggcgagacgcgtacaatcaacgcgccgtcatcatgggggggtcgtttctggggaagaacactctgctcaaccgattccgatggaaaattctcgtgtgccaccggagattgcggctccggaaaactcgaatgctccggcgctggagctgctcctcctgcgactctagctgaattcactctcgacggctctggaggactcgatttctacgatgtcagtctcgtcgacggctacaatgtccagatgctggtggttcctcaaggcggttccggtcagaattgcagcagcaccggctgcgtcgtcgatttaaacggctcttgtccgtcggagctaagggtgaatagcgtcgacgggaaggagggggtggcgatggcgtgtaaaagtgcgtgcgaggcgtttcggcagccggagtattgctgcagcggcgcgtttggatcgcctgacacgtgtaaaccgtctacgtactcgcggatcttcaagacgcgtgtccacgcgcctatcagtacgcgtatgacgataagtctagtacatttacgtgcgcgaaatctcccaactacgtcatcactttctgtccttctcccaacaccaggtaaaattcctttaatacccttcttctatttactttcacccatttcgttaaaaggtgattaggaaatatttactctttcataagtaggatttttttgcttgttgtataatcgaagttttactagatactcaattccattgataatcattaattttgctatacaagttttgtttttctttcaagagttttatgatagacattgtttgtcaggctcctataaaagagagacacgtgggaactaacttcattcacttattcctttatttgcagcttaaaatcagctgaggaacacagcacagagacaatgacgacaacaagtccaagttccggcagtacgacgtcgacgcagatggtctacgaaggtgctctggacgaaagcagtggttcaccatctacgtgtcacggcgtatcacgagcaatcatagtcgttcttctctcgcttgctttttgtcatatgtggtggttcttctgaccagattatttgtcttagtgtctgccacgtatgcgaagaaacaagaacgtatgggccttagaaggccttttctcactatagtaaaaatatttctaaagtttttccacataatgtcaacttttttactccacatgaccaacgttgaaatgattaaaccattcttaaggaaaatcataaaactaaatattcctcagcttttcctcaactattcctttaactaatgatgtaacaaaaaaattaaatcataagttttcctcaaatatttttcaaactttatgtcatcatttagacccttgtgtctagttattatggcacatcctgttttctagccagacggaccttcatatttgatcctggtattcacattctgtctccaacagaactggatcccgcatctcagcacataattttgtag

SEQ ID NO: 147744 - DNA, 560 bp, Arabidopsis thaliana landsberg
tatgcacattcgctcaagttgatagttaacgcgtcaatctctgggaaaacaaataacattgacgtttgctttcaccggtgagtccttcgtttatcttttgctgttggacttaaattcttgatattcctgtaagttcgttggtacataatagatatcactaaatgttgtatgtttgaaggaatttgtcgcgtggaattggaatgtgccctcatagtcgatgggagaaagcctctaaaggttcatgggttcagacaatgtcacccttcgaccataaaatccttgatgttagagtacctagctctaacaaggtctcattggaagtgtctgctgtagaaggtgccttttctgtttccttttattgcattttcttttctcttttctaagctatctattttctctttgcagaattatttatgcatcgcatagtattcttactccttggtgctgtattactggcttcggcttctacactgagccaatctttagcgttttactacagtagtgcaatggctgttggtattatccttgtcgtgctgcttgttctctttcaggtaacctca

SEQ ID NO: 147745 - DNA, 320 bp, Arabidopsis thaliana landsberg
  unsure (1)..(320): unsure at all n locations
ctttcttctaaaattcgttttccatttttcttcactctctttccggtgacgccatgaacgccgccgtgtttagtccttctgctttatctctccctatctccttctctaaaacccgatcctcttttctctccagaaagaaggtaactttttactcttcttctccacttttggcttcaaactctgaaatcagtgtcaaagttacgtttttgcgatatgggtttagtaaaagtttagatttttaagtgattgagtgattgtttggttacacggcgtgaaaggagaatttanggtatttgctgtgtttggggatgagagtggat

SEQ ID NO: 147746 - DNA, 1615 bp, Arabidopsis thaliana landsberg
tggcgtctcgccttaaatcacgttccgttgtccggttttttcggtacggatacggttaagtttcttcaaggtttgttaaccaacgatgtacggagattcggcgaatcctccggcgagaagaactcggcggttcctacgccgaacatggcttccgttacgaatccgcctatgtacgcagcgttgttaactcctcaaggaaggtttctatacgatattttcttgtatagcccttcgagacccgatgaaaagcttgatcggactggttcaggacccgggtcggattcgggtcgtgatgggtctgttgagttgtttgcagatgttgatgttgatgtcctcgatgaattgcttgaaactctcaaaaagtaagctttttgaagaagaaatttgaaaaattaggtcttttggatcttattgttggcattgtcaatgtagattaggtttttttgacttgtagatgattgtaagataatgcttaggttttgattggtatattatctctattgattttactggaatgagtaaaaagctcagatttttagaaaagaaacgactcacattttcagatattcgacaacattaggtctttttggatcccaattttagcaatgttaatgtagattagggttaatttacttgatgatgattataagataaggcctagaatttgaatttagatgtgtcatctctattgatttggtggagaaggaaccagttttagttctgatttgtgtgatatgaatgttgatagatatcgcttgaggtccaaagtggatattgaaaacgttgcagaggagttttcgtgttggcagcgttacggtaggaatcttactggatcatcatctgttggttggggtggtggtgttgatcgtgctggtgagtctacagctagtggtaataagtatggatggcaatggtataaggatccgaggttggagtgtctcggttacagaagtatctttccgtctgatgcaactcgtgagtttcttaatcgaatataagcttttgagttcttgagcttgtgcaaaagcttagagatttgtttgttttgcagcgcctttagttgaggcagataaagaaacagatgaaagcaattatcttttatggagattagagcatggagttgctgaaggatcagctgaaattcctaaaggtatgatctgtttaacttcttgatctctcttcttctaggtgtagttataatatgtttttgtggtttgtacaggtgaagcaattccgcttgaatataatttcgttggtcttaatgctataagctttgacaaaggctgctatgttggtcaagagcttatagctcgtacccatcaccgaggtgtcatccgcaaacgcttaatcccattacggtttatcgatagcaatggaaaaggtaaactgattttccttataaagaactcgaatttctcacatgccggtcttaaaccgaatcaccaatgcagagttaaaccagaaaattgcggctggagctgaagtagtagaatcaggaacgggcaagaaaatggggacggtttcaacagctttgggtagccggggaatgggtgtaatgagggtagaggaagcctttaaaccatcagctgaattagcagtaaaggactcagaggag

SEQ ID NO: 147747 - DNA, 604 bp, Arabidopsis thaliana landsberg; identical to SEQ ID NO: 19291

SEQ ID NO: 147748 - DNA, 1378 bp, Arabidopsis thaliana landsberg
atgggtattctgaaccaaaagaatccggccaaaagtgtgtggaaggagtcatctatatgtaccaagacatggaataatttcgttctacagtttatgaaggtgtctgacatgttggaggctgatgctgggtttcttgtgcgtgacacagttgtgtttgtgtgtgaaatattggattgttgtccttggtttgagttttcagacctagaggttagtttatactttatttattcaataacaagataataaaaactcttcaattgtgtatatattttctgcatcgtggagtttttcctttctttcttgcacacttggaaaccttttatgttattgaaatcttacattatggattctacgtttcttctattcgtctgccaggtactggcttcagatgatgaccaagatgccttaaccactgatcctgatgaaattattgattctgaggaaagtgagggcataagcggagatgaggaagacacatttcgagattttctttcccgagctggattccatctcacgtttggggagaatccttcacaaccacaagttactctccgtgagaagcttctaatggatgcgggtgcaattgctgggtttcttactggcttgcgtgtatatcttgatgacccaactaaagtaaagcgtttacttcttccgactaaaatatcttgtaatgatagaagcaagctaataaagagtgatgaatcttcccctagcctaatgaatttgctgatgggtgttaaagttctacagcaagccattattgatttacttctagatattatggttgagtgttgccaaccttcagaggaaggctctcactctgagccgtctttattatccccaaagacagatggttgcgtggctgcaacttcatcggagtcaacaagggaacgaggagcagcagaaccttcgcaacatcttgttgacgaaagatttaaatctgatacagatgctaccctcagtacctcagctgtaccaagctcagagatgaatgggatcgatttgcttgagaaagcccttgcaatagagcctatgtctcctcctaccacatctgctgggcaatcttctgatgcttcagtccaatcaaaggtggggctctcatactgcttaaatctatctaccagcgttttgttttgctccgttgtttttctgaccatctggttaaatttttggtctttagacaaaatggccggaacagtctgaggagctattgggactgattgtgaattcacttaaaacccttgatgcggctgttccacaaggttgtccagagcctagacgacgaccacactctgctcaaaagattgctcttgttttagacagagcacccgaacatttgcaaccagatttagttagtctggttcccaaattggttgag

SEQ ID NO: 147749 - DNA, 878 bp, Arabidopsis thaliana landsberg
aacacactttaaaacacattacacactctaatacttttaaggttttaaattctaatcaatggcttcttcttctcttttggtcaccatcttcctctgcatctctgtcttcttcttttcgtccgtgaatgcaaatgaggttaccgtcggtggaaaatccggtgactggaagatccctccttcctcttctttctcctttaacgaatgggctcaaaaggctcgcttcaaagtcggcgactttatcggtaaatccataattttcaacttttttttttcaattagacattttgtgtgatcttcaatatactctgtttctgacatcgtcacatgtttattacagtattcaagtacgaagccggtaaagactcggttctgcaagtgacacgagaagcttacgagaaatgcaacaccactagccctaaagccagctacaccgacgggaacacaaaggtgaagcttgaccaagctggtccggtctacttcatcagtggaacagagggtcattgtcaaaagggtcagaagctacgcctagtcgtcatcactcctcgtaactctgctttctctccaggtccttcgccatctgagttcgacggtccagccgtagctcctactagtggtgtcgctaagctcgccggcggatttagtgtcgtatttgggcttgttcttggattatgggccttcttcttttaaaagacaattagtcttaattctatttattaattttggaatataaagtagaaatctttgttatttactacattaaatttatattaatctaaattgttcttcctctttttcaattctggataaattagttggatctatcaaccatcaacaaagaaaacataacaaaagtgaatgagaattttgaatttagtacc

SEQ ID NO: 147750 - DNA, 1098 bp, Arabidopsis thaliana landsberg
tctcctgtccttttttcatatataataattcatcataaatatttattgatttgattctatctcttatatatattttcgatctctcctgaaaagagaaaaaagttggaaacttcgacgaatgtgtttataaatctttttattttctatctgtcttgatttagttttatcttttttggaatcggtctgaagttggacaaaagaatccgccattttctcctcggtctctctgctcttctcttcagtatcggatctgggtctccttcgctttcgtttcaaggtaacacaaaaaaaacttcaaattcttttctcttttattcacaccattttcgctttctttttcctttttcttctttaatctttgtgactgttctatatcaatcttcatttaacatttgcattctcatcacttatcagtattttctgatatccaatttctgggttttcgaattcgattcgataagaatatttatttcatttttttttttaatgtagtagtatatgttttttccccaaagtcacggcattggaaaaaaggaaaaagacagctgttccttgcttcaagcccgagattaagcaaaaataattactatttctttcttttaaaaaaatattcgaatcaacgcactatataaaattacctacttttgacagtatctgaattaaacatcaaccaaacttcaaactctctcctctgtaatccattctttttgtattcccaaccacgtgattttttgattcggtaattatccatattctacactacgattattaagcattaaaatttatcgattggtgaaaaaattaaacttcgtgattttggcttttgcagattattttgggagacgaggaggcgttagctgtaattcattgtatacttgctttggctattaaagccgtcacacaaaaaaagtaaaagcaacacacacacataaatagacacacttttttacgtatatgtgtgtcttctttcgtctctgttgggaatagatcttgtcctaagagatcacttcgagtctgatctaaagtgagaaactttggttcttgttttggtttttggaatcttgtctaatctggggagattatgggaatgaatcttga

SEQ ID NO: 147751 - DNA, 341 bp, Arabidopsis thaliana landsberg
  unsure (1)..(341): unsure at all n locations
gagactttatcgatgaaaggactgactctaaactgtatggaccgcanaactgaagcatatgagcttgttcgacttggagtgaaggtttgaatatgctcttcaataatcacaactttattccttagtttccaaaatggtattttgttttcagggtaacataggatttatatacttcaaattttttcatgcagaatgatatcaaaagccatgtttgctggcatgtgcttggtcttttgtaccggtcagacagagagtatagagaagcaatcaaatgctaccgaaatgctcttagaatagatcctgataaccttgaaatactcagagacctctcacttctgcag

SEQ ID NO: 147752 - DNA, 1502 bp, Arabidopsis thaliana landsberg
atggagagaagaacgttgatgatgattatgatgcttacgacggtggtgacgctgacgtggcagaagcaatgctatggatggggaacggagacagcagaggatatggttagaaacgaagcagagcatgctaaaaacgcagccgagaccgctaagaaaatggcgtccgatgcggctcatgacacaaaggacaaaaccgcctcttgggctggttgggtttcgacaaaatttccacgtaagcgttaacttttgtttaggcatgatcatacttctattttggatctgtgttggtttcttctaatggaaccattttctcatagtgtttgatttcaaattgtaaacgtagatctgagttttgttttaagagaaatttgaaatgtatatataaacgcatgttacgcatcatttgcatttcaaactgtgaagtgatttaagaatgataatatatagatgattgatccaatattgtaacagaggattgggaggcaagaaagctgaggcagaagaagcggctgaatctgcgaagaactacgcttatgacaaggctggatccgcctatgacaatgcgggttacgccaaggactttgcatcagacaaagccggatctgcttacgatagtgctcataacgcaaaacattatgcttatgataaggctggtgatgcaaaagacatggcctacgataagaccggtcaagccaaggacatggcttacgacaaagcaggatcagcctacgaaaaggccggtcaagccaaggacatggcctacgacaaggcgggtcaagctaaagacatggcctacgacaaggtgggcatcagcctacgacaagacaggtcaagccaaggacatggcctacgacaaagcaggatcagcatctgagaagcatggtcaagccaaagactttgcctatgacagggcatggtcacgcaaaagacgctgcctataacaaagcagaggatgtgattaagatggctacggatacgagtggtgaagctaaagatagtgcgtatggaacatacgaaagattcaaagaaggatctaagaatgctaaagacattgcatcggataaagctcacgatgttagagaaaccgcagggcgagcggtggactatgctaaagacaaagcaaatgatgcatacgaatcggggagcgaagcagccggaagattcgacgaggcaatgcataaggttggggagaggtatggtgcagctaaggattctatgtcggagaacacaaaagaagcttatgagagtgcaaaggagaaggcttctgatgctgctggtgagtacggttcatatatgagagaccgtagcgctgagctttagaactgaaaaaattataacgtatagccgtatagggtaagtttgcatttagatttcaaatcttcgtttgtacaataaatttcttatatatatgtgtatatcagcagtatatgtatatgtaagaatggtggagttgcttgtattagttgcaaaatcagattctcaatgaaaggcgagttgtttct

SEQ ID NO: 147753 - DNA, 805 bp, Arabidopsis thaliana landsberg
tgatctctcaagtgaagaatctctctctatctctatcttcttccattgatcctttcctctctctggcttgtttcagagctcttcgatcttcttcttgatcgatctacgtgccactgtttataccattcacgatctaatccggtttcaattattactcacgaaatcgtaagtgaatcaaaaactgtttacaatctttctaattattgatcatcatcatcatcatcaaaatatttgtgaatatctatggtataattcgatgatcattgattgttttgactttttgagaatatatatggaaactactgtttcgttgtatggatcagtgatctagaattttgccatgtttcgtttactttatgagattttggatttcgttatgtttgacactaaaatactctgtttgattgaaggaaggaagatgagatcggttcaagcaccagttgtttgtcctgcaattcgaccaagacaagtaggtgcatgtgcttcactagtcaactacactggtctgaaacctagaagccaattttggggtaatcggacaaaaggtgtcaagtctcagggcactaccacaacaatcactcttagattgtgcaacaagagtatcaagtgtgttttcagctctcactctgatggtaatggaagcactgctgaaaatttcaatgaaaatgatgaggaatatgttaactctagtgtagtggaagctggtaagttagtggggattagtagagtttccttgtttggtttgatttagttcttttagtttttcaaagttggtgtctttttgggtgtttttgaatggtgtgtt

SEQ ID NO: 147754 - DNA, 1204 bp, Arabidopsis thaliana landsberg
atggtgggaagaagaactggtaagaactattctcagaaagttttcttgcttgtctgagaactaatttttctaacttagaaaataataattatatctgtgtgtcgacagtctcacattcggaccttgagcgggaggataatggagactattttaagtctacgattctttatcttccagtatggtattgtctacaaactgaagctacaaggatcagatacatcatttgcggtacagcgctccccttcattgactacttgtatctacgcctttgcatatcttagtctgctagtatttgtgcttaataatatcactcatctatctgcaggtgtacggttggtcatgggttgcatttgcaatgattatagttcttttcaaggttagtttattccatcagcatgcttcattttccgataacctttgatcctcggactaaatttgattacatgatctgagatatctcccatgtgaactttgaaataggtctttaccttcagccagaagatttctgtcaatttccagcttttactgaggtttatacaaggtctatccttattgatggctctagctggcataatcgtagcagttgtgctcacacccttgtcagtgacagacatatttgcatgcgtattggcttttataccgacaggatggggaattctttctgtaagttgttcttcttgctcacctcagataccttgatttctttctcatctctgcagattcctgctaattttgacaaacaaatcttctcctgttgtagattgcgtgtgcttggaagccagtcctaatgcgaatggggatagtgaaatcgattcgttccctagcatggttatatgatgcgttaatgggaatgctcaggtggcttcccgttgctctctgctcctggctcccttttgtgtcgaccttccagacacgtatgatgtttaaccaagccttcagccgcggtctcgagatctctcttattcttgcaggagacaatcccaattctggtctttaaacttttggaagctgttatgtttatgtttttcatacatttatttgtgtttagttttccgagtgtagcagtagtaaatgatgggagcctctctgtagctttaggcattttaagacttctgtaacatttgtccccaaaaaagaaaagactttttgtaaaacataacctagaatctttaagatattacgtagaaatgtctttggaaagaaa

SEQ ID NO: 147755 - DNA, 2479 bp, Arabidopsis thaliana landsberg
  unsure (1)..(2479): unsure at all n locations
gcaagaagacaaagattttgaagaaggtgtggtgagttccgagtcaattggaagaggaagagtgggtaacgtgcttaagaagtatgcggtaaaagccctactttgtcaaacttatttcttgctttatacgaatgatgaattggtccactttaaagatgtatccaaatgatttctatttttttttaatagaaataaatgaatgatagtaacaattataaaaatgcagccgagaaaagcaagcaaatatgtgaaaataaagatcgtacaatttccaaatgaaatgttatcatctaggacattaatttggcctacgcattcaaatttcgatttggtttgattctagtttcggaatttagaactggtccacttaaaaatatcgaaatgatttgtacttaaaaaagaagaagcaagtagatgattgatacttgacccaaaaagagatgatttatagaatttatcaagcaatccacaacaaatgtcaatgtgaaaattaagatcattccaaagcaaaaacattcttatgtaaataataccaaaaactaactcttatgtcactaatgtcatttttttggagtagcttaaaatttaattttggataataattgcgtcgtttctacaaccgactaatttgtaaaaaaattataaggtttactacaaagataagttttcaaagtcgttactttcatttttttaaaacattgccaattcaaaagtaataaacaatataattactattgtttagtattcaagtttgtaaaatttgataaataatatatccaaacacgttttcttaataacactccaattttttcttaatgtataatactgtaaaaatattttttaaaatgtatataaaattatactacatatattttaaatttcttagaattgatccgtattttttgatttgcagacttaatggattggagtgttttactatatcgcttgtatttgtgaatcagtttattcattccggttggaccaaaacaaaagaaagaaatttcgagtcctgatcaacaatgccactgaannnnnnnnnnnnnnnnnnnnnnnnnnnttttgatctgcatgccactcttgtagtggataatatctatttacccttaatgaattatatcaattaattttaaaagataaatcaaaaacaaaatccaaatcgaaatcgaaataatcaatcccgacccaacccaattaattccgacccaattcatttaattcgagccgacatttaattccgacgagataggcgatttccgattaacttccgacatcggcgattttcgacattggctccgtcgagtctggggaaactttgctaggtcagctaatccaattctctgggcgtcgatttctccggtgctgcatgctacgtgagtcgatactattggatcgaattctttattgatctttgttgcggctactctggaaacgatccttctttagttcttccatctactgtaagtattatagttagtacaatgtaattgaattgaatcaatgtgtaagcagaatcaaaccatatttgcagaatacaatggatggacgaactgaaattgaatcagacactggtacatctcgtggttcaactggtactaatatagtgtttatatttgtaggaggcgatgaagaagaggatccagacgaacctacactttgactgtggagggtactatacagcagaccatgagtggagttgcaaaaattcaatatacggtatagtgtttaagacatcatctttggagagaataacatatgcggatttaatagataagatctgtagaaagattgctctaggtggagagaaaaggaatctgaaattgagttacaagatatttaaagcatggagagagtcttatattgtagataatgaggatgtgttgatatatttaacgtcattggataaagagggatttagacctgttttgcatgtagagttatgcagtgatttggaaagtaataataggcaagttccaatagtaaagcgaagaagttcatgcggtgtaaattatggggaattggctgccaatgttgtaatggttgcggatgtaaatacagaaattctgagtaccaatgaacttattattgaactagaggaacagtgtgagacagttagtgaacctattattgaactagaggaacaacgtgagacagttagtgaacctatgatgctagagaatggagtttctgaaactgttattgaaccgctgatgatagagtgtggggttaatgaagattctgataatgattatgttagggaagaatattgataataggtttttagtcaattaattctaaaacactatcctgtcgttgtagtattttaggtgtcaatccaaatgagtgtgatgcaaacagatgaaatgtgatcagaagtcactaagtcaagccaagcaataacagttttggggtttctaacagtcctaagcgaacatgcagaaaacagaaacaataacagaattactaaaatcactcgactaca

SEQ ID NO: 147756 - DNA, 1393 bp, Arabidopsis thaliana landsberg
  unsure (1)..(1393): unsure at all n locations
agcactaaaggccgcaactgatttacttgacacatctggttcatctgattcaaacctggcaaatcttgtccattcgagtttatgggccattctgattcttttatctaggcttaatcccttacacatagcaagtgaaagtggagatgacctggacccgttcgtttttatgccctttattatgaaatgctctactcaaagtaatctccgtgttcgtgttttggcatcacgtgctctagtaggtcttgtttccaatgagaaactccaaagcgttctgctccgaattgcctcaacattaccttctaatggggcccaaggtgggtccttcaattatcttcacggtattttgttgcaacttggtaatctcctagatacaaactgtagagaccttgctgatgactctaagaaggatcagattattggaaaattgnnnnnnnnnnnnnnnnnnnnnncatggttggcttctccattgacgtgcccttgcccgatcctctgtacatcttttttgagagtgcttgatcatatgcgagtaattgaatggacatgctctgaaagcaaaaatctcagggacatctacaaattgcacttggatctatctacaaattgcttggatgcagatgcttcttatggtttctcctattatgacccttcaatcgctgagcttagagaacaagcagctgtatcttattttggttgcgtatttcagccatctgatgaagcagcggcagtttttcagattactcaaagaccaaatttgcaatcgcagaaagttcctgaagcattagattttcctgaccttaacgaaaggctccttcgttgtatatctgatcaatcatatgaagttcgtcttgcaacactgaagtggtttctgcggtttctgaagtcagaagattccagtttctcagagtcgagcagtatttggaactgggcaaaaaacggtctccaggtgatattattagagctgttggacaaggagaaaaaccataaatgtgagaactacattttaaggattcttttccagtggaatcttcttatgttcaaaaaatcatgtaacgaggaatctgttgaaggcatttacgttggttcgttgaactatgattcggtgtttcatctttggggcaggctgacttctctatatgagagcacacgacgtgctaaaacccgaggtacactcatgtgttgcctggcaatttgtgtgaagcatctcacggggttgttcatccacaaaaacgaatctgaaaaagaagaggaaccaagatggagttgtataactgattgtgtctcctactttgttaacttgatcaaacagaaaagcttaccatccgagcaagtaaatgttcgccatgcatctgcagaggcgattatagcatccggtatactggaacaagcgaagctc

SEQ ID NO: 147757 - DNA, 3696 bp, Arabidopsis thaliana landsberg
acaacatagcggcttttgagtttggtgacgcgcctggcccgggagccattgcaatggctatccaaaatctcgtgcagttgggcgccgtctttgagaagaacggagatcttggactaacacaggaagggcgttgtttactcaagctggggctggaaccaaagcttggaaagaacagtttaggctgcttcagacacagaatgggcaaagaggggattgttcttgctgctgtcatggctaatgctagtagtatattttgcagagttggcaacttcgatgataagatgaaagctgatcgcctaaaggtatgattctgagctcccggttaattttgttattgtggtatttttcttccatagaatgattaccctttcctgttattttacatttttgatttactggtattcacaggttttgaacttttgtagtttaaaatcttcttacaacctgttagaaatatgttctaaagttttttactgtgtcatcttcaaggtgcaattctgcaatcagaatggagacttgttcacttttctttcggtgtacaaagaatgggcatttctgccacgagatagaagaaataaatggtgctgggaaaatagcctgaatgccaaatcaatgaggagatgtgaagacacagtcaaggaattggagatatgcattgagagagaaactactcttgtcagtcctagatacgtgcgattggaatccaaatgagggtactaaacacgacaagcatttgaaaatggtgtatacttgcatgagttgcagaaaacgtggcgatgtacactggctataatcagcttggatacgaggtggcattgactggtcaacaagttcagttacatccatcgtgttcattgctagcatttggccagaagccaagctgggttgttttcggggaacttctatctattgtggaccagtacttggtatgtgtaactgcgtttgattttgaagctttgtatatgcttgatccaccaccaccttttgatgcatcccagatggatgagcggaggctccgaattaaaaaagtggttggttgtagcagcactgtgctaaaacgattctgtgggaaatctaatcgtagtctgctttcaattgtttctcgtgctaggtctctttgttcggatgaaaggattggtattcaagtcgatgttgatcagaatgagattcgactgtatgcgcctcccctcgacatggaaaaagtgtcagcccttgtgaacgatgcattggaatgtgaaaagaaatggatgcataatgaatgtttggagaagtatctatatcatggtcggggacaagtacctattgcactgtttggatctggtgctcagataaagcatcttgaagttgatcagagatttctgacagtcgatgtactttattatggcgatgatgttgttgatgacagagagcttctgacgtttctggagaagaagattgatgggtctatttgctctatatacaagtttgctgcgaacaagcaagactgtgatgagaaggagaagtggggtagaataacctttctcactccagaatctgctatgaaggcaacagaaattcagaaattttatttcaaaggatcagtgctcaaattatttccatcactgtcaactggtggaggaattttcaagatgccttatttctcttccgtgacagctaagattcgttggccgagaagggaaagcagtggtagaggatgtcttaagtgcccttccggagatattcaccgtatacttggtgatatatccagccttgagataggaacaaattatgtccatattcagagagatcaacagtcaaatgattctatcttgataagtggacttggagatctttcggaagcagaagttttagatgttttggaattcagaacgcagagaagagatctgaattttttcatattcagaaaaaaatacagtgtgcagtgcccatctcctacggcttgcgaagaagagcttcataagagaatatttgcgcgcatgtcagcaaagaatccagagccaaactgtgtccaagttcaagtttttgaaccaaaagaagacaattacttcatgcgagcgttaattaagtttgacgggagattacatctcgaagctgcaaaagctttgcaagagttaaatggggaggtgttacctggatgtcttccatggcagaagataaagtgcgaacaattgtttcagagctccataatctgctccgcttctatctacaacactgtcaaaagacaattgaacgttttattagcaaggtttgagagacaaaaaggtaaaatttctacacaacatttgatcttttgctctttaattttctgtcaacaaataaccttactgaatgtctacttctgactccgatattgattaagaacaatcgtgtagggtaagggatatttgaagaatgcataagcttatgtgtcctatttttcctgtgaacttgtccaaattttgatgtgcattaacgtttgtttatatttttgtagggggtgaatgctgtctggaaccaactcataacggggcttatcgtgttaaaattactgcttatgcaacaagacccgttgcggagatgcggagagagcttgaagaactcttaagaggaaaacccataaaccatccaggcttcacacctagagtcgtgcagcatcttatgtccagagatggtattaatctgatgcggaagatccaacaagagacagaaacttacattctattagataggcacaatctcacaatacgcatttgtggaacaagtgagaaaattgccaaggcagaacaagaactggttcagtcacttatggattatcatgagagcaagcaacttgaaatccacctccgaggtcctgagatccgtcctgacctcatgaaggaagttgtgaagcggtttggtccggagctccaaggtatcaaagaaaaggtgcatggtgttgatctcaagctcaatacccggtaccatgttattcaggttcatggaagcaaagaaatgaggcaggaagtacaaaagatggtcaatgaacttgcacgagaaaagagtgcactgggtgaaaaaccagatgagattgaacttgaatgccccatttgcttgtctgaagttgatgatggctactctcttgaaggatgttcacacctcttctgcaaagcttgtttgttggagcaatttgaggcatcgatgagaaactttgacgcattcccaatactttgttctcacatagactgtggagctccaatagtactcgctgatatgagagccctcttatcacaagagaagctcgatgaactcttcagcgcatccttgtcctcttttgtaacatccagtgatggaaagttcaggttttgctccacacctgattgcccttccgtctaccgtgtagctggacctcaagaatctggtgagccattcatctgtggagcatgtcactcagaaatatgcacaaggtgtcacctcgagtatcacccgttaatcacttgtgaaaggtacaaaaagttcaaggaaaatccggacttgtcgctaaaggactgggcaaaagggaagaacgtaaaggagtgtccgatttgcaagtcgacgatagagaagactgatgggtgtaaccatatgaagtgccggtgtggaaagcacatttgttggacctgcttagacgtcttcactcaagaagaaccttgttatgcccatttaaggacaattcatggtggaatcggattagtcgagtaa

SEQ ID NO: 147758 - DNA, 1151 bp, Arabidopsis thaliana landsberg
caaatgagattcatcggcttgttgaaaactctggaaagcatgacagctataagggtagcattcttttaagatctgaagatgtcgtagatacctcagcgaactggagagagtgttctgttaagactctttttcaatcttcgagaggggatgcgtcaaacagttacaatctggttagcagctcggacaagagagagggaaagaagaaggcagacattagtgatgtgagggtggcaatcaaggagcaggagagtgaggtggcaagagctttattctttggtaaatctcaatccacttttgatgacaaaaatatcagtagcttaggttttccacttgtatatgatacccgcaaggaagagtttcctaggcttcctcctgttaagctcaagtctgaagacaatcctctgagtcttcactgtgaagaaaaatttgaacgtgatggttcaggtccaaggctaatcaatgatgaggacgcccttctcataggctcataccttgatgttcccattggacaagaaattagctcatcaggttagattgcatgacaatgtagccgtacaactgcaaagtttccattgtgactgctgaatgacagtgcatgcatttttctcatacccttcattcctataggaactactgtggttatcatatttctactctgcgaatctgctgaagtaacatgtttgaattttgatgaactcatgaattagaacaatgcattggcaaattaccagcatcagttccaaagaaagcaagtaattgtttagctttttgcatgtatctgcaaatgtttgctctcattgtcttcctttcccactctgtttttttttttgatttctataaggaccatgtcgcttcactttctactttttttttagttcaacttgaaccttaccagttttacttcaggtgtgaaagtaagttttaatcttctaattatttcatataggtgggaaaaaatctactgggggaaactggctttcagtaagtcagggaatagcagaggacgcatctgatcttgtttcgggttttgctactattggtgatggtttaagtgaatctgttgactatcgtaatgaatactgggactctgccgagcccgaggatgatgacgacattggttataacagacaacctattgaagatgaaccatg

SEQ ID NO: 147759 - DNA, 1720 bp, Arabidopsis thaliana landsberg; identical to SEQ ID NO: 66102

SEQ ID NO: 147760 - DNA, 890 bp, Arabidopsis thaliana landsberg
tctctatctcacaataaagacatcttttttcttttaatgtctctctgtccctctctcttcttcttcatcttctaacaccaattcaagaaagaaggaagcttaagaagagtctatcatcaatcaatggagtttcatcttgaacatcctctctcacattcttcactccacaataacttcaacgacgacacagacgatgaaactttaccacactctctcttcctcgtcgagtttcaacacatgccttcttctcattacttccatagcctcaagtcctctgcttttcttctctctaatcgaaaccaagccatttcttcaatcactcaggtctttttaaccaaaattattttctgggtttagctctgaatactgaatcgttatcgaaagacttaactttattttaatttgtaactgaacaatcgcagtattcaagaaaattcgacgacccatctctgacgtatcttgctgtgaattatctagacaggttcttgtctagcgaagatatgccggtaaaaacagaatcttccgacagaatctgtcctttgtttcatctgagttttgactaaattgttttgtcaacagcagtcaaagccctggattcttaagctcatatctctctcttgtgtctctttgtctgcaaaaatgaggaaaccagacatgtctgtttctgatcttccggtaacttaaaactcatgaaaaagaatgaatctttataatgtgaatgtgttttaaagtgttgataagtgtctgaacattggatttttttcaggtggaaggtgagttttttgatgctcagatgatagagagaatggagaatgtgattctaggagctcttaaatggaggatgcgctctgttactcctttctcctttttggcctatttcattagtctct

SEQ ID NO: 147761 - DNA, 211 bp, Arabidopsis thaliana landsberg
aagaacctcaaaatcatcttcgtttggtcgttgtcttggggtcctccgaatcaagaacccacaaataacaatcgaggaatctgtgaacgacgacccaattgaacctaaagttgaagactttggacggatttagaaagaaagacccaaaaagatgctgaagagcgaggcatctctctcgatttactgcgactctggagatgggttcaaatcc

SEQ ID NO: 147762 - DNA, 1100 bp, Arabidopsis thaliana landsberg
  unsure (1)..(1100): unsure at all n locations
gagatccagtgccagtatctttgctcatgtccccaaactatattcaaggccctcgctgccatcatgtagcacttgttgccactctttctctcnnnnnnnnnnnnnnnnntatacaattcagtcagaatatatgatcacagcaataaaaagaagagaaagataagacatctctaaagtgataaagtccaaacccacataaaaccctaaaataagagtgattacaaaggtttcaggtctttgactacaagttacagaggtggtagatttgccggaacagaatttgaatttggcagaatctaattaagattatgaataacaatttgacacacacaacagagcttttgcacattttcgttaatccaggaacaggatcggacaacaatggacactactagtgtaatttctagacttaaagagtaacaacgtttggctgtataaaaacaaaactagaaaacggaaccgataaacagatgtgatgatgaatgtaaaaaggattaaaagaagaaggttggttaattaccaaaagagtgccgttgataagaagagggttatcgacgagggagaagaagagttgcttcctggtgggaagaccagcaggtgccgcaaagccggcggggaaatcagccggtaagaaatgattccagacatcgtcggagccggcggcggatctgaagatactggagaccgccgataaacggcaaacgtcgagaggagttgtcaaggaaaggatcttggcgatgcaatcttctgggagattattcattgcttcctccgattgattgcttatttgcttgattgattattttggggtttaaaagatcttttcctctttctcgattatatagatacgacttgttcgatcgagcaaagtatcgctcacatttaatgagttttatactagtagtaaaaaaaagagagacgtggaagtcgtgcattgattatttaaagtaaaaacggatacttagggatgaagccacacgtgtctattccttactcgtttttttcagattactttcctcatgactgactactagagtaagcaacacccacctgtccccttctctttactaattttatccagaaaatcagttttttttttt

SEQ ID NO: 147763 - DNA, 829 bp, Arabidopsis thaliana landsberg
taaactctttccttggattgtgcttactcccaaaaacacacatttaaacatcttagagagatgtcgatctccgcagctgtgcttagtgggttgggtccttcgttcttgatcagtggaggcaagagaagcggcgttggcggtggagctatgaaagttggccggaagaatgtgatcattgcacctcagcgcaagaagtcatgggtctcagccgccgtgaaaggtgctggtaactcaccgaacgaccccaaatggcttgatgatgcctcgtaagtctttttgtttggacatacttgagatctacatagacatcggtcgaataaaacttttaacatatactctaagatgataaacaattcataaacgatgatatgatttagtttttacgtgatttttagtatagaaatttgatacactatggtttagtaataggttccgcatcacttctaagaaaatttaaacttgttttcatgagattgttttggtatacttatgaaatataacttataaatttggttttgaaactaaacactaaaggatgtaatattccttcttttataagcttaagatgaagttgtttacacaattgtatatgagattaaagttttactaaatacccattttgtattcattgtaataattttgtgtaattgtcacacaaacacacaaataatagagagaaagcttcggggtacgtgaaagagaagggaagtgaagtgggaaacgtgtctgctcaaaagggacaagagcttcaaaatcagatggagagagcaaaagactacatttttgggaaagctggtgaagcgatggactcggtggctgaaaatgcaaa

SEQ ID NO: 147764 - DNA, 4763 bp, Arabidopsis thaliana landsberg
  unsure (1)..(4763): unsure at all n locations
gtctcctcacaagcctgccaaaaaacatgcggccaaatacccatcaagtacccgctcggaaccgggtcaggttgcggggacccacgtttcacacgttacatcacgtgtgaccctgaccaacagactttgacgctcaccacccacacaggcagttaccctatcacttctgtcgactacgccaaacaagagatctacgtcactgatccgtccatgtctacgtgtgcatgtacccgacccagccatggattcgggttggattgggacgctccgttttctttccatgacgacaccgtttttacgctccttgactgttccgtagacgaatcccctgtattcacaccgttaagtaacggtagcggacgtgtttccctctgtgatcgtcaaagctcctccatttgcaccttcttgtactcaaattgcaggtaacccaaaattcaaattcaaatcgaaataaattaaaccggctactattctatctaaaccgaaataataaccgtatcaatttctcatttgttctggtgatcacattttaatatttccacacaaaaatttgaaatgggtgaaaaatgtaaatatcatctttcggaaagagttataaagttggtgtaacaagaccaatctgaattatatggaaccggtttacttttggatttgtgtcatctaaagctttacttaattaatccggttataatttccggtttggcagggccataagcctcataaacctccaagtatcaacgtgttgcgtctacgtgcctctagacctcggaccatcgttcgaaatggatttgaacaaactcaagtgctcgtcatactccggcttctacaacctcggtccaggccaagaatcccacccggagaattggaactacggaatcgcactcaagtacaagttcaacgtttttgatgagtaccctggcgtctgcggtagctgcgagcgtagtaacggtgcttgtggcttcaacacacagtcaagctcgttcgtttgtaactgtcccggtgggattaacacgacatcggattgcttcttcctttataactctgcttctattcttgttccttggttctcaagtaagcaccactctcacacttctactatatctagtcaaattattaatttatattgaacaccacactgtctcatagataatcttgtctcagctataacttattacttctcaattgaattttcagacaaaaaacttttacattttttattagtatttaacagtatatagatttgtcttacagagagtggttttttttataagcaggagaatgggtaatgtaccctttgtcatggtttgttgtttggatggtgatggttctgcgttaaaggagcatcaaaggatggagtggttcaaagaggaagcttaatagatcgaatctttgcttcttctttttataactttgtgatatcacagtatgagattcttcgatattgcttctctctttgcaatattattcaaatcaccatttatcttatttgcttttcctccactttccagctcataaggaatcaccatactatattaatgctaaacacttgcaaagaatcataatgatgatgatggtattagtcaactcgctgagactatatacttcaatatctatataacatgaaactaaaaattacgtacctatggattgcaaatacaataacaaagctttaccgtttttgagatagtgtaaaatttatcaaacagggatcttaacctataatatatttcactcgtcttgttaaaatttggacccaaaaattgcaaaatatattatttactgtaaactatagactatacactatagtattagtattgccatgagctcatggattagaagattttacttaagaggttcagtccggtttacaattgtacaatcatccaaaaaatcaattggtgtcatcttatcacaagaaaaattgattgtcattgcatttttaaaatcactatttattaataatatcaatcaataaaaattactaaaagtaaagaaaaaacctagaaaatcaatttttgtggaacaaacaaaaaacctaaaacaccaatttttttaggaacaaatacaaacggagtaataaataggaattagggtttgtaacaaagggtgagaaatgaacttaccttcgttttgcatacccattgctgtgttctcgttgttgatgccattttgcatccccatgaactaacaactagaactgatttgctttaaaaaagaatccaataataaaagattaccaagtagtgattgttcttaaataaatgtggcccagagaggcccagtaatggcaaggacgtggaagcaatttcccagagtcaaggagtctatatctctctcgctggccttgctgtacccaaatttgccgccttgtccttcgcattttccaacctcctctgttttcatcattcaatttctctattgctttctggatctggaattttttttgaaaatggaagcgagagaaagaggatcaatgtcgtctagcatcggcaattccgctgaactcgaagggaatctgacacttagtgatcgtcttaaggttttcaaaggctcaactttcgatcccgacgcttatgtcacctccaaatgtcaacgtatgaacgaaaaggtcttcttcctcctcctcatctccgcattattatcatgtgtttgtacattgtgtcatcttgttgaatcagctcgatattgttgttggtgtgttttcgtttacaggagacaaggcatttgtcttcttacctcgttgaattgaagaaagcttctgcagaggagatgcgtaagagcgtctacgcaaactacgctgcctttatacggtgtgtgtgtgtgtgttatctttttaattatcgttatttgttgttagttagtttcttcatgcatgttacttgttgttgatgatgtgcatgcagaacatctaaggagatttcagctcttgaaggacaacttctttctatgagaaaccttctctctgctcaagcagctcttgttcacggtttagctgatggtgttcacattagttccttatgcgctgatgacgctgacgacttaagagacgaagacttgtacgatatggataacaaacagctgtcgaatattgagaattgggttgtggagtttttcgatagacttgaagttctcttagctgagaagagagttgaggaatccatggctgcgttagaagaagggcgtcgtgtggccgtagaagcacatgagaaacggactctcagtcccaccactcttctttctctgaacaatgcaatcaaagaaaagagacaagagttggctgatcaattggcagaagctattagccaaccttctacaagaggaggtgagcttagatcagctgttttgtctctcaagaaactcggggacggttctcgcgcacacacattgcttcttaggtcttacgagcggaggctacaagccaacattcaaagccttagagcttctaacacttcttatggggtagcatttgccgctgcgctctctcagcttgttttctcaacgattgctcaagctgcgagcgactctcaagcagttgttggagaggatccagcctatacatcagagcttgtgacatgggctgttaaacaagcagagtcgtttgctcttttgctgaaaagacatactttggcttcatctgctgctgcaggaagcttaagggtaaccgcagagtgtgtccaactctgcgcatcacactgctcttcattggagtctcgcggtttagctctttcccctgttttgttgaaacactttaggccgggcgtggaacaagcactgactggaaatctcaagaggattgaacaaagcagtgcggctttagctgcttcggatgattggtcactctcttatacaccaacaggatcacgcgcctcatcaactactcccactgcaccacatctcaagctttctataagcgctcaaagattcaattccatggttcaggtaatcaacatttctcacacaatcatatttgctacttgagtttatatttttccttgctataagtttattgtttctgtggaactttaggaatttctagaggatgctggaccgctggatgaagcattacagttagacgggattgcactagacggtgttttgcaagtttttaactcatacgttgatctcttgatcaacgcattgcctggttcagctgaaaacgaagagaatccagttcatagaatagttaaagtagctgaaactgagtcacagcaaacggctttgttagtcaatgtacttcttttagcagacgagctaattccacgttcnnnnnnnnnnnnnnnnnnnnnnnnnnnnnnnnnnnncactccaagaagaggttcctcagataggcagaaccgaccagagcaaagagaatggaagaagaagcttcaaagatcagtggatcgactaagagatagcttctgcagacaacatgcacttgaactcatcttcactgaagaaggagaagtccgtctcagctctgagatttatatcctcatggacgaaaccactgaagagcctgaatggttcccttcaccaattttccaggaactgtttgcgaaattgacgaggatagccatgattgtgagcgatatgtttgtggggagagagagattcgcgacgatattgctgatgagactgacggagacagtgattctttggatatctgatgatcagagtttctgggaagagatggagacaggagataaaccattaggtccacttggtcttcaacagttttacctggacatggagttcgtgatgatctttgcctcgcaaggaag

SEQ ID NO: 147765 - DNA, 305 bp, Arabidopsis thaliana landsberg
ttctgtcatcggagcaattcaaggcatggttactgttttagccgttgtcactcccggagcaggtttcagtcatggttcttttgaggttttttgtttactctaagtctctaagtttatttatgattaaggttgaattatgtggaaacttattaatattgcattgttaatttattatactgacaaataagatatctattgcaggtttgatccaaacatgggcagctataataattggagtagtctcaggaacagctccatgggcctctatgatgatcattcacaagaaatccgctctccttcaaaag

SEQ ID NO: 147766 - DNA, 649 bp, Arabidopsis thaliana landsberg
ctttcgatggcgttgcttgcagagacgacaaagatacttcaagtgatctcagctccaagcctatcaacgaccgattcagtgccgcgtcctcgtctgtcctgtctctcaccggatcatagtctctgtttctctcaaactcacacatcaatggctccgtttctggcttcaagtgctctgcttctttaaccagcttggatctatctagaaactctctttcgggtcctgtaacgactctaacaagccttggttcttgctccggtctgaagtttcttaacgtctcttccaatacacttgattttcccgggaaagtttcaggtgggttgaagctaaacagcttggaagttctggatctttctgcgaattcaatctccggtgctaacgtcgttggttgggttctctccgatgggtgtggagagttgaaacatttagcgattagcggaaacaaaatcagtggagacgtcgatgtttctcgctgcgtgaatctcgagtttctcgatgtttcctccaacaatttctccactgggattcctttcctcggagattgctctgctctgcaacatcttgacatctgcgggaacaaattatccggcgatttctcccgtgctatctctacttgcacagagctcaagttgttgaacatccttagtta

SEQ ID NO: 147767 - DNA, 304 bp, Arabidopsis thaliana landsberg
cgctgagggcgatagagcttgtgcagaaaacagcaaaaaacggaagcttaagactcctatgcaagttatggcgcttgagaatttctacaatggtaaattatggctttgttgtttgcatatgttcctttataccaagttgtatatgctttacaggtgtgatttggtttttctacagagcataagtatccgactgaagaaatgaagggcaagttagcagaggaagttggattaactgagaagcaagtttcaggttggttctgccatagaaggttaaaagacaaacgtcatgtaaagaagatggaat

SEQ ID NO: 147768 - DNA, 1047 bp, Arabidopsis thaliana landsberg
tttcatagtcgacatgtgttatacaagaggctcagctttgggtggaggagaaggatccgatcatatctgtcgccttctctcacgtgagatcgataacgtgctgggcttaatatattgatccactagtatgtgggccttgatatatggcccactaatggataagagtgagaaatagtgaaagggcacaaaatagctcatcccaattcccaacagctttcttgtctctcccgtctttttaaaaaaaacataattaattctccattttttctgttcgtttgagttattttttttcctacggtaaaaagacaataaaaaaattaaaacggtaagatttatgtttgtttatagattaattaacgatcttatgtaataaaagtaggagaaattcttgttttttgcctgcgaaatttgagttttcattgttttaaaaaaagaaacaaagaatgtttaatctgggaaaaacaaacgtttacgtattttgataaaagtgaaaaagtggtagttagaagaaaaaagaaaaagagagcgatgttaatggcgatgagtttattgggatttgttatataaaaaacagattgaaagataagagaagaagagagagaggtacctcttgcttcttctttctctcacgcacctctttgaagattcttctcttaccttttggattcgcctcttcttcttcgattttgagtttgattctaattttggatccagagggtttatttatgtgaatgattccgattttggggaacttgttcgtctgaaatgttttgttgaaccggttgcgtcatcggtgcgtcttttcatggtcgttaagagtttcatgattgcatcggtgttgtgagttttacgatgctgttgttgttgatgagctgattttttttttttttttttcctggtgattatttgtctcctatgtgaaacattcttaagtatttttgatcagattgatttgatcacaagtttatcccgttgcaatctctctgtttcattctgtgaacgctcatgtggatcactgatttgtttgatcacttgtgcaagattttt

SEQ ID NO: 147769 - DNA, 3627 bp, Arabidopsis thaliana landsberg
  unsure (1)..(3627): unsure at all n locations
agatgaataatgagcattagcaatgatggacggcgtaaactgcgacgagggctatagaaatcctttttgttgtccgtttagtgagagttatccgggtctttttctctggagtcattcggactacacacaacattggtggcgtacaaggtgtccgtgggaattattaccggctagaaatctggaattgtcagactctactcatacccgaacgatgaacctgcaaactcctcgtatgagctcactttcaggatctaggaaagatttgtggtttgctatacgggaaggttcgctggttatgtggattcagcacttagcatactcaagaagactggtggcaatataaatttaaggaatgcctatggtctcactcctctgcatattgctgtatggagaaatcacattcctattgttaggagactgcttgctgctggcgctgatccagatgctagggtttgtgacttttcctctttttgtgtcatcatatatttaaatatctgtttcttcagtttataatctttaatctacaagttccatgtttgtaattaattctacctatttatgtctcttttcagtatctgtctctatgtttgttgcatatattgtgttcataatgcttggaaaattgagcttgctctatattgtacaatgtccatttcaggatggagaatctggttggagtagtcttcaccgagctttgcattttggccatctcgcggtagctagcgtattgattgactcaggtgcttcttttactctagaagacataaaactgcgaacaccggttgatttggtctcaggtccagtggctcaggttattggcgagcaacaaagttcgggtaactaatattttctctttgatctttaaggagaaccttaatcagtcttgacactttttcttacgcaacttttgagaagctgaaatgttggcttcatttttcttttcagtggctacagaggttttcagctggggaaatggtgcaaactaccaacttggaactggcaatcaacatgttcagaaggtaccagggagagttgattcactgcatggttgttttattaagttggtttccgctgcaaagtttcatagtgttgccattagtactcatggagaagtctacacgtggggatttggaaggggtggccgccttggacatcctgaatttgacattcataggtatgcattgttgtaaattcactgatatggtgactggaggaggagcttaattgcttttattccgacaaagttttcatggtctactttgttgcgtctatatgaagatttctacttgcctatggcgttactgtggtttcaaaatttaccttgcttgatttctgatggaacattgaaagataaaaacagtcttctattctaagcgtacatagaatcataggttggtagttttttttgtagcttaccataggcttttcgtaagtttatataaaccacaattgagtttatttttctggtttgctatctcagtggtcaagctgcagttattactccccgccaggtgatatctggtttaggatctcgccgtgtaaaagcagttgcggcagctaagcaccacactgttattgctacagaaggcggggatgtgtacacatggggttccaatagaggtaaaacacttaaacggcttcctatatttcaggaatggatctttagtgctatagtatactcaagttttagtttcgacctctaagcccagtttcttagttaatctgaattagatggaaatatattcaatctatttgggtcacctcgtggtcttttatcttagagtctgatgttgtttgtgatgctcttgtagagggtcagcttggttatacctctgtggatactcaggcaacaccccgcaaagtgacttcattgaaggcgaagattgtagctgtttctgcagcaaacaaacacaccgccgtagtttctgactgcggtgaagttttcacttggggatgcaacaaggaaggtcagcttggttatggaacctccaactcagcatcaaactactctcccagattggttgattacttgaaaggaaaagtgttcacggctattgcatcttcaaaatatcacactctagtgctgcgaaatgatggagaggtaaaatttcttactacatgttaagttaaacgttttaatactattatttcagtgtgtaaagtttatagaatgtatgaactagagtatgagaactcaatttggataaaaatttatttttcttcagtatttctttctttcttctgtgaccaggtgtacacctggggtcatcggctggtgactccaagacgtgttatcatttcccggaatttaaagaaagctgggaacacactattgaatttttcacggaagaagacctcttcgattgactgcaatagctacgggtatggtacacagcttggctctagcagaagatggtgcattcttttattgggtttcctctgactccaatcttagatgccaacaggttggattcaaccttcttttttttatcttaaaaaacatataactcaatatgtctcgcatagtaataaccaaaatttggttaatcctgattcctgcagttgcattcgctgcacggtaaaacagttgtgagcatttcagcgggtaaatactgggcatctgctgttactagtacaggtgaagtttacatgtgggatgggaagaatggtaaagatattgcaccatctctttctcgcctccacaacttgaaaagggcaaccacagttgctgttggcgaaactcatcttctggttgttggttctctgtatcatcctgcatatgctcctattgtgcttaagaagtctcagacactgcaagctgataaatgtagggaagaagaaaatgaagaactggatgagggttttatgtttgacgatgtggaatccgtgaacgtgttacaatccgtgcaatacgataatcctaaggagaggatagtgcctagcttgaaaagtttatgcgagaaggtggccgcggagtgtattgtagagccacgaaatgctattcaattgcttgaannnnnnnnnnnnnnnnnnnnnnnnnnnnnnnnnnnnnnnnnnnnnnnaatgcaagccttccctatgtgatgattgcacactaaaccgtagagatacaaactttagagaagtttatgttcagtgttctctttctatgttgtggctgatgattaccttacacgtgtgttctccctgcaggacattgtgattcgaaaccttgactttattttgacattttctccccaatctattgcaaatacatcacctgatgttcttgccaatcttgagaaattactggatgacagatcatctgaaacatggagctcccgaccacttccaaccccaacagccacatttcctgttgttattgacagtgaagaggaggaaagtgagagcgacattctaagaactcgtgacagccatgtgaaacacttttccagtattggtggtactcgaatggattcattcttgcaaccagaagatgagctgactcaacacaattccaaagaagtccgagctttgaggaaaaagttgcaacaaattgagatacttgaagcaaaacaaaaaaaagggcaacttcttgatggtcagcaaatagcaaaacttcaaaagaaagtagagatcgaaagttaa

SEQ ID NO: 147770 - DNA, 529 bp, Arabidopsis thaliana landsberg
tcaaaatttttgtcaatttgaaatctctttgactcttctttcaccgccgcagttaaaaacctcgtgtgattcttcttcttcatatagattcccagaaacatcgaaactggtgaaccgtgtacgcttcgtcgttagtgatgcggagacgaaagatatcgccggaaaatcattggcctagattcaatccattagagactcatcggagacgtctacgttagcgtacccaatcctcctcctcttctgggttgtttgctgatcacacatatcttctttcttcgattctctctcaggtgattctttctttctccgatcacttttccggtctattgtgtaatccacgcaccaaaaaatcagatcttggaactcaaattccttatttgcagcttgagtttattaaaagtctttgtctttctgggtttatactataagttgattaactttgacatctaatgtgtattcgctggtaacagggcgtgtcctgtgtaatcgtttagtggatgtgcaatgcaaaggtcgtgtagaactggct

SEQ ID NO: 147771 - DNA, 146 bp, Arabidopsis thaliana landsberg
ctctcacgaagcagaattgaagaaaaacatggagagaggagtttcttattatctatggattccttttaagttcatccaccaaactttcggatctcttttactcaagcttctcggtttgcgatctccatctgatcatagttttccgg

SEQ ID NO: 147772 - DNA, 929 bp, Arabidopsis thaliana landsberg
ggttcacatttttgcttcataatgagtggaaatatgaacctttgtccagctacgtttaccgaacacgtctagaggaaacagagcaatattggaaaggctggtatgaccatcattacctcttgtattcctgagacggttgaatattaagagttgttagttgcaacagttgccgttgtgaatctgagtgcaaacatttacctctcttgaatagtttttgattcgaacaatgttaattgccctgcaggtacgatggtctctcagagaagtttttgtcatctccagttccgaaactcttgctattagctggaactgataggttggacaggtatattcctctacccccctctggaactcaggtctcaacttaaattgaatcgaaatctgtagtgttttgtaataacgatgttgatggattggattaggaccctcacaattggtcaaatgcaaggaaagtttcagatgattgtggtcaaacacaccggacatgccatacaggtataaatgcgatcgcctaatgatctttatgtcgagtcttttatgcaatgatgatatacgtggaatacaggaagatgtaccggaggagtttgcgaatctagttctgaatttcatatcacgtaacagaatcggtcctcatggtgttgaggtttgtggctgtgttgtgtatcagtatcactctttctttgcaactttagtcttaaaagtctgattatatgattcgtttgttacagataccaggaatgtggaaaccttcacaacagactaagacttgaagcagccatcactggacaagccaaagtcgtcgtgtggctctactcacttgtttcgctttgtccgtttatgaataaacagaattaacaaactctagctcgtgttaaggagttggcaatacaagaagaaaacagagtaaaaagattaaaatcactttctat

SEQ ID NO: 147773 - DNA, 3181 bp, Arabidopsis thaliana landsberg
gatactggtgggtttgtagatgaaaaaggtgagaacagattatatgttggaaacctggatcttagaataaacgagtaagtgaatcacagcttgttatattacctccacaccatagatcaaaactttgctcaataccttataagtttctcttcgtcacagggcttcgttgataaaaatgttttctccatatgggaagatcatatcagaagacttcctttggcacacacgcgggccaaagaaaggagaacctcggggttatgctttcattcaatacagccttaaagaggtaactaacaatctggctctcttggttttgcatttgtacttggatgaaattgtttcaagaaatgaaaaatgttttgattttgattgagcaatctcctgatttctacatctaaagtgagcatacaggaagctgaattggcgaaagagaagatgcatgggagattagcttgtggtaggcctttagtggtgcgtctagctagtgagaagcatctagaagattcctctcatgatcactccaaaagatcattaccagaaggaaacagaaccagatttgtaaacgggagcagctcaggacaaatgagccgagacgaaaaagtaactgccattaagaacaaactcaaagctttgaaagaagatgagaaacgtgatcccaagaaacagaaaatttaagaaaacggttttcaaacacacaactttgggtctatgtgactctgtgactctgaccatttttcagttttggtttgatttgatttggtttaccggtttaatcgaaaccaattttgatttaatatttcggtttggctcagtgtgatatataaaatttgtaatggaaagcaaaagttgacgcactaataggcacactgagtcaattccactaatcacttcccttttccaccttttcctcgtcgtgaagcagacgcgacaaatggcgacgagcttgccattactcaatgtgatcggaaactcgttaccgtcgtcgtcgagactatttcgtcggcgttcgtacattgtttcacgccaagatctacctgaattctcagctaaatcaacctcttcaaggcttagcttctctcctgcttcgttgtcgcaatttcgtaacggaaccgacaggtttctgtcgccggaatcatcatctccgatccgatcggttactgtgagttcgttgagtacgcctctcatttctcccaacgatgaatggggaacttggactgctctcttcgctactggtgctctcggtctctggtacgatcatcactctttatagaacttcgatcgttactttatctgatcggagatttgaattttacgttgtgttgattcttaagtgaagttgattttgtgtgataccaattgtgaagtttgaaatcggaaatggtgtgggattgattgtataggtcggagaagacaaaggtcggagccgctatgagtggtgcgttagtcagcactctagttggtcttgcagctagtaatttagggatcatttcttctcaagctcctgcttttgctgttgtgttgaattttctgcttccattagctgttcctctgttgttgtttagagctgatttgcgtcgtgtggttcagtccactggaaagcttctcttggcctttttgattggatcaggtataaggatcataacattcacactattcctatggttatgctcttgatatttctgactttgaattatcagaaaaacctgagcctttgctatttcataacagttgccacaacggtgggtacagctctggcatactatttagtgccaatgaagtcacttggccctgatagttggaagattgcagctgctctcatgggaagacatatcggtggaggtaacaaaaaattcatgtctttgaacatctgcatctgtatcttccattttcttgacgcgccaatattgttcacttatttctatagtggtgtataagttgcattgtgattattttttttccagccgtcaactacgtagctatatcaaatgctcttggagttacaccatcggttttagctgctggactggctgctgataatgttatatgcgctgtatatttcacgacattgtttgctttgggctccaaaatacctgcagaagctgtaccgccaccgactactagtaagtctgaatgttgctgtgatgtctggtttcgtttgatttggcttcctttggaattgatcattgaggttgtgtaaatattcagttagaaagtcatttctattggattagatatccagaggaaaatgttctgttccattcctttttcatgtcgattctagccagtttctgaactctgacttaggtattactctcctatggcagttgtagatgcagagacgaacgaagcttctgaaactaaaaataaaattcctgtgctactgatagctactggaattgctgtgtcattagctatctgcaaggctggggctttgctaacaaagtacttcggattttcgggtggtagcttaccggctataacagcggttgttgttattttagcaactgtctttccgtcccagtttggtcgtcttgctccatctggagaagccatggctctaattttgatgcaggtatgagacaagaaattcaagaacgatgcaaccttcttgatattaatcaagctagttttctttcaggtgttcttcacagtggtgggtgcaagcggaaacatatggagtgtgatcaacacggcgccgagcatattcttgtttgcattggttcaaattgggacacatctggctgtgatattgggcataggaaagctgctaaacatcgagctaaggttactgcttctagcatcaaatgctaatgtcggaggacccacgaccgcagctggaatggcgacggcaaagggatggaactcgttgatagttcccgggattctggccggaatatttgggatcgccattgcaactttcataggaattgcatttggagttaaagttcttaagttcatgtgaagatggtagtataactaaactatggacctgactctgctcagtgctcactctctctctctatatatatatatatatatatatatattgatttatattgtaaaccccacaaaatttcaagttggcttaatttgccaaagggttccttactgtgttttattttgaggctttgtaccttcgaatgaatttgtttcataccacgtagctcattactatctcttt

SEQ ID NO: 147774 - DNA, 384 bp, Arabidopsis thaliana landsberg
  unsure (1)..(384): unsure at all n locations
atgaagatggaggaattaagcctgatatgttggtaagtcttagcgaaatagcntgtgtttctctttttctcttgtactcatttgttactatctgatataatgaaaactactttataaattgaacatatttactctttttaggtatctttgactgccccaaaattatgtgcaaagagattccgtggccctcatcactttttaggtgggagatttgtaccaccttctgttgcagaaaagtataagctggagctccctagttacccagggacatctatgtgtgttagaattggtaaacctcccaaagttgacatatctgctatgagagtgaactatgtctctccagaattgcttgaggagcaggttgaaactgatcctacggtacag

SEQ ID NO: 147775 - DNA, 4027 bp, Arabidopsis thaliana landsberg
gtccaattgcatctcagtggatttccacccttttggtgagttttttgcgtcaggctcactagacacaaatcttaagatatgggatatacgaaaaaagggctgcatccatacttacaagggtcacacgcgaggagtcaatgtactcagattcaccccagatggtcgctgggttgtatctggaggagaggacaacattgttaaggttggtagctgctttcatgtcactagtcatttttcagttctgggtatgtgattttatcttgtctactgaggagggaaatacagctgcttagttgacataattagtttggatttacctttgggagaatttggagcaatgaaactgcgcttttggttatagactatgaactggctttcgagagttggtaggaataagcttttgttctaattctctttgtatgtatctcatgaatgacgttctgtagtaagcatgcccttttaagtgtggaggagaacttgcgactatttagtgttacctctctgcacctgagctgagtatgctatatgagagtatttaggacgtactattcttttgcattttgctaaaacccacatagaccaccctggccaactatttcggatgcttcatctctctcggttattgcttctttacctctctcagcgcactgtattgttatcttgaaaagcaatttaccgggaacctttttttttatctttctgtgtgttaatggatctgatatgcagcttgtctttaccaggtttgggatttaacagctggaaaactgctgaccgagtttaagagtcatgaagggcaaattcaaagcctagattttcatcctcatgaattcctactggcaacaggtttgtattactcttaaaaatttctaacaccaacacaaaataaaacttctaggctaagagtgtctgatcacaactgtattgcggttaccagcccagcccaaccagttatatagatccctgtgtcatggcgtcatcttctttttatgtaattgaaactcttgtggccatcttatctttttagctctgtgatttgagatctggaagtaaatatgcatctaaagtatttttcatttctttggtcatattattgagggtgtgtgtaacatagatattttcagaatggtgctgtgttgtgtagataacaatagaatgccgacgttttaataatgactacttctctcactctctgttaacgttcacctaaatatttacatggaatatgtaaaattagtgtgattacaaatatttgaagcattctgtttttgcctgtgctaacaggttcagctgatagaactgtaaaattctgggatctggaaacattcgagctgattggttctggtggacctgaggtacaacttgttttacgctaagtcaaattggtgacattttattttccctctacctttaatattctcattttcgctagactgccggggtccgttgcttgagtttcaatccagatggaaagactgtgctttgtggatagcaagaaagtctcaaggtaaaatcttctatacttggatagcgagtatgtagattcttaaattagatatatgttaattgaacaactcatcttttgaaggattcgttcttaggttaactcgtatgctttcgaaaacaacatacgtactcttctaacctcactcctttggtttaatcctgtgcaaattgtagattttctcatgggagccaataagatgtcatgatggagtggatgttggatggtcaaacttgtcggatatgaatgttcacgagggaaagcttctcggttgctcatacaatcaaaattgtgtaggcgtttgggttgtagacctctcggtatatctctctctctctccccctacatgctttgttatagtttggcctgtaccatacttgttatctctaagctctccattcaattttctaatgacactctcagcgcactgagcctatgagtggaggtgccactcagtcaaattctcatccagagaaaacatcaggctcaggcagagatcaagcaggtctgaacgataacagctcaaaggttattctcggaaagttgcctggttcccagaaagtggatcctttattgaaggaaacaaagtctcttggaaaattatcagtttctcaaaactcggatccgttgccaaaagatacaaagtctactggaaggtcatcagtatctcaaagttcagatcctttggtaaaggaaccaaagcctctcggaaggttttcagctactcacagctcagacacagtaaaagagtcaagaaccctgtcatgtatgtttttactttgctctattttttctttctcttttcacttttttgttataattttgctgcttactaaatgatatcacatcttttggtttgtctgctgtttgttgaagccacaggaagtgtatcagactctcctcacagggttactttgaccagtgctccaaaaagtgcttctggtatttctacagttgtccctaatgttgcagcctcaaagagaaattttggaagagctaacccaaaggcgaatcctccagtagtcaataaagaggattattttccagtaatcgtccccagatcggagccaataattgagcaggcatctgaatccagagcagaacttgacattatcggaagaactatgccatattcgctgcagtcaaaggccgctgattctcgaaggctgtcgagcagcagaaatgagccagatctaccaaccagttcgcttcttgaaaggtctcagtctcaacctatagaaccaatcactttacaagatgggaatacatatcctagtgacgaaggtggctcctgggatacagctgagagaacaaataaagagagcaaatgcagggtatttggaaggtttaattcaagatcactggtgagatcacctccgagaaatcacgacgaaaactgtatgtttacaagcctttctagtcttcctttgttttagagcaaatataaatggcatttcgtattgctaagacatcgtggcatcttaaatctggagaacacttttctaagtttctgagggacttgggtttatatttatgagatcctaggaatcagtctttaagtatacatgttgcttgtagtacaatttgtttcagtaaaacaactttttgtttagttggtccttcaatattatagatagatgtgtctgagttttctggatgctgttctcagttctgggctaactaactctttattccagctgacttgattagctataatgcaaatagagattcaagtcctactgaaagccgaaaaggaggtaactctttcccaacattcgttttttcttttgtttttcccttttaatgtgcgtaagaaaagattctaattgtgtgccttgacatactaggaagactgcattccctcgttctaaatagggaaagaagaggaagattttctaactttgagggtcctgtttcgagttcttctggtggaaatatgactgcaccaaacagtcgcccttccaatatggtaatggcttttaattttagttttctttttaatttgggatctgagactataaaatagaaactgtaaaaccgaagaatgaggaaggacaaaataaagagtgacgagtaattagtcagatgtcagatccttttcattagaactcaatttcaactgggcctgcatcttcagcgtattggcagacataaaatttcccagttactacagagatactgatgacattacttcctttcatacagctcaagcagagaggaaatcatgtgccagttgatcaaggaatcacttcagctagcgaagaagatatagttgcagacataatggggcaacacgatcaatttgtcagctctatgcactctcgtttggctaagttacaggtaacagcatgaaagtacactatgataatgcttttggtctgtttcctaattagaatgctagcagtaatccttcataggtttccataaacattgtttatcttctaaataatgtcaccaaatttgcaggtcgtccgtagatattgggaaagaaatgatattaaaaactcgataagttcaatagagaag

SEQ ID NO: 147776 - DNA, 382 bp, Arabidopsis thaliana landsberg
tagaaaaactcttaagattactcacttttgtagcatttccaacatgccatcctcattaaaaatcgaactggttagtatgcttttcatcttgaatctactggttgaaacaactctgtaacaatctgctgaagatattattaacgatctattttactgagatgtttcaggtgccctgcagtaaggacaactatgcttatctgttgcacgatgaagacaccggaacagttggagtcgttgatccttctgaggctgcacctgttatagaagcattgagcaggaagaattggaatttaacttacattttgaatactcatcatcatgatgatcacattggggggaatgctgaattgaaagaaaggtatggcgcaaaggtaagaggata

SEQ ID NO: 147777 - DNA, 3565 bp, Arabidopsis thaliana landsberg
gtcccaaatcaacaagaaaccccgctaatagattttaaagctgacctgttttgactgcactatctttactcatagcaagcagctcatctttgctctttccaatagtatgggacaagtcctacagagcggggagctagagtaaataaacaagctaggttcaactatctgacgatcatgtgttttcatcagtccttaccggaagtggaaagcatggtgactgcatgtaagcagaattgaagtgtttaatacattctgtcgttgtcttactaccaacatggtctgcaacttctttccaattgccaaacccgtatgtcacaatggcctaacacagtcaatttacttcccaatagtcagatggaatctctatatagacatgggagtgtacaatcagaaacgattaatgattacctcaagaaggagtatctcttcatcggcattccaatcagaagtaacaagcaaaaaagacaaattgtcctgtcaaacaaaagggtagattcaatacaaacaaaaatacaaccatagaacattttctttgttttaaacacaatcactaatctaattacttttcagctgacaaagcgttgaattgaattcaaatatactgctcggcgttggaaactaaccataacacgatatgggtgactgttcttgtgacgattaagttcaacgccgacagaaaagcattccacacaaagatcaaagtccatacaaacagcacatttgaaacgaaccaaaccagacagatctttatcgcaatagttacaacagtaaaggccaggtttcctctcattcccagcttcaattcctacaatgtattggtacatgtaagaacttttggaaaacgcagcttggtacatgatacatcaatgcatatctatccacagcagaaactttagtcctatcagtatcacacctaattgcacaagtaaacggaaacctaccggtggaaattgatgccgcagcattctcaggacccaatgatatctttttcctttttgattttctgaaacagccaaaatcatcaaaattaggataaagacaagagacgacagcagtatgaaatcaagagccacccacaagtaccaaaagaactccgattcagataatcaaacacagctaagtggattaccagatattgaaatgttttcgcaaagacaagtaattgaacagagaaaaccctagacgacttcgagctaagatggacaaagaacgaaactttaaacgaaccctggattcaggtcttcctcagcaggacgagaagctagtttcgaacgacccatcggcaccaagctcgcacttcttcccggcagattgaagaaaaaaccagaagagcgagaaaacgctaaaaagcagtgaaaaaatggtaagtcggtaaatgactaaattacccttaacaagtgtcaataattatgttcacgccatctttaaaccctacggcagttgtcagtggtcacgtctctctcttaacctaaccaatccaaagttgccgctagggtcaccggaaaacttcagagttgtgtcttctattgaattctccgggaaggtaaagaagattagtgggttttgattgtgctgtataaagatgtgtactttgtttgagctgtctcttaaaccctagcaccaatccgtgaaccttgaagtttgtaattccggtagaaattcctcagcagttgatctaattcgttctctgtgtagtattagtgatggggctttctcttggggaacaacgatttcattaaaggtgggattgctcaagatcttcgaactgatggtaggaaaagattgacttaccgtcctatctacgtcgaaaccggtgttattccgcaggtagtgtaatctcctagagctcgtccgcttctcattgttgcttcccagttgtttaacagatatgttctttctcttgtttttgttggctctaggctaatggttcagcgagagttagaattggtggaaccgatgtgattgctagtgtaaaggtacttcctttgttctctctgctactgttctattgttgaatgggaagcgctattgtagatgttacccagtaatcttgtgtaattgcaggctgaaattgggaggccaagttcacttcaacccgataaaggaaaggttgcagttttcattgattgcagtccaacagctgaaccgacatttggggtgagcttttcttttatttcgtttggttttggttctatctagcacttgtcacacccgttctatcgttctattggtgtttctcttactagtggaattgttcaacatgagattttggttatcattacttttcttcagaatctcctaaattctactgtgttaagtctttaggcggctaattctttgtgatatgttgttacttaggggagaggaggtgaggaattgtcttctgagcttgctttggctcttcaaagatgtcttctgggtggcaaaagtggagcaggtctgcaatcatgtttatgcaatgcttttttttacctgcacactgttacgctttctgtttgtaacgtttatagcaattcatgttttggtaccaggagctggaataaatttatcttcgcttttaatcaaagaaggaaaagtttgctgggacctttatattgatggtcttgtcattagttcggatgggaatctattggatgccctgggtgctgccattaaggtaattcttgtgatgtgtgtttggttttctctcttaacccttagtctcaggttttagttacgaatgttagtgagtaaatcatacccatcaatcagaatcatgagaaaggaaaggccagagaatataggaaacgaaagggaatgggtctttagttaagtgtatatagattagctcaatgtagttgtcttgttattggttttagtagctttacgatatgtttccaattgatagtttaagcaacccaaaagtcatctttcctcaaggctgatcacatgctttaatgcacttgttgactatactcctgcaggctgctttaaccaacacggccatcccaaaagtcaatgtttcagctgaagtagcagatgatgagcaaccagagattgacatcagcgacgaggaatatcttcaatttgacacttccagtgtcccggtcatagtcacgttaacaaaagtaatcgaatctcacttttcttgattcacatcgacatcttcttatgtacatttcgctaatcttttaccatgctgtccttggtttttgcaggtgggaacgcattacatagttgatgcaacagcagaagaggagtctcagatgagctcagctgtatctatatctgtgaatcggacaggccatatatgtgggttaaccaaacgaggcgggtctggcttagacccaagcgtcatccttgacatgatctctgttgccaagcatgtgacagagactctgatgagcaaacttgattcagagatttcagccgcagaggcctgcgaagacgaatcttgactcttgagtctcagagaatcaaagtttcaagatgaaacatgttagcaagggatcaacaatatttgtatctgtggaaaatcttatacgaagtcagaacagattaagctaatcaaaatcctttttcctat

SEQ ID NO: 147778 - DNA, 1125 bp, Arabidopsis thaliana landsberg
ttaagttctacgctgatgtcgtttgaagatgatgatatgactacccaggggagattttcctttgcgaattcgaagatgaagaagattgatgggattctctgaattttgtgttgctccatcggacaagcttgaagtcttggtggttcctggtggttttggagttccctgcaatgactaaccaaatcggcggtggccgtgataacaaatgtttcttctgcccacgtgcttcaacctcgcttgataacttacatgtggttttgcggtggactacatcaattacttcctaaaagggtttcttgcttcaactgggctttaatttagttggacttttatctttattttgtttttgtctggagactgaaagcggaggtttccactcttttgtaatctttacaatctttggtttaaataagagacaacacttatgagcaaaaaaaaaaaaaagtagacatacaaaagtcaacaggcagttaccataaattaccaaacagattaacaaaggaacttcggagttatggtcaaacaaagaaagtaaatgaaaaacatatcagtgtatgtgaggcaggcgtgtgatggatcatactactgcagttctttctccagttcatcgaattcccatccatcaacctcatctgcagagtaatcacgagccaccttaccaaattcagattccagctcggctagttcggcttcagggttaaactcttgactggaaccagctgcaggattgggtgcctgaggagaattgctcagctctggcttttgggtctgagtagattcagttgaagcattcatgctactactgctaggcttgggagatttgggtgatgtagcactgcttttaggggatgtaacactgcttctaggtgatggaatctctatctctaacgttggcctcgctatggattcaaattgctgcctcattttctccatgtcatcaaacagctctttcacacgccggtcgtcctttctggtataatgtaggatttcagaactttagtacaataaatctataccgattactgaaaggtcacataattatgtttccactcacttatccagtttgctttggagaacctggaattgctctttcacgttgtccacaatgctgaatgtggtaatgat

SEQ ID NO: 147779 - DNA, 840 bp, Arabidopsis thaliana landsberg
ttcatggaaattgtgcctacaggcatttgaagggagaagatatacagtctcccaactgaaaaatctgatggctgtcgagcacgccattgaacatggcctcgacaaagtccgagaccaccaggtatgtatacatttctacatacattcatacacatgtatatatttaacttcttatttggtctgcttggcacagatggagatccttatatcaaagaggagaaatgtgagcatataactaatcttatagtactctacttcttagctttcggattgaaatatgtattaatggttgcatcattctttcttaacaggagaagatgatggcggaggagcaacggcaactcactttccagctggtatacatataatgaatcttcatgcatttataagttttaataatgatttggtttgaaactattagtatgtttatgtaaggatatggtttttggaaattgcagcaacaacaggagatggctatagcaagcaacgcaagaggaatgatgatgagagatcatgatgggcagtttggatatagagtgcaaccgattcagccaaatcttcaggaaaagattatgtctttggtcatcgattgatcatcgagattttataatctcatcctgatcaactcctatctatactatcgtggtctttagtttgtctttatcaatctgtgtgtcttaatctcgagcaacatatatactcgctatcagactttttacttaagctatatgtgtgttgtttgcttatgacctctatgtattggtcgtgttgtgtgcttaaacgtttcgaactaattgatctgtgtgaaacgttattattctgtgataagctatttgtgat

SEQ ID NO: 147780 - DNA, 1450 bp, Arabidopsis thaliana landsberg
ggggttcaggatggatggccaagcgcttctgttgtttgcagtcactccagagtcagtcaacttgtttagtatgcaggcgcacaccgaaattgcagactttggatcatattgggggcagtgtgaatactgttacaatgagtgaccgctcggtacatacttcgcttcttctgacttgttgattttagaatatgttcttctatatcttctagccagttgaaatatgttgtgttctacaggaattaatagttggtcgacctgaggctgtttacttctatgaagttgatggacgtggtccttgctgggcttttgaaggagagaaaaaattcatggggtggttccgtggctaccttttatgtgtcattgatgattctaaaactgggaacactgtttttaatgtctacgacctcaggaatcggcttatagcatatagcattgtcgttgataaagtctccaacatgctctgcgaatggggaaacataatacttataaaggctgacaaatccttattgtgcattaccgagaaggatatggaaagcaagttagatatgctgttcaagaaaaacctgtacacagtagctattaatcttgtccagagtcaacatgccgatgctgctgctactgccaatgtgatgaggaagtatggagatcatttatatggcaaacaggactttgacgaagctatgttacagtacattaacacaattggttatcttgaaccatcatttgtgatacaaaagtttctggatgcacagaggatctacaatcttactaattacctggagaagttgcatgagaagggtctagcatcaaaagaccacacaactcttttgctaaactgtacactaagttgaaggatgtagaaaagctgaacacgttcattagaaaagaagatggcatcggtgagctcaagtttgatgtggaaacagccattagggtctgtcgtgcagctaattaccatgagcatgcaatgtacgttgcaaaaaaggcaagaaaacatgagtggtatttgaaaattttgcttgaagatcttggaaactacgatgaagccctgcaatatgtttcaagtcttgaacccagtcaagctggggtaacaatagaacagtatggtaagattcttatagagcacgagccaaaagagactattgatatactcatgcgacttggcactgagcaagggatgcccaatggtgtgttcctgtccaagtagcaagcacatgtggacttcatcactgtgtttgttcagcatccgcattcattaatgcattttctcgagagatacgctgaaatagttcaggattctcctgctcaagcagaaatcaataacacactcttggaattatacttgtctagggacttgaattttccatcaatctctctaaccgaaacccgtctagataaggtcttaatagatcataaggtagaagctgcggtgtctaaagccgatcctgaa

SEQ ID NO: 147781 - DNA, 328 bp, Arabidopsis thaliana landsberg
gtttcttcattatattttgttaagtccactcttctctctcatatcttctaaccaaaacagagtcacaaggggctcttaagcccttccaactaaattcttttcttttgttctcttgaaactgaatccaccagacaaaaaaatgggggttgatggtgaactgaaaaagaagaaatgcatcattgctggggttatcacagccttgctcgttctcatggttgtcgctgttggcatcacaacatcaagaaacaccagtcattcagaaaaaatcgtccctgtgcagattaaaacagccaccacggcagttgaaacagtttgtgcaccgtacttt

SEQ ID NO: 147782 - DNA, 1227 bp, Arabidopsis thaliana landsberg
atgcatgacgaccgtcaaggtgcagatgcagagtttaagattgagattcagacattagctcaagttactcatttgagtttggttaaatactatggatttgttgttcacaacgacgagaagattctcgttgtggagtatgtacccaatggaactcttagagatcacttggattgtgagtacacatcctactactatcttctttttgtatatattcatttcaagctaatcgatcaatgtgaatctgtttgtaggtaaggaaggaaagactctcgacatggcgactcggttagatatcgcaaccgatgtagctcatgccataacctatcttcacatgtatacacgtaagtccattgtaaacctagattccttctttttctttcatggcaattgtacttattctatgtctcatttgctttgcatgtgttatagaaccacctatcatccacagagatatcaaatcttcaaacattctcctcactgagaatttcagagccaaggttgctgatttcgggtttgcaagattagctccagataccgattcaggagccacgcatgtgtcaacacaagtcaaaggaaccgctggttacttagacccagagtacttaacaacgtatcaactcacagagaaaagtgacgtctactcttttggtgtactgctcgtcgagcttctcacaggtcggcgtcccattgagcttagcagaggacaaaaagaacgcatcaccattagatgggtaacactaaacattctcttagctactataaagtaagttcaacaagtttttgattcatgtgtaatggttgtgatttgatcaggcgatcaagaagttcacgagtggagatacgatatcggtattggacccgaagctagaacaaaattcagcgaacaacttagcattagagaaggtattggagatggcgtttcaatgtctagctcctcatagacgttcgagaccaagcatgaaaaaatgcagtgagattttgtggggaattcgtaaagattacagagagttgctcaacacaagtctttgatgatattattctctacgcttatataatatggttttgaatacacaattatatattatttgtttgaatattaatttgtcatacacgatgcattcttgtacgagaattgttgatttgtaatagattttgaaatttgtagtattatattaacgtgtatttggtgttaataaattgagttattatcattctatctggaccttt

SEQ ID NO: 147783 - DNA, 1894 bp, Arabidopsis thaliana landsberg
atgaataatacgtggtttagagtaactaacaaacgtaaataaaataacaatatttctccctactcgtggcaacataagctgaacagagccaagtacaaacaagttgactttctgctacaaactttgactatcccgacaagaaaaaaccttaagattgatcaggaaggatctcatcggttcttctatcttgtctctgaccattcttcttcttcttcttctcaacaacacttctgataatttaacattgcatctcctactcattctcatcgtcttcgtcttcaatcttctacacgaatgtcgcagtgaaattttttgactctttcagcttcttctcgccatctctaatggcgatcccttccttcctctctccaaatttacacttttacccttctaccaaactcgatccgagtcgactcactctttcctcatcctccttcgtttgttgtttatcagtagaccgccaaattaaccattcctccgtctccaacgaaacctccggcttacgagttgtcatatccgccggaggcaccgccggacacatctcttcagccttagcgatcggagacgagctaaaatcagccgacccacttgctcgaatcctcttcatcggattcccaaacagtatggagagcacgacggttccatccgccggattcgatttctcaacaatctccaccgtcggatcatcatcgtcccgaccattcctctgtttcacctctttcctcaaattccctctccgcttgatccaatccaccttcgaatcctacaaaattctccgtgaactaaaaccacaaatcgtcattggcaccggaggacacgcctctttcccggtctgtttcgccgccgtgatctcaagaaccaaattcgtaatccaagaacaagattcaatccctggaaccactaattggattctctctttcttcgccgatacaattttcgctcctttcaattgtacagtcactaacctccctaaacgagtcgccgcgaagtgtgttgtctacggaaacccgataagacaaacgcttagacggtattcgtcgaaaggagcggcgcgtgtgagcttcttcggacagtgggctggagctgtgtcggaagcgaaagttgtgcttttgcttggtgggtctttaggagccaatgctattaacatagctttgcttaactgttactcgcagttgttgtctgaacatgagaactggttctttgtttggcaaactggtgttgaagctttcgatgaaatggatagtcttgttagaagtcatcctcgtctctttctatctccgtgagttatacaacaacatttttaactgtttagctgcttttgtattgactaataactcaaaatgtgttttattatgtggtataaggtttttgaggtcgataggtgtggcgtatgcggctgcagatttgttatctcgagagctggtgcaatgacttgctcagagattatggctttaggcaaaccttctattctggtatttgaaatctttaagctgattcatctaatttgcttgtggagtgtgttctttcttgtcttgaagcagtgaatgttctttttgtttttgttagataccatcaccacatagcgatgaaggggatcaagtaaggaatgcttctttaatggcggacattgttggatcaaagttaataacagaagaggagctagatacgatcactcttagagctgccatggaagatattctaggtgactaaaaactctacaaagtagaaaacactcacaaatttcaactctcattatctcattgagttggttccaaatgatagggaatgaagaactgatgatggaaatgagcgagcgggcattcaaagctgcgaaaccggacgctgcatcagatgttgctaaacacattatttctattatcaaatccaaagataa

SEQ ID NO: 147784 - DNA, 403 bp, Arabidopsis thaliana landsberg
gctgcttagtgttacccggcgagtccacgcgttctgagtcaactcgtccgatctactttcccgtcgctaaacttcaaagtatacattgtccgggaagatacggtgatcaaccttatctcttcttcaatcagacaagctttagagaatccattgaactatgctcggaactacctcggagatattcttgatccatgcgtagacagagtcatttacctagactcggacatcatcgtcgtcgacgacataacaaagctttggaacacgactttaacagagtcaagaatcatcggagctccggagtattgtcacgctaacttcacaaagtacttcacttcagggttctggtccgacccggctttacccggattcttctcgggtcgaaagccttgttatttcaacacgg

SEQ ID NO: 147785 - DNA, 517 bp, Arabidopsis thaliana landsberg
gatttctctcacagcggaggagttggcaccacgtcacctacgggcgacaccgaacctgtgccaaagttccgtactaaccttaaattgtcggatcttttcgctctccctggtgaagatgtcgagatgactccggagatttttggtggaatgagtaatggggaaaaagaatgtctggagaagttgagaagcaatggaacgccaatggaacgtgtcaagagcaatacaggagattcaattcttcatattgctgctaaatggggtcatctggaactagtgaaggagattatctttgaatgtccatgccttctattcgagcaaaactcaagccgtcagacaccgctacatgtggctgctcatggcggtcataccaaagttgttgaggctcttgttgcatcggtaacatctgctttagctagtctgagtactgaagagagtgagagaccgaatcccacatgtcttaaggacagagatggaatactgctctgtactacgccattgaaggacgctatttggagat

SEQ ID NO: 147786 - DNA, 444 bp, Arabidopsis thaliana landsberg
  unsure (1)..(444): unsure at all n locations
tccatgaagaacttaaagatggttttcttaagatcctctttatctctttaatggcaggagtattcatgttatgatctaagancaacgtagaagatctccaaaagttctccctccaccatacacagaacaacctccaaaccataagccttctattgtttcttgtcgttattgtgtggatcctctacatgttaacccgacctaaacccgtttaccttgttgatttctcctgctaccttccaccgtcgcatctcaaggtcagtatccaaaccctaatgggacacgcaagacgtgcaagagaagcaggcatgtgttggaagaacaaagagagcgaccatttagttgacttccaggagaagattcttgaacgttccggtcttggtcaagaaacctacatccccgagggtcttcagtgcttcccacttcagcaaggcatgggtgcttcac

SEQ ID NO: 147787 - DNA, 631 bp, Arabidopsis thaliana landsberg
atcaccgattctgagagaacaccgaatatgaccgccgattcaaccgtcgcactcgttcatagcgtcgtttctaacggtgatgtctccaacggaaacacctccgcttcctctaagaaatctcgtgagattgaccgtcgccgccgcagacggaagcagaagaagaacaacaaagcatcccaagccgatgtagatgcatcggacgtttctgctgcttctgaatccaaagagaatacagatccccagccacaggttaactttgtgctcatcttctcgtactcgattcatggagaggtgttctagggtttttcttagggtttgtgattgtttatcgtttgctgatgatttttggtatatgtttctctttgataggtttctgagcagattgtgatagagtatgttccagagcaagctgaatttgaagatggttttaacgatgagtttaaggaaatcttcgagaagttcaacttccgcgaacctcttgcctctgaagaagacggtacgaaagatgagtctgaggagaaagaagatgtcaaaaagaaggccacctctgattctgattcagacgacgacgagcaagataatcagaacaaagagaaaggcatctctaataagaagaaaagggtgtagctca

SEQ ID NO: 147788 - DNA, 579 bp, Arabidopsis thaliana landsberg
gtaaagctcgagcaaggcattaaagtcatcaagatttcaaggaccacgcaagcaagacatgcatcctcgatgattttgagttctatgagaatcgtcaaaagattatccaagaaaggaaaagcaaacacctgcagatcaaaaaacaggcaacaatcctctctgaaaccaacaattcattgatatatataattatataacaggaatatcttacaaattttggtattgtttccaagcagacattggtggccaatgcagacaaaggtgtaatgtcaaaaattaatcttgtgaaacctcaagagtctactacagcctcagaagatgcagcagcactaggagttgcggctgaagtgactaaagaatcgaaagtagtgaaagagaccgagttacctgtggagaaaaatgctgttgctactgcctgctgaaccaacctttggttttaagtgggaactgggtgggctgttttaggctatttagagcgtttctctagttttgtttccattcatgaatttgcagacttttttttttttttttttggaaccgagttgagagggtagtggcttagtagatgaagttttggca

SEQ ID NO: 147789 - DNA, 492 bp, Arabidopsis thaliana landsberg
gagcttgttgaatcactcatagaaggaaacgatttcgtgccttacattcttgagaggttagctagaatagctccaacgaaagaagaacaatcagccattcttgaattcgacggtgacacggcaaagcttgctgatgcggagacgtttctgtttcatcttcttaaatccgtgccaaccgcgtttacgagactaaacgcgtttctctttagggctaattattatccagagatggctcatcatagcaaatgtttacaaacgttggatttagcttgtaaagagctgagatctcgtggcttgtttgtgaagcttttggaggcaatacttaaagctggaaacagaatgaacgcgggtaccgcgagaggaaacgctcaagcgtttaatctaaccgcgcttttgaagctttcggatgttaaaagcgttgatgggaagacttctttgcttaactttgtagtgaggaagttgttagatcggaaggaaaacgttgtgttatga

SEQ ID NO: 147790 - DNA, 2505 bp, Arabidopsis thaliana landsberg
agcactctgtgtgcctctgcaaattaacaatttcctcagaacaattacatttcgattcgattcgattctcttatcttcttgatctctgtttgttcatctgtggtggatctccagatgttggtttcgagaattttgtcgcgagtaacccgcagcgcgggcatacgctcatctctatccgccgtcactcttccggcgaggaatctgactcctgttttctcgagccggtttcactccctagctcacgatttctcgcataaggttcgattttcactcaaattaatcactattcatgccgaaattgcaattcagggttttgttagggtttaaggctttccctcatttgagtttctagaaatgattgctatcttctgatactgtttccttgatctcttatgtttgaatcttcagatatatgaataagcaatagaagaatggtttagattctctataggtttttgctctgtatcatttcactgagtttaacccattttacttttttttttgggggcagcttgttccagctcagatgtctatgatggattcgtttgcactgcaaaggttcaatttttcttcctctacctcgcctgaatcagatgagaagaagacccacactgaggcctcaaagacaagtgaagagaaacctacagctgaggcaaaccaaccaggtcttgactctgaatctaaagattctgtgacagattctgcgaaaagaaagcggaaaggtgctaaaggagctgcatcttcatcttctgaatcagattctgagagtgatgatgatgaattgtcagccgatgatttggtgaagctcgtagctgagaaggaagagctactgtctgagaaggaagaagagattaagcagttgaaagacaaagttcttcgcacttatgctgagatggagaatgtcatggacagaacaagacgtgatgctgaaaacaccaaaaagtatgccgtacaggttagtctttaagaacttagtttgcagcttttgtttcatataatagttttctgaaatatatatgttcactatatatgtatgcagaattttgcaaagagcctattggatgtggcggataatcttggaagagcttcttcggttgtcaaagaaagcttctcaaagcttgacacctcagaagattctgctggagcagctccactattaaagacccttttagaaggagtggagatgactgagaaacagcttgctgaggtaaatatcgagaaatgtaattataagaccttaagtaagcaatgcagatgagaccggttaaacatgtgtgccgctgcaggtatttaagaaatttggtatggagaagtatgatcctataaacgagccatttgatccaaacagacataacgcagtgttccaagtccctgatgcttctaagccagaaggcacagttgctcatgtcttgaaggtaaatatataaagcttgctcaattctttgtctctttatttcatattgtatagtcttaaataccaattagtaatgatgggtgtcaatatgtgcagtctggatacacgctgtatgaccgagttataagaccagctgaggttggtgttacccagggaggagagaaccaagaagaaaagaaagagtctgatgcttaagaagaagtcagctggttttcataaattttgttacggttctatgtttccattaacatcttctcgagtcttcgagtcatagttttcttttgtggtttggttattcattagatgaacaagatctcccataagttgctggacatggcatttgcaggggaaatcctgcttctgtgtctgttttctctatctccatgctataattgaacgaggaaaatatcattttacatctcttctactcgcacactattaccaagtctctgtttgattagttaaatcagatacaaatcaaggttttacatggtctgatacaaccagaaactaaccatagagaaagaagctgaaaacagagtcacaaaacttgcactcactatttaaaacctcccttgcaacttatgttgaagaatgtctccgagcttttcataaagcattttctgctcctcgtgtcccaggctcctcgatatctgcaggtataatacaatcaattatttacaatgcctccgtattcttggcttatatgatgattcttacctggtctaggatcatctcgacactgtagtcccgattaacaatgaaagattggatgtagatgtatgcgaaaaccgccataaccatctgcatttaggcaacaagattcgtttaaaacgatgcaaagatcatattgcacttttcgacgttagtgactcttacttggcaatccattctgtcagtaaatcctccatgtcctggtatgctgtctccgaaatcctgtcaaagcgacataaactagtaaatatttgttcttggatctgtagatacaaaaccttttaatgtttgaaaaatgtgttaaccttgatcttgaaagctcttttgaaaccgcttgcgaagaagccaccaaaaggcgccataatggatgcgaatag

SEQ ID NO: 147791 - DNA, 537 bp, Arabidopsis thaliana landsberg
ttttataataggctaataattccattttctattatcttatccgtcaccccttctctatatataaaaccattttcactttcctataacgtacgtgataacccctatatatatctcaatggccggttcggttatggttccgtccgtttcaatcggtttagccttatctgtcttaatcttcttcgctctttccctcaagacccttgaagctcgtggaaccttcggcaggcttgccggacagccaccgcagaggactgctgccggcggcatatgcgcttcttctgttcacatatttggttacaagtgcgaagaacatgatgtacgtacgacattctttttttttctatatagctattgatgatgattactcatcgatatattaactgataaagctgttattttaattgttaaattatgaaggtggtgactcaagatgggtacatattgaatatgcaaaggataccggaaggacgaaccggagccgtcgccggagattggggaaagcgacaacctgtcctaatacaacatggaattcttgtc

SEQ ID NO: 147792 - DNA, 1010 bp, Arabidopsis thaliana landsberg
aaacacattgatcaagaatctcatctctaagataaaagttcggtggcaatcaggaaggaacagctcaggagaactggacatcaaggatgcaattcagacagctctccagacgactgtgatggatgttttgctcccagatccgctaacatttggtttcagactggtcagaaacggtctggagaaggatcctgagacaaaggctgagtccccattttcaaagggatctgttctgtcacatgaagtcactcctatggaggttctggtccgcaataacactagcgaagctatcaagttgaatctaagtgttacttgcagagatgtagctggacagaactgcactgaaggagctgatgccactgtcctctgggctggtaagattcctgtcactaagtaataaatatttgtgtaacatagatatttgctgccattatagccgtgtgtattacaatgagatatgtaaaaggtggcttatacttttgtcaggtgctcttagtggaatctcaatggaagtagcgccgctgcaagaagcaagacactgtttttcactctacttccttgttccaggagagtacacgatggtagcagctgctgtaattgaagacgctaacaatgtactcagagcacgagcaggaactgcttctccaaacgaacccatcttctgtcgtggaccgccttttcatgtctgtgtagctggaggtgcactgtgattcgttaaccaaatcaggtcttggcattataatttatactctgttttttgctctgttagttgatttctcgagaatcaattataagttccgggtttaagtatgggtctttataaatatctctataattgcttgtgtgtttgtctctgtatttaccttgggttatcttatgaccaccatgcatagactatgcttttttggaattttacggcctcggttctgagactacttttctcaaagtaagtgtttgtactctgctcagtgggatcactttcagtgataaaaagaataaaacgattatagcat

SEQ ID NO: 147793 - DNA, 1784 bp, Arabidopsis thaliana landsberg
atgactacagtattgacaagagaatacctcgatgtacgccctgatgggtggtttgactacgcagctatgagaattgcacagttgtatgattctaaacgtttttgtctaatggtttgcttgtgttgtttgatctttcttgttgaactctttgatcttttgggtttcaggggagctgataagtgttataatcgtacattgtgtgaagagcatcttaatgtgattcttccagcgaagcctccttttcacccacggcagtttcataaatgcgctgttgttggaaattctggagatctgttaaaaacagagttcggagaagagattgacagtcatgatgctgtatttcgagacaatgaagctcctgtcaatgaggtaataatatgtctaacactctgatttctttgagtttaccgacacttcgacatggtcttgattcttgaattttgatttttgttgctggccttgcttatattcatgttgaactatgttgcagaagtatgcccagtacgtaggagtgaaaagggatttccgactagttgttcgtggtgcagctcgtaacatgattcagattctccatgggtctggttagtactcacattaaaaagagaaactgtctggctgcatcttgtgattcattttcttcaagcgctcattgcaaattgcagctttggccttgtgatgtaaccttctgtaactatcatttactgcagacaatgaagtgcttataataaaaagtgtgacccaccgagacttcaatgaaatgataaaggtatgattaccgttttctttctttcttttttctacatcattacttgttttgtttttacaacttccactgtggtcgtttatccataacataattgaagagactgaaatctgaatccttgcggtcgcttttacatggattttatcccaattcttacacgactttgaatttatcttgtaacagcgtataccaaaccctgtttatcttttccaaggaattgtcctacgcagaggtgccaaaggaaccgggatgaaatccattgaactagcattgtccatgtgcgatattgttgacatatatggtttcactgttgatcctggatacacagagtggcaagtatcttaaataacttttatccatattgctatctctcatatttccaaagctctttgggaggttggatacttacgattctgatcatatttttcctttgtatctttattatcaatgtaggacgcgttacttttccacgccaaggaaagggcacaacccacttcaaggaagggcatactaccaacttctagagtgtcttggtgtacagataacttgttaaaaccataattctactttgctctaatcgttaaactttttgtggtctctctgaataaatcaagcttggcaggtaatacggatccattctcccatgagatccgagagaaaggaggactggtcaagtgtgccaagtcgtgaaatgataagcagagctcacacagctgccttacgcctacaaaggagccaacagccaactagttcgaagagggatgggtcaggacaattcggtaattgcaaggtgtggggcgatgcagaccctacaaaaggacctgtctcgggatctccggacatgagtgagaccaggaagaagtcaaattacaagaaatgggaagtgatgccgtttaggagcttaagaaaggaagctagggatcactatatccaaatgaaaggcgtgtcacagtataagatggatggaaataagctggacgatctggtttgcgtgaggcatccactgaaattagatacgtaa

SEQ ID NO: 147794 - DNA, 2545 bp, Arabidopsis thaliana landsberg
acgggaaaaaaaaactttgaactgctctctctctctcgaagctctcaacaaaaaaaatcgaatcgaagaagaagaagacgtaacaatggagcctccttttgaaagatcgaaacgtctccacaacttctctttgcctcaactccgttggggtcaacaaagattcctcagatgcgtcaatctaccatctcctcctccttcttcttcctctcccgatcacgcagccaccaatagatccgtctccatagctggagtttctcttacaagaggaggaggaggaggagcgaagaacggggaggtagttgcggcggctaagccatggaatttgaggatgagaagagctgcgtgtagtgaacctggagaagaaattgaaattggcgttaataagagaagaagtatcatcgataatgaagatggaggaggagataagaagaatgagaaatcgaaattctctattgcgttgtcgagagatgaaattgaacaagatttctcctttgtttttgggaaaaaacctcccaagagacctaagaagagaccaaggcttgttcagaagaaattgaatgtaagttaacaatcttcttttgtttaatttttggttgcttgattttttttttggatgattgctaaattgtgttcttgtgtttgtttttgcagacgatttttccaggattgtggttgaatgaagaagaagtgacgattgattcgtataatggagcttaggaaacaacatgaaaggtttttactctgtaggataatatgtatctctctgttcttgttctactctttgagacattctcaagtttagcaatttttctggtttctgatcctttgttgttattgttgtaaagcagattactgggaatcttatcattcattcactaattgtaatctccagctgtttgttcttttagtaatgcagttgcttcaatattgtttctctcttcttgttctactttgagaccttctcaagtttagctatgtttagtttagttaagaaattcttcaccagtctaattgtagctgtttgtttctttaatgatgcagttgctttactttaaaaaggtttcttgaatcttgtccatatagtctctctactcttattattgttgccattgttggtatgttgattgctacagatctttaacacagatacttcttctcgagtatgtttcatggctcgcttccgttgtttgttttaccaatggtacattgagctatgtcagtggaaggaaagaacaagctttcttgtacacaacatctcacatctctgaggttagagatggtttctttgttgaatatccagattacttgattatcactgaagtttaggaccttgcgttttgtgtggtttcctgatgcatccatatgtgttgtgtgatgacttgacaggttttagacaagaatctttgtaagatattcacaaatcaccaataagcttcacgcagttttcttcctttctactaagtcgattttactaacctttttttttttctctattccaggttcagatatgcctacaaagatttaatgaaactataaggtaacacatacttacttaagccatgtacaaatacctctttaagtattatgatattgcttccggtagtagtgagtggctcaccacaatctttagacagattatgtcttccattattttattcgaataacttcaacttctccccaccaacttatgacatttattcgatacttcaactttccattcttcttctaaaagcaaagtcttgaagatcatttttcactcacttgactttttttatcttctttccaaactatgatatgcacagaggctcttcagcggatttcgttctcgagtgatcttggtcaatcggataaagcaccaccacctgtgatagagccatcaggccttatccgaagagacgaaactcttcttgattcatcaaactcggacttcgagttccatatctcaaacagctttgatccaggagactcctcaccagcggatgagatctttgcagacggtatgatccttcctttccatgtaactgcagcttcgaccgtgccaaaacgtctctacaagtacgaactccctcccattacatcctccctttctccatctcctctctcgccacaaccgttacccacaaaacacagcgaaaaggaaaccaacgggagagcaagtggagcaaactctgactcagaagcagagaagtcatcaaagtcgttttggagtttcaagagaagctccagcctcaactgcgacataaagaagagtctcatctgttcgtttcctcggctgacaagaagcaactctacaggttcggttactaattctaagagagcaatgctgagagatgttaacaaccataggccctcttctcggtcctcttgctgcaatgcgtatcagttcagacctcaaaagcacacaggaaagaaaggtgaaggaggaggaagcttctccgtcattccagtcctcaatggtccatctacatttgggttaggatcgatcttacgccattcgaattcgaaagataagacgaagacaaagaagaagaagaacaagaagtag

SEQ ID NO: 147795 - DNA, 1852 bp, Arabidopsis thaliana landsberg
gtcgttcaagataagagtctctcacagccaataagtctttctggatctactttgagagctcctcatggttgtcacgcacagtatatgagtaatatgggatcagtggcgtctcttgtcatgtctgtaactatcaatggtagtgatagtgatgagatgaacagagatttacagactggcagacacttatggggcttggtggtttgtcatcacgcaagtcctagatttgttccgtttccgttacgatatgcttgtgaattcttgactcaagtatttggcgtgcagatcaacaaagaagcggaatcagctgttctgttgaaagagaagcgtattctgcaaactcagagtgtgctatgtgacatgctttttcgcaatgcaccaataggtatagtcactcaatcaccaaatataatggatcttgttaaatgtgatggagcagccctttattgcagagacaagctctggtctctaggagttactcccacagcgccacaaattagagatctaatcccttgggttctcaaaagtcatggaggcaacacgggcttacccactgaaagtctaatggagtctggcaatccggatgcttctgttcttggggagtcaatctgtggaatggctgcagtatatattaccgaaaaagattttcttttctggttccggtctagcactgcaaaacagatcaagtggggcggtgcacgacatgatcctaatgacagagatggtaagaggatgcatcccagatcctcattcaaggcttttatggaaatagtcaggtggaaaagtgtgccctgggatgacatggaaatggatgcaattaattctctgcagctaataataaaaggctcattgcaagaggagcattcaaagactgttgtggatgtcccacttgtggataatagggttcagaaggtagatgaattgtgtgttatcgcgaatgaaatggtgcggttgattgatacagcagctgttcccatctttgcggttgatgcctctggtgtaataaatgtttgtaatggtaaaggcggctgaggttactagggattggccgcttgaacaagcaataggcacacctgtgtcagatctcggtgaggacgattatgtagaaaccgtgaagaacatgttagccttggctctcgaaggttatgcagacatgttccggtctagtatggaagaaaatattttttctgtggtttctggctccaatttatttttgttttcatcttttttactgacttcgcacattttcatctgtgccttgtgttataatacataataggtagtgaagaacgtggtgctgagatcaggatcagagcatttggtcctaaaaggaaaagcagtccggttgagttagttgtcaacacttgttgtagcagagatatgacgaataatgttcttggtgtatgcttcattggacaagatgttacaggccagaaaaagcttactgaaaactatagccgcgtgcaaggagattatgcccgaatcatgtggagcccttccacactcattccaccaatttttatgaccaatgaaaatggggtatgctcagagtggaacaacgcaatgcagaagctctctgggataaagagagaagaagttgtcaataaaattcttctcggggaggtttttaccacagatgattatggttgctgccttaaagaccatgacactttaacgaagctgagaataggtttcaatgctgtgatttctggccagaagaacataaagaagcttttatttggcttttaccatcgtgatggtagcttcatcgaggcattgctttataaaacaaaaggactgatattgagggaaaggttacgggggttttagcgttgtgcaagtaccaagaccagaa

SEQ ID NO: 147796 - DNA, 677 bp, Arabidopsis thaliana landsberg
  unsure (1)..(677): unsure at all n locations
ccttggtccttggaaaaattagaccttggacagcggtatccgtgtctaagaaatatttacttctggtcttaactctgtatggtttgtaagaagtcacttgctggtattgacatctattacgatttatgtgcagaaaaaagctgtgatacagcacctttacatgggaagaaacccacctctgttgactgatattagggtccttcgtcaatctacgggtgatgatcacttggtatatttgtaacgcctcatagaacatcatactttggcctcttccctccttgatctatagtagaacttatgctggagtttatgcaggtactggaacttggtatgaattttctcgcagcagatgatatgagtgcaatacttgctgtgaaattaaggaaaaggcttggttttgggatgtggacaaagttgcatttgacaggaatgcacgtggaaggaaaggtagggcagccttttctttatctgattgggacctttttcatttttgtaaacacatttttgcgttctactcttaaaaggtgttgatcggagtgnnnnnnnnnnnnnnnnnnnnnnnnntggggcgtttacgtgtgtgttttgcagagcctccatatttccagatgactgttaaaccaatcttcactcatgggcttgatgttgcagtactcccaggtatcgcaggatggcta

SEQ ID NO: 147797 - DNA, 382 bp, Arabidopsis thaliana landsberg
tttcttacttggctggtggttttacgaccttctccttcatattctctaaatcgactttggaaactgaatccatagccgtcgatgaaagattcagtttgagatcaacagtctcagaaaatcctcttttaccattattttttccagccatttctcctccgtgattcccacccggtagccctaatctcagctccgtggcctcaaaattaatcatatttctcgatataatgattatcaacgagtaataagttaggtgatccgatcgacaacgagtaggagattcttcggcttctagggtttttcttttacttcttttgatatttttttggggaactaaaacgtttgaagagagagagagatagggggatgtgagatgtgtgtagag

SEQ ID NO: 147798 - DNA, 475 bp, Arabidopsis thaliana landsberg
atggcggaagttggtggcgttttggtgggtttcgcagtgttgattcagtggttaacaacggttcctatgaatctgtgtggccgtcgtggagttcgtcttcagagggttgggtgagtcaccgcccttttgggatccactaaaaatcttatggcttatctactagaaaaaaacgaaataaaaatccgttggaggttgtccagaagatcaagaatggccatgaagctaagtttgtccaaaagatcaagaatgaccaatattattatttagagtctttaagttcagcccaaacttaatatacactcaaatgtttcctttagctttgacatacccaatttttttgccagattcgatcgtgtatgcattagctttttttttttggggtttgagcaaagaataataagtacacagcttgatgagtttcatagcatgtcaactttggtggagaatactgcacttagataaacgttctttaact

SEQ ID NO: 147799 - DNA, 2339 bp, Arabidopsis thaliana landsberg
atggatttcaaacctccaaaattttacggggagggactgaactgcctcaagtaagcttgatacccgtcattatttggtcactttactgtgttacattttaaaattttcagcaggagctgatatctaatcaatttctttggcacaaggttgtggagagctgtaactagattgggcggatatgacaaggtacgggtcactgtgaatacgcctgttgaatgtcacagcatcttttttgacaagcaaatgtgacttcggcttttcatcttttgttccatcctggcttacttgcatgcgtactgttgttcatgatctagcagtggtgcttttggtgattttctatgattattatatgctttttatactggataggttactggaagcaaattatggcggcaagtgggagagtctttcaggcccccaaagtaagaagaatgcttttcttattagtggtttgtcttagaaattttgggaaatcatgtggatatttgtaagaattaccctctaattggtcaattgtttgttcaggacatgtacaacagtatcatggactttccgaggtttctacgaaaaggtgagactatattcaccaccttttcctctctctgcttttggttcgtctatgtgacttttgtatacactggcatgggactgggactctatgtatcaacccttctgagaaataattgaaatgattgaacagtgaacaactgtgaatcatcttgagatatgtttccctttagatacagtaacatcttgtaacattatagtttcttcatttttcaggctcttcttgaatatgagcggcataaagttagtgaaggtgaacttcagataccccttccgttggaactagaaccgataaatattgataatcaggtaaaattgagaaaaccatatcatgtgtctgtagtttttgtttgatcttcttcttctgattaatgtcagtgttttaacttaacccactgccttgtttctacactaggcgtctggatcagggagagcaaggagagatgcagcatcacgtgctatgcaaggttggcattcacagcgtcttaatggtaacggtgaagttagtgaccctgcaatcaaggtccggtagaatctttttatatgtttcattttacattcacactagatctctcgtttttttttttgtcaaacatttaatctatatctcatagtctgaacgaacatactgttttgtaattaataggataagaacttagttcttcatcaaaagcgcgaaaaacagattggaaccacccctggtatgagttctgtttgatgaagaagtgttgttctcatttttattttgaaactttgacatgggttatcacttacatctcacaatgtcatcaggtttgctcaaacgtaagagggctgctgaacatggtgcaaaaaatgccatccatgtatctaaacctatgtacgatttttggctttgtggtctggttttcgatgcgtgataattcacatttgaattctgattccagttgttgtttttcctaggttggatgtgactgttgttgatgttggaccaccagctgactgggtgaagattaacgtacagagaacggtaaaatcaattgccacttccttaaaaacctgagcaatcactttctggttttacatgtattaataaactcttccacaatctgcagcaagattgctttgaggtgtatgcattagtcccaggattagtccgtgaagaggttagctctcaaatctcgttttgtttacatatggatcctaagattgagtttagcactcagtttttgtcttggcaacaataatacaggtccgagtccaatcagatcgggctgggcggttagtaataagtggcgaacccgagaaccctatgaatccttggggagctactcctttcaagaaggtaaatcctcattacacgatttttcagcttacacatagaatgttgaacgacattttcaaacctcttttggaactgcaggtggtaagtttgccaacgagaatcgatccgcatcacacatcggctgtggtaaccttaaacgggcagttatttgttcgtgtgcctctggagcaattggagtagaaacatttacagtttaacaaagcctttgaagatctgaaagagagaagattgttagaagtagtgttgagacttgagagtattttgtttgtatattatgagagattaaacacaacatgagaagagcctttaggaatccttaattaggccatctagtttttattgtctctcctctctttgattagattcttcttctaagtgtcgtaactattgatttgttgtagcaccaaacttctttaaacctttctattaagaacacacaaatctacag

SEQ ID NO: 147800 - DNA, 5084 bp, Arabidopsis thaliana landsberg
gaaccccacagtcgattaacctggcctgctcttcgtgagcaccctttcgttaaagaaacacaagaagaagttgaagccagggtaatggtctgatattgatgacttatactttgcagcttgagtccaatgtacagagcattttgttaaaactgtctttttcatgcaatgtaacggatctcaaattaaaacatgttgttggaataatagatcactaagaacattttgaacgcctattcaggaaatccatactgcagtagttgacaataaggcagcttggatgctcaaaggaaatggagggcaacagagaaatggtttgaatctcttcagtgtgtggttagaatctatttcttaattaattttctcctttattaaatttatagtgttaaatgtcacagaaaagtgcgactcagtgaccctggttgaggacatgtctgctacaaaaggtctagctgacgttcagtcagatatgaagagtgctgtcaaagtaaattctccacccactgaggattttgtgggattcccaacccaagaggagataaaaagttcaggtagtgggactttgagaatcaaaagagttatccaacagatagatacagtaatttgagaaatgcatgtttagatatatttctgatgatgatttccatatcaatctaacagacatatattcggatatcatcctttcattgttggttatggccaaatgcatttttctccttcatcaaagcgtgtagttagtatgctctattgttctaggtttacaactcttagagcttgagttttactacgctgtcatgctatgcttgatgtttgtttagattaacacaactcctatgacataaggatttttttttttttgaacttcaggttgtgtatatttcatatataaacccagttctccttttgtaaattttcatgtcttaaaagattagtgtcggaatattcacatacattttgctatccgtgattgaaccttagctgccttcggagtttcttttgctttctttcataatggacctatatatcattctcattcatgcttgggttgttttccccgtttcaggtaacccaacactggacaaattggaaaatacatcccgcactgttaaaggtgcacaagttataggtgaaaatgataaagcattggaccttgttttgctgtcactggaaagattttcaaagttgccagattctaatgggtaaaactagaagttcttttagtagataatgatgtgctcctgcttgctcatcatggcgggaccagacataggtttctagcataagatatactctaaaactcggtcgccacattatggtctgatgatctatcactctcttccagtaaattgttgtatatttccgcatacatgcatattcatattttcgttcatgggtgtgcagggacaaagatgttgcttgctctgttcagtccctcaggatcatctccaatttggttgcaactcgtgccatagtttcagttggactgattgagaaaataacatgtgcactgctagactttactgacgctcttgttgggatgaaatcacccgagttcaacaacataataccaaaggtgaatcctcttgaccaaaatgtctgtcatgtgttggattagatacctactttatttgatagtcagcctgctttccacaattaacaagtaaagaaagttcaatgatttgtaacaccgacttatttctttatcagagtctttcagtcactaaaaacttggtagggcatgttgaaggcaataacatacatagttcttacatcaggcactggaccaaagtagtggaaatcttcatacaggtgacttttttggcgcataagtctcttgtgagattaaaccacatgtactaattttttactttatgtggatgtaggtcgttagatgggaagaagagggaactggtagaattatatatgaggcctgttcttgcatcacaacaatgttatctcgagttgcccaagatcttaaatcttcaactcctgattctgtttctaaacagattttggagcatgctaacatgtctcgcatagttgatcatttgtgtctttgtctggcttcttctgggtcgagtttaacttccggctcttcgcaaatgttagcagctgcctgtgaagcttgtcgagcaatatggattctcatagatacttccgaaacattcttcaagaacgatgatgtaaacatattacctctagatgccttgcagaaccgtctctctcagcatgacataggaaacagtgagtggggtccgttatctgagaaacttgtcgatcagtgacaagagcatatctccgatcaaagcatgtgcaagttgctgttggtcattgccttcaccacgagtggaggctccattggtttctgcaattcaggtgattatgtgatgcttctcttcttttgtggctatcttaacaaaaaatttgcgggttgtctctggattcacagctataattgaatttgtgtttttttttttccgctctttaaacttaactggaaactacttatgtaatgctccagctcttgtcaagatgctgccttcataatggaattatgcctagcatgctttgtggtcttcccagttcactgcctattacgaccgtagtcagtggtggagaggatggtacagttatttcagaaatattttctatactatcatacgcaacattatcaagcaaagaccagcaaacaggagaaaaagataacttcgagggcagactaaacaatctggtgttccattcatgccttatgttggcaacagttgctcaatgtttgaagttaactgggagaaattctgttctgttaatgcttacaacttctccaaagaagcatcaacatcgtctttctgctatagccaatcacattgcctcagatgataaaatcgaagcttctcttcagaatcactctgcttcagctatgcttgctctcgcatctattctcgctcttgaaaaaggatcttctgctggatcttctgtctctgagctagtggtgtctctgattcctcgagctactaagctttgttatcatcttaggcctatgccaagtaatgaaggtgaagtcatctctcattctgccaattatgccaaatggcacggacttctggatggatgtatcggtttattagaatccagattgaagtggggtggacctctagctgtgcagcagcttattgctagtggtacgccattgcttctcataaatctgttagctggcaaactttcaaatgcttccccagaggacatcaagaagacatccaaccggattggcttgtcccctattggcgttgtatggactatttcgtccatatgccactgtctttcgggtggcacaactttccgtcaggttcttgtgaaaatcgaaaccatgaagctaattacttgtttactatctgatgctcatatcaagctagtaaagagctggggaggtccggggggaggaaaagatggagtcagagagacaataaatgtgataattgatctcctagcatttccttttgttgctctgcaaagtcaaccaggttcgttatctgccacagcttctgtaaatagtggattcattctcaacattggctctcctggtgtgagagtatgcatggaagatagagatttgctaaaagctatagaagaggatatggacaaatacataatagtcctcctggaggttagttcgtcgattctgtttccttgatttttacatacttttgtttgaatgttgattggtatctatttgttttcctctcatgattcatgagctgaaatctcgttattgtaacaagctgtattttttaaatttttttttcaggtgggagtgccgagtttaatcctacgttgcttggatcatttggaattaaaagatttagtaaggcccgttgcttttcttgccaaaatggtgggtcgtccacgtcttgctgtagatctcgtgagcaaaggtctgttagatcctaatagaatgaaaaaattactcaaccaatcaagtccaagagaagtcatacttgatatctctaatgatcacatctgatctatcgaggatggataaggtaagaaatttataattacgtatgatgcattctttttgttaccgatgcttagacacagtacagtgaagtaaatgatgttatctaatttggaacaattgttaaccgtacaggctttttataaatacatcggcgaggcttctgttttacagcctttgaaagaatatcttacccatgtggatccaaatatacgtgcaaaagcttgtagtgctcttggcaatatgtgcagacacaatggatatttctacagcgctcttgtaagttacagcactaagcttcttttactgtgagaggtcaaacttttcataacagactgttctttcttacatggtctgcgtggttactatgtgcaggcggaacatcaaatcatcggtctcctcattgatcgatgcgctgatccggacaaacgaacacagaaattcgcttgttttgctgtaaaatcatcaaaaaacagttttttattctccacttccatgatacttctgatcaaattttaaaagaggccttttgcatttttctttctttttgcagattggaaatgcggcttaccataacgacacgctgtatgaagagctaagaagatctataacgcagctagcaaacgttttgaccacggctgaagaagacaagacaaaagcaaacgcggctggtgcattgagcaaccttgtccgaaactccaacaaactctgtgaagatatagtctccaagggagctttacaagttagtacaactgcagattattttgttaggtcaagatacatggatttttctcgtatctaatttcacgtatgatgttgggattttgtgtgcagacgttactgaggctagttgcggattgctcgactcttgccttgaacccaagcaagaaagagacagcgagtgagtcaccgctcaagattgcactcttctcattggctaaaatgtgttcgaaccaccagatttgcagacagtttgtgaagtcatcagagttgttcccggtcattgcaaggcttaaacaatcccctgaggctaacattgctcactatgcttcagttattgtcgccaaagtcagtg

SEQ ID NO: 147801 - DNA, 1261 bp, Arabidopsis thaliana landsberg
aaagattacgtacaaaacaagtcaatttcttactcaacaaagttctaaagtcaggatctaggcttgaagtctatggtgtgacagctgcacaggtttgattattatcatttttttttgaaaaatcagtaggtatgaaaaaattagggttttaaaagtcttgtgatttgtacaggcggatgtagaagtattgttcaaagtgagagacttggagaaagcggatgtgatagaaccaagttggactgatccgcagttgatttgtagcaagatgaatgtatcggttaagtctggtttaggtccattcggtttaatggttttggcatctaagaatttggaagagtacacatctgtttattttagaatcttcaaagcccgtcaaaacagcaataagtacgttgtgctcatgtgcagtgaccaaagcaggtacgtttctttgattaagatcgggattaagtatattaatttttataatcttttgtcacaattcacaaatatttatgtttgttttaaacagtcggtcacaaaagatagatctaaaattgggttccctagaaatatccaaaacttgacttttaattttgaggactttttggtgatgtggatttgggacagatcttcgctgaaggaagataatgacaaaacgacatacggagcttttgtggatattaatcctcaccaaccactatccctcagagccttggtaattaagtctcccattttgttttttacgtatatagttttatatattaatttatgttcatatgtaaaaacgcttgcaaatatagggaagaaaaacctcctttttaaaacccatgagagtaattatttaacagcttagcctcttgatcaagactatataatctttaactatcttgttcaagtattaaggcgaatatttaattgtggatttgttaataaaagtttctgttatttgttgttgttggtgtagattgatcattcagtagtggagagtttcggtggaaagggaagagcatgcattacctcaagagtgtatccaaaattggcaataggaaaaagttcacatctctttgctattaattatggatatcaaagtgttgatgtcttaaacttaaatgcttggagcatgaactctgcccaaatcagttgatcacgtaaagatacacacatgtaaacacattacatctccattgatttagcatttatatgagttgattttggagagatcttatatggtccactttgtttggttgtcaataaaattgacaaatttgaaagtttgaaa

SEQ ID NO: 147802 - DNA, 1492 bp, Arabidopsis thaliana landsberg
ttgaaagctcaaaatatcctcttgtattctgatcaaatttctggtaattttctctcttttaatctctaactcattttgattcttatatatatgttcatatttctgataaaaacattaatttttagccaattgtcggtattttctatttattatcataattttctttttcttcgtgaattttttacaagtaaatgtatattttttctctgttctgaatattatatcctaaatattgtttcgaaatatcttatttgggaagctcggtgtatccaaaattctgtcctaaatctctctacatttttatgatttttttttcgttttagtaatatcatcgatggtgctatccaaagagaatatgttgaaatactcggcacaccttcgtgcttacaaatccgcatgtggagaccatccagaactcaaatcctttgattctgagcttcagcagaaaacctcaaatttgataaactcgttcacctctgatgccaaaactgggttggtgccactgccccaacacgcagcatacaaggagttcaccaagcacctagctgaagtaaaccaacaggtgtcaaactacatcattatatatggataagtattgtgggagaacttatctctgagatctttggtcgaaacctactttgaaagtgccaagaagactttggacattgccgagaatgtaacaaaatacgtccatgaagcaaaaaggggcgaacgtttcattgtaacggccgtggcacactttgaaaaagacatagaaaatgatgttggcataaaaacgaagatgtatgaaaataccttgagggagctgaagaagtttgaagccatgggaaatccttttgatggcgataagttcacgactctgttcaagttgatgcacaaggagcaagaatcccttctggaaagagtgaaggagactaaggaaaagcttggtgaggaacttaaaaatattgggatggaaataagtagtctaaagaaatggagtataatttcgaatgtgcttttcatcggtgcgtttgttgctgttgccgtcggatcgatggttctactatgtacaggcgtgggtgcgtgcgtgggcgttgcagggcttctatcattaccactgattgcgataggatgggtaggcgtccacactattttagagaacaaaattcaagctcgagagaaacaggaagaagctctgaagaaagcgcaccgtatagcaaacgaaatggataagggtatggaaaccgacaaagtagatatgaattccatatctggaaaagtccgcgcgctaaaaagcaagatcacgtctatgttgaatgctgtgaaggatgctactgaggatggagcaaatgaggtggacacgaaacaagtcatggaaaccctcacgggggacgtggtggaattaacagaggatatcaaagcagttggtgatgatgtggcaaaatatagcaaaatgatcgaagagacgagttatcacgttttgcaaaagatcactggttctggaaaataa

SEQ ID NO: 147803 - DNA, 729 bp, Arabidopsis thaliana landsberg
ctccccactgaagatgttgatctaatctaactttttgaaaatgttgcaggaagatgttcaactattgaaaaaactgaatatggatgcctttaggttctctatatcttggtcaagaatatttccccgtaagacaaagatctattctttggttaatgattcttttgcagtttattatgagatgcactttctaacaacattttgttgttgaaaacaatcagatgggaaaaaagacaagggagtgagtgaaacaggagttaaattctacaatgatcttatcaacgagctcattgcaaatggttgttacacattcccccacatctttatttcatatgaaatctccttttttttttcctttaaccttgtggctaaaatggcaatcttgattgagttttgcaggtgtaacgcctcttgtcacattgtttcaatgggatgtacctcaggctcttgaagatgaatacggcggtttcttgagtgaccgtattttgtaagtcctctaagccaaatattgatctatgttatctcagttatgtctcctatctttttgcagttacttaatatgttctgaaactcatatatagggaggatttccgtgattttgcacagtttgctttcaataaatatggtgatagagtgaagcattgggttactataaacgaaccttatgaatttagtcgtggtggatacgagactggagagaaagcaccaggaagatgttctaaatatgtcaat

SEQ ID NO: 147804 - DNA, 3327 bp, Arabidopsis thaliana landsberg
aagtgaaagagaaggtggaggctaagctacaagagctgaaagacaagataggaagtggatcaacccaagaaatcaaagacgccatggctgctcttaaccaagaagtgatgcagattggtcagtctctatacaaccagcctggagctggaggtccaggtgcaggtccttccccgggaggcgaaggtgcttcatcaggagattcatcttcaagtaaaggagaagatggtgatgatgtgatcgatgctgacttctcagacagccaatgagaaagcaaactaggaaggctttggaattcatacatggcatgcgatgggagagacaaatgattttgtaggttgcatttgagaacacaaatgcatttaagcgatgcttgtggccaacatttatttgtcgttagaagcaagcagtgtggttacagaggatgatgtttaatacataataatatgcaagccttctcttactcggtacttgcggatacacacaaaatctacaaagtgggggcttttgaagcaatcctccgcaattatagtgactcaaaccttaaaatgcttttggtcattaactttgtactttttttggtatccaattatagcgactcaatcaatctgagactatccaacgcaattttagtatccaatgcacaacgacgtatgctttatctaccaaatcttatatgattttggaatgtttatcaaaatgcgttgattgcttatttatcttttctaaattctggccaatagttaaaattgtcacatcgtgttagtgaagagatctctctttgaaatgctcgaagttttgtttcgagcaagaaaaatattttttgtcgttgttatgggttctttgttttctactaaaatcccttcagacagaagaaaaaaacataaattaaatcccagcgaagcatatgtaataatgtaacaacaataaaatgtaataaaataaaaaagtaacaacaggctgtcaaaatgataaacaaataacaacggaggaagagtaaagtggggaagaagatcaatgggcccacacacaattcccaattctttgaccaatagttgacttttcttcctcgagtctttttaactcgcttcacctgttaccatctaccttcttacattattattacttactctcttaatcacttttgattaacaaaactaatttaccattgagggttttcttcttccttcttcttcatcctctttgctgctatgattgagctccatggatctgcaatcatagttcttcgatttaggattcgtttagatcgcggtttttgagctcggttggtgaagacatatgcttgaaaacgtactttaagctccaacttcgtctatttacaatattcctttattactttcatattcttctttcaaagtctttaagggttattttgcagtctttctatttgacttttgcgcttttattgaattgattttatatggtgacattttggacttggtcttctgttcaagattcctaggtcatctagcttcagtttttggtctatatttagaaactatgatttcgattgagatcttattggtcagattcacactttgtgtcagcaattctcagaaatatctaaagtggtgacttttgattgtttttgtgtgttgttgattctgggctctaattctctttctttgattttggtctggccaacagagaagtcttgtactgaagcatggctcttcggctaccagcttctaaagcagctgaagttgcgattggatctattggctgtggttatgatcttgctattgatttacggttgaagtattgcaaaggaggttccaaagattctagattacttgacattaaagaaggtgatgataattgtgagattgttttacctggtggaatctccattcctaatgtttccaagtctatcaaatgcgataaaggggagcgtatgcggtttaggtccgatattcttcctttccaacaggtaacttttcgttgaaaagtattggtttgtgttgttgtaggttttgagtggataagatcgccatctgttgaagcctttatctagtttccttgtacattgttctagagagtaaatttccttcatagcattttggatgccttagttattaacattttgttaacatttttcttatggtttgctagatggcagagcagttcaaccaggaactatctttggctggtaaaatcccgtcaggtctcttcaatgccatgtttgaattctcgagctgttggcagaaagacgcagcctacaccaaaaaccttgcttttgatggggttttcatctcattatactcggtggctttggacaaatctcaagtgttactccgtgagcatgttaagcaggctgttccatcaacatgggaccctgctgcattggcaaggtgatgttctgtcttcataataggattgtatgtatgtaaagtctatggaaagttacttacatctgcatatttttctgtgaaattgttcgatggtcgtttccttggcccaatgtcttttcactggatgaaattgtttttgtatgacttaagaattacgtcttacttgttgtaggcgttgtttcattagtaatatttcttcagtaattggagggtttatgactaacacttagtcaaatgtttctttaccaggtttatagatatttatgggacgcatataattgttagtgttaagatgggaggaaaagatgtgatttatgcaaaacaacaacactcctcaaaacttcagcctgaggatctgcagaaaaggttaaaagaggtggcagataagaggttcgtggaagctagcgtagtgcataatacgggttcagaaagagtacaagcaagtagtaaggtctgtgaaatagttattattatttttgtttcccatcatcaaaactttcttgtttgtgcatgtcataaatgttttggctatttgacatatagaagaatttctactaacaatctagtgtttcgactctcaagtctgtaattcctgtcttttattcctggtttcaggtggttacaaaggattttcgcctgagatttgcagataccagttctttgggctcttatgcaaataaggaggtaatttctattggtaccatagcttatcataaagacatgtaatctgtgtgttagcttcttttctcaggagttacatgttttttgtaggactatgtcttcatgtgcaagaggcgaggtggaaacgataacagaaatctaatgcataatgaatggctgcaaacagttcagatggagcctgatgttatctccatgtcttttattccaattacgtctttgcttaatggagttccaggaagtggattcttaagccatgccataaatctgtatctaagat

SEQ ID NO: 147805 - DNA, 1278 bp, Arabidopsis thaliana landsberg
atgcaaagcagaatacgtgtttatgaaagcggtagaacggatcaggtaaagtggattttggcacatattgtggtgtttacgagctgattattctttgcagctggacaatatttgtctacatcagataccaaagggtgacaatgtattcctaatcattctcttgtacaaatgatagggttatgatccagatctacccccagagttagctgcagcaacaggggcacagggtgttcccgttgattcttcaaatttagtgaagccagactctgttcaaggtgattcagcgaaagtgccagccaatgttagaccgacactagtatgatttctccttcctttgctttcattttaaagtagcattgtcaatatgtggtttattatattgtatatcacaatggtaacatagtcgctagacattatcttgttagttttcaaagcttaagagtatttcttgaatttgttttctctcagccccctggaagaccaatacctgtggagactggttctggtgaacgtcttccgtccattgatacacgtgctcctcggatgcgtgatctagatgctatcattgaggttgaacatgtttcaaatttctcttgattttggtttactggtgaggcatctttgcatactgtatactgactgctactaactgatattgatttttttgctagattgtatgtcaggattcacatgaggatgaaccctcgggtgaaaatggcacagatcaagctgatagtagccttcctggagaaaatgtaccagttgagactagttatgttaacaacaaaagacctgacacggaatctgctgaacatagtcctgcgcaggatgagccacataaaaatcttctcaaaaagcaagacgatgagatctctagaagcacagatagtggccagagttttcgttcatcgtctcctgttggagacagaggcacaaggtcatcaagtgttgaccgcgaagatgtgggaggtgaagctggcaaagatgctgagatgggggaggagcttaaaatgagttttacatcccctcagtcagcagtgccagaagatgatggaggggagtcaaagacggagaggagtagtgaaagcagcaaagcaagatctggaagtcacagacattttcagcacgaagaggacgttattcaagataagcattcttctcgaccagctaacaataggaaacagtgcgataacaatgcacctcatcagagcagacagaatcaggacagagggaacgaaatggaaagaacacgagcggcgagcaaaggtggtagagaga

SEQ ID NO: 147806 - DNA, 229 bp, Arabidopsis thaliana landsberg
actaaaagcgaatttagggtttagtcatctctccgacatggttggtgccgcgattttggaatctcccggcgaaggaattggatctaacagcattctctcgcaaaagagacaactttcttctagtgatgcagctaagagagacgctaagaaacgctcgacaatgctaatggatctggagattctcgattgtcccatttgctacgaagctttcacaattcccatcttccag

SEQ ID NO: 147807 - DNA, 2204 bp, Arabidopsis thaliana landsberg
atgggaatctgctttgagaaatgtgagattcgaaaactcatgtcgatattggtaaggaactaaagatcattctcaaccataaccaaatatagtcttccatgtttctttgatttgcttatgttggagatggagattttgagaaaactattaatgtagtaaagatagtaacaattttttttttttaaaagatagtaaaaactacgaacatcattttacaatagactatagtctatatcgtcgaaatcggatatggtcaatttttagttcgtgtataatttgacctattttccctcgttttcaacaaaaacgacgtcgtacgaacgaaccctaaaatctcgagcagcagagccaaagctagatttgattccctctcttcgatttttaattccttgctcctctgctcgtttctctaccggcgacgtaacctctctgtctctgttctgttccttgcctgctcgaggtacaaagctctctgtttcgtatctgctcttagctctcttctgtctcgagactctcttatctctctctactttgtattatatggtttaatctttacgaatccttggaaccttgccattagtgtttaggttgggaaccaacagataatgctatatggtttaaacttctataagcttttccaggaaattgcaaatactaatcgtcttcgaaaattttgttcttctttagtttcaaatatgaattcagtagagacccttatagagttagctgttgatgggcaaaaaagtttcaatcttttagcttcttttttgtttcctgatgtgtttgctcacaaaccatttaggtgtgcatcttcttggaatcagctgactttgcggtcaatcggatttcttgggattgtttggagaaactttggaggtgatggacaacaaaaatgatcaggatattgatgttagatcagtggttgaagctgtttccgccgatctttcctttggtgctcccctctatgtggttgagagcatgtgcatgcgctgccaagaaaatgtatgtctccctctcacgcacatacttatatagtttctttgagattcctgatgttggtggttatgtagtccttatcctttttcataggcagaattatagagtttgcaacctttcttaactaatataaggtctaggaaacaggctagtttctctgtagcctttgatctttagttgcagcttgtttccaattgtgtacatgcacatagctgttgtgtacttcagcattatcattagttctttctgttctttagactcctatgaactgtagtaaggatgaaacacaacttattggcatgtcttggtgatgggctgagaaatttgaggtgatataagtgatatttatggttctgtggcaattaattggaggatctgtatattgtgaactttcagttactagtgtatttttaccgaattcttttagttataagctgttgtatgaaattgtcttgtctttctcctgatccttcttctatgcacaaatagctaataataatttttttccagggaacaaccagatttctattgaccttaattcctcacttcagaaaggtatgtcatactctgttttgaagataaccaattctgttcattttccagattcaaatttttcatacttaattccctatgaattgaccacattcttgggctatagatttctagttggtttaaagaaacatgttttctttgttgtatttatacatgtccataccttgtgtgagcttacaagcttattgttaacttacttgtgggtacaggtcttaatatctgcatttgaatgtccgcattgcggggaaaggtacaaattttaatgaattgagattattttaagtactcattgttcaaaagaatcactagaatattttaagtaaccttttattttatctctgatctattttataggaataatgaagttcagttagatggattgattcaaccccgtggatgctgttacaatctagaggttctagctggtgatgtgaaggtttaatttctgttcttgtctatacatatttttttttaatttcatttggtgatatacttaccatgtagtagaatgtagccctccatgcttattttaagaaataaagatatttgtttttagtggtctctcactccttcagcttattttttaccttcttatatctgtctatatgcagatatttgaccggcaagttgtgaaatctgaatcagccactattaag

SEQ ID NO: 147808 - DNA, 1105 bp, Arabidopsis thaliana landsberg
atgctgaaacctttttctgtagcaattcgtggagagctggttagaagatgtgcgggggatattggatggcttagttctggcggcaccaaggtcctctcaaagctttcattctcttcgtgcatttgactacatgatatatatgcatattgctagactcttaaaccaattctttatgtagagaaatgagtcagacgaggtgctagtgaaggcatcatatctttccgatcttcagcgtagggttcttagaaccgaagctgctcttcgtgagaaagaagaggagaacgacatcctccgacaaagagtccagcagtacgataaccggtggtctgaatatgaaacaaagatgaaatccatggaagaaatttggcaaaagcagatgaaatctttgcaatccagtctttccatcgcaaagaaaagcctagaggttgaggactcagcgagaaactcggatgcatcggtgaatgcaagcgatgcaacagatttagattcaggaggtagtcattaccaaatgggccatggcaggtcaagaagtgtaggcgtgggtttaagcgtgataagccggttagctgaggaatttggacaaagagctcaggtatttggtgacgacagaaagttcttgatggaagtgaaatctggtcaggtggaagcaaacttgaatccggaccgggagctacgaaggctgaaacagatgtttgagacatggaagaaagattatggagggagactaagggaaacgaaactgatacttagcaaacttgggagtgaagaaacaggtggttcagcggagaaggtgaagatgaattggtgggggaggttgaggagtactaggtattaatgggtacttccttttcttgagacgcacgtctccttttctacacgtttgatgtaactacggtttttggctttgctgctagaagtgagaaggctccttgggactgaaagagtcatgtttttcatttgccacccaaatctattggcaaattcagtaaataatttttatattatacagtatatctatttgtcaaggattccaaagtccagtgaaccattgctgtatttgaatataaatagtcgtggcaaaaacaaatcaatatttatatttctt

SEQ ID NO: 147809 - DNA, 673 bp, Arabidopsis thaliana landsberg
  unsure (1)..(673): unsure at all n locations
tttctctcctctnctccccggtattacccggattcacgttcttgacccagccgttttcatacgggcggatcttcaacaaaccgggtcattaatcggactcaacaacctctcttcttctcagatccaccagatccagtctcagatccatcatcctcttcctccgacgcatcacaacaacaacaactctttctcgaatcttctcagcccgaaaccgttactgatgaagcaatctggagtcgctggatcttgtttcgcttacggttctggtgttccttcgaagccgacgaagctttacagaggtgtgaggcaacgtcactggggaaaatgggtggctgagatccgtttgccgagaaatcggactcgtctctggcttgggacttttgacacggcggaggaagctgcgttggcctatgataaggcggcgtacaagctgcgcggcgatttcgcccggcttaacttccctaacctacgtcataacggatctcacatcggaggcgatttcggtgaatataaacctcttcattcctcagtcgacgctaagcttgaagctatttgtaaaagcatggcggagactcagaaacaggacaaatcgacgaaatcatcgaagaaacgtgagaagaaggtttcgtcgccagatctatcggagaaagtgaaggcggaggagaattgggga

SEQ ID NO: 147810 - DNA, 665 bp, Arabidopsis thaliana landsberg
aaagtttcgtacgtctccgatgtttcaatcgtgaaatcgaaacaaacaaaataattaaaaaaaagaaataagaggaggcgatggcgatcaaagacctgacggcgacgaccggtgattcatctcttcctttaataaaatctccgccgtctgaaacaaccggcggtgacagaacctctgctcttcaaacgctcggtaacattatcgtctccatcgtcggtacaggcgtccttggtcttccttacgcattccgcatcgccggttggttagccggatctctcggtgtcattatcgtcggattcgccacctattactgcatgctcctcctcgttagtatacctttttccgaatccttaaattgagtataattattgacttctccaatcgacttcaacaacgtaatctaattggattgttttaatatgcagattcagtgcagagataagctagaatcggaagaaggagaagaagaatcgaaaacttatggtgatttaggtttcaaatgtatgggaacaaaaggtcgatacttaaccgaattcctcattttcactgctcaatgtggtggatcagtagcgtatttagtgttcataggtcgaaacttgtcatccatatttagttcgtatgggttaagtatggtttctttcatattgattctggtgccagtcgaa

SEQ ID NO: 147811 - DNA, 358 bp, Arabidopsis thaliana landsberg
cgacaacaaattaggtttggtttctaattggaaccagttacgatggtcgaaacaagaattccagtgtgcaagactcacttattcagtcgggttatatgatgcactcgcgtcaaatccaaatgtttaaggttaaaatcgggttatatatataacctcgtttttaaaatattaaacaataaacatgcatatatatgttattgtttctgtagcacggcatacatcaatagaatgacgattgagaaatttagtttcatcagtacgtaataattagtacttagcaaaaaaaagaagtggataaatatctttaatttatggaatttcaatggttatagagcaaatttttccatatcgtcatgca

SEQ ID NO: 147812 - DNA, 1411 bp, Arabidopsis thaliana landsberg
  unsure (1)..(1411): unsure at all n locations
atggtccatacgactgtgacttgtaaggtggttgtggtaggtggagaagtgaccacacaaacgaactaccccaggaaaacatgtttttctacattctcgactttgctatttcattgagcttgaataaccaattttaagacgccattgctaaaacatgaaagctctatcatcttcttctccaatattaggtgctagccagccggcgacggcgactgcgcttatcgcgcgatctggtcgttctgaatggcagagctcctgcgctattctaacaagcaaggttatttctcaagaagaatctgaatccttacctgtgcctccagtttccggcggagttgatcatctcaacggccataacagcgccgccgcacgagttccaggaatgaatcttgttccgattgagaaatctgatagcaatccgttggttccacagcatcgtcataatccactgaaaccccttagcatgacggatctctcgccggctccgatgcacggatctaatctacgcgtcgcttatcaaggtgttcccggtgcttactctgaagcagccgctggtaaagcttatcctaattgtcaagctataccttgcgatcaatttgaggttgcgtttcaagcggtggagctttggatcgcagatcgtgctgttttaccggtggagaactctctcggcggttctatccaccgtaattacgatctcctcctccgtcaccgtcttcatatagtcggcgaagttcaactccctgttcatcactgtttactggctcttcccggcgttcgtaaagagtttctcacacgtgtgatctcacaccctcaaggtctcgctcagtgtgagcacacgctcacaaagctcggacttaatgtcgcacgtgaggcagttgatgacaccgcaggagccgcagagttaatcgcctctaacaacctccgcgacacagccgctatagagagtgcacgcgccgccgagatatacgggttggagattttggaagatgggattcaggacgacgtgagtaacgtgacgcgcttcgtgatgctggcgcgtgagccaatcatacctagaacagatagaccgttcaagactagcattgtctttgcgcacgagaaaggaaccagcgtgcttttcaaggtgctctctgctttcgccttcagagacattagcttgacgaagatcgaatcgaggccgaatcacaaccgtccgatcagggtcgtggatgatgccaatgtcgggacggcgaagcattttgagtacannnnnnnnnnnnnnnnnnnnnnnnnnnnnnnnnaggcgcgtgctcagaacgcgcttgccgaggttcaggagtttacatcgttcttgcgggtgcttgggagttatcccatggatatgactccttggtcaccaacatcatcaacttcatcgtaaccatactatagtcta

SEQ ID NO: 147813 - DNA, 369 bp, Arabidopsis thaliana landsberg
ggagataataatcacaaactacaaaagtagaaagaagaaaaaagagcagttcttgaatatttgcatcaatggaggaatccaaaacacctcacgttgcgatcataccaagtccgggaatgggtcatctcataccactcgtcgagtttgctaaacgactcgtccatcttcacggcctcaccgttaccttcgtcatcgccggcgaaggtccaccatcaaaagctcagagaaccgtcctcgactcgctcccttcttcaatctcctccgtctttctccctcctgttgatctcaccgatctctcttcgtccactcgcatcgaatctcggatctccctcaccgtgactcgttcaaacccggagctccggaaagtct

SEQ ID NO: 147814 - DNA, 379 bp, Arabidopsis thaliana landsberg
  unsure (1)..(379): unsure at all n locations
gaaaacccntgatctcgtggaaatggctaactgaacaggaacagcctccggaagcagtgagttcaaatccggtaatcacaatctcttaatcgagtctacgtttaaacagtatatcgtcttttgtttacttcagtgattaaaacaatccttgttgtgatgttaaaggtgttctcggcgttacacgagaaagtcatgaagaatctgaacaagcatgcagcgccagagactcgtgcagcggctggacagccctgggtcagaggatgggacgatttcaagagaggccgtgatgctcccatttcagggaatcagtaaacataaactcctcttttcaaaaagtatcaaagtgaaaataagttatgatatgagaatagataccaag

SEQ ID NO: 147815 - DNA, 566 bp, Arabidopsis thaliana landsberg
tctttaacattgcagtagccagctgatggctgaaagtgattctgtgattggtaagagacaaatctattatttgaatggtgaggcactagaattgagcagtgaagaagatgaggaagatgaagaagaagatgaggaagaaatcaagaaagaaaaatgcgaattttctgaagatgtagaccgatttatatggttagtttttgcattacatatgttcttgattattaatttgtagtccatatttaataaactgctcaagaaattttcaggacggttgggcaggactatggtttggatgatctggtcgtgcggcgtgctctcgccaagtacctcgaagtggatgtttcggacatattggtaacaatattcgaataaaaacttcatacgtcgatcaataactttcctgcttatttaatttttgttgtttttcgtcgtgagaaatgttttaaattttcaaatctaatgtaggaaagatacaatgaactcaagcttaagaatgatggaactgctggtgaggcttctgatttgacatccaagacaataactactggctttcaggattttgctga

SEQ ID NO: 147816 - DNA, 4809 bp, Arabidopsis thaliana landsberg
atctaacgctttcaaggacaaggagattacaatttccagagaaaacatatatatcttaccgctgaacttaggcatcgttttggatcggtcgagaaaactagatgcttgcttgctgaagattaaagagagaacaaggttggcgctaatcttcttctttttatgtttctcggtagcggtgtcaagtgggccacaaacctacgggcttggcccaataaatgggttgttgatgtctgcaaatcttagtaaaacggtaatattccgagtatgatgtctagggaagacaaatttcaaatccatgaacagaatctaatccaaataaatttagccatcttaaatcttaatcatactacgtatattgttcctaatatatgtaaatctccaaagacgtaaaaaaagataaggaacttaccggggtcaacatattgtaatataaaaccgtatatttatctaaatacttagtcttttatataacatatcacatttaaacaaaatttccaaatacagatttttaaatgatatttttatcatcatttaaattaaaaatatttggttaatttatagacataataaatgcgcatgaagaaaaagaaaaaaaaaagaaaaataattgaattatcggttatgaccaaggaataaataatactaaaaacataaaaagagatctaaaagaaggttcaaacttgaactaggtgggtcaagtcatagagatctcaaccaaatgagccaattgacttgaaagcttgcaaacaatttaatttatatattttaattgatgtcagttgacatttttctttcaacgtggatttaccggtggttgcatcgtttcttgaatgtgacagaaaaggatcggtaaaccgttttaaaggacaaggacatatctcgtcaaaaagcttagagagtacctcacgatctctctcacttatactttccacattttgagagattcacattttcttagttgtcctcgataacaacttaccgcaatataggagaccaatcaaatcagcgcaagcaaaatggtataagattatgtttgtgtatgatttgtacaagacatcaagtaaacttatagattgtatagatcaagctgatgataatttttggcagatctgtgcctagggttacggatgccaaagacgatgtttttcaaaaaaaaaaatgaatcaaacataaatccaaaatttaacctacctaatattgataaataacaaatgtgtaattcaaaaaagttcacttgtgattatagattaaaaataattaaaaaaatcaaaaaaaaaaataagtttaaccgtgaaatagtcgtaaatatgatcttttagaaaaaaagatgaatgagttaattatccttaaaaaattgatatcttagtctctaatttaaattcaacatttttttttttttaaagcaacttggctctattaaagtaaaagctctaagttttacatgagcttaatattactattcaaacaaaaattaaaaggttttaaatgttgagaatttttgagaaatgccttcttggtgtgtgtgttttcttcaaaaatatttctttgagatgtgcattttcaaaataaccctttttagttaaatttgaaaaaaatatatataaagtctataaggtttttagaggtgaaatttggagctgtgcacttgaaacggtgcgtttacattaattggaaaaggaatcgcaccggtgatgcgataaccggacgttaccaatcgaatttccgataaaacagcaattttcgaaaccaaaccggttttgaacgagcaaaagcttgaaaacgccgcgttttaaacagtttctcgaagacgcattatcggttttattttaaccgaacaccaccactggttcactatcaaatactaattatgaagataccggtatctttggaacggtgtttttaaaatgttgttattaccggtgatgcgagaaccggacgttatcaaaaattccggtaaaacagcaatttcaaaaccggtttggttttgaacaagcaaaagctcgatgtccggaggaggaaagagaccgttgtagatctgtcttcttcatcgaagatggtgaaacacagaaactcatctcgctcgataatctcatattcttcttcaatagcaaaattcttctctagaaaagcaatttctctctacttgatcttcgtctttgcttttaccatctgggttctcgtcttcagctccagaaacattcaaaccgatgatgaccacaccaaacatcaacaacaacatcatcgggatctaatcgattcagaatcatttccgccaccgtatttgcctcctaggaaggtaaagttgttaatatttcatgggttgtggatttgaatgaaggaatgaggtgacttgatttggtttttgatcggaacaattgagaaagcataactttattgagcttcagaatttgcagaaaccgtatgaaaatactcaactttggactcctcctttcagctttgggttgcatccatgtgtcaaacctactccgaaatacaaaggtatgccaaagaagctcacttccaatttctgatggatctatcttgggttttgtttatgaattcagaactgtgcttttgattgatttcaagttcgtttcttgcagaattttcagaatcagatcattatataacagtgagaagtaatggtggactaaatcaaatgcgtactggtgtaagtaaaaccatttaagttgttgttttcatgattctttttgtcttgcttagtaccaaagtgattcaataagcatgttattgtacagatagcagatatagtggctgttgcgcacatcatgaatgcaactttagtcattcctgagctggataagcgatcgttttggcaagattcaaggtattttgaaacttcaaacaaacaaaaaatgcagcttacttaattagtggttatgagatttatactatttctaacttacattttcgctatgtctcagtgttttttcagatatttttgacgaggaacaattcattaaatcattgcgaagagatgtcaaggttattaaaaagctcccaaaggaagtggaatctctacctagagcaaggaagcatttcacttcttggtctagtgttggatattatgaagaaatgactcacttgtggaaggagtacaaggtcggtcttaagcaacttctttttaacattttgcatttgctgtttcattcaactgctgatagaataataacaatgcaggtcatccatgtcgcaaaatcagattctcgccttgcaaataatgacctgcctatcgacgttcaaagactgagatgtcgtgtactatatcgtggtctccgcttctctcctgcaattgaaagccttggacaggttgggacccttttcctgtcttgtacacaacatagataggctgtagtaacataaaattcatttcatacacataagatttcaagttaatgttctctttgggtaccgaatagctatatagaagtttcaaaaccatcgtttgggtcaacgagttttcattgtcaaatgatagaacttgcaataacatagtttatgcatttaagaggtgtgtaatgatagaataggagaatggatacatctttttctatcaaacgtagtttatgcatttaagaggtgtcctatggggattcctgtagactgtgggttctgagcaatcatgacggtgacaccacagaagctggttgagagactcaagtcacgtgctgggagatatattgcattgcacctgagatatgagaaagatatgttggctttcactggttgcacctatggtctcactgatgctgaatccgaagaactgagagtaatgcggtaattgattactctctgcatctattcttaacaaagcaaacatgcaaaacgtcttcatgggataaaattacagtttcaagctcaatatgttatctgttggtcacagggaaagtacaagccattggaagatcaaaagtataaattcaacagagcagagagaggaaggcctttgtccattgactccaaaagaagtgggaatatttctgaaaggtctcggatattctcagtcaacagtcatatatattgcagcaggggaaatctatgggggtgatgatagactctctgagcttaagtcgcgcttcccaaatctggtttttaaggtctgttcaaccacctctaatctttcatgttactgacaatctaaagatgataaatgtttatgtttcatgtactggattttgtaggaaacgcttgctgggaacgaagagttaaaaggtttcactggccatgcgactaaaacggctgctcttgattacataatttctgttgagagtgatgtgtttgttccttcacattctggaaacatggcaagagcagttgaaggtcaccgcagatttctagggcatcgcaggactatcactcccgacaggttctatctccttccttctgttaccttaaaaaaaagcattaatcttttagtcattttgttatagcccatgacaagtttggtgttgtatgcaggaaaggactagtgaaactcttcggtaagatggagagaggacagctaaaagaaggaccaaagttgtccaattttgtgaatcaaatgcataaagacaggtagcaaaagagtcatacgtttgcttcttaaacaataaacctataaaaaaaagcacatctttgatgcgagaagaggatttgtttgatcggttttgcagacaaggtgcaccgaggagaaggaaaggaccaacgcaggggatcaaaggacgtgcacggtttagaactgaagaagccttttatgagaatccatatccagagtgtatttgcagttcaaaggagcacaaagaaccctaa

SEQ ID NO: 147817 - DNA, 1167 bp, Arabidopsis thaliana landsberg
agacagagtcagagtcttcgtctgcaagagagaacaataccactcaatcatgatctataacaatggacgtctatggcatggcttcaccagacttacttcgaatcgacgaccttcttgatttctccaacgaagacatcttctccggtttctcttccgggggttccaccgtcgctactttctactcttctttccctcctcctcaaaaccctaggttccaccaccaccatctcccttcctccgccgatcatcactccttcctccacgacatttgcgttcccgtataatctctctccctctctctttctccaatcaaagtttcgactttgaaataaagattgtgttttgatttttgttgtattttttgtgtgcagagtgatgacgcagctcatcttgaatggctttcgcaattcgtggacgattctttcgctgattttccggcgaatccattaggaggaactatgacttctgtcaaaactgaaacttcctttccggggaaaccaagaagcaaacgatcaagagctcctgctcctttcgccggaacatggtctccgatgccactggaatccgagcatcagcagcttcactccgccgccaaattcaagccaaagaaagaacaatccggcggaggaggaggaggaggaggaagacatcagtcatcgtcatcggagactacggaaggaggaggaatgaggagatgtactcactgtgcatcggagaaaacgccacagtggaggacaggaccacttggacctaaaacactatgtaacgcttgtggagtccggtttaaatccggtagacttgtaccggaatatagaccggcttcgagtcctacttttgttttgactcagcattcaaactctcaccggaaagtgatggagcttcgacggcagaaagaagttatgagacaaccacaacaagttcaacttcatcaccaccaccacccgttttagttttcacttttcactgcctcgtcagtcgtcactcttttttttgtttttctttttggttcttggggttgggttttgggtaacgtcacgtgatgatgacgtgtcgcgatcctagcggcgttaatcacgtgaccgacgacgacgggagcctaaaatttttagtgaacgttggaaaatcaaacctcatttaattgttaattattaaaaaaaaattatatct

SEQ ID NO: 147818 - DNA, 2739 bp, Arabidopsis thaliana landsberg
  unsure (1)..(2739): unsure at all n locations
tgcttaattccaactatctggcanaatcatgactntgatccaaggtataataaacaaaaatgaagagattttttagttctctgttttgttatcttcttgttcttgatgttgtattgtgtttagatgccgagttgaaaccaaggatgggttcttttaagaagaggagctcttctaagaatttgaggtattcaatgacaaagagaagaagaagtagcaaagtgatgtctgtggagatcatcgaagatgtgcatgacgccgaggagttgaaagccgttgatgcttttcgccaatcgcttattctcgatgagctactcccggagaaacacgatgactaccatatgatgcttagatttttgaaggctagaaaatttgatcttgagaagaaccaaacagatgtggactgaaatgcttagatggaggaaagaatttggtgctgatactgtcatggaggtatgattattattctagaggaacgttttgcagatttgaaaatggtctctttgagtagtactaacattctcttctttggttttgtatatttttaaggagtttgatttcaaggaaattgatgaagtgttgaaatactaccctcaaggacaccatggagttgacaaggaaggacgacctgtgtacattgagaggcttggtttagtagattctaccaagttgatgcaagtcacaaccatggataggtatgtcaactaccatgttatggagtttgagaggaccttcaatgttaagttcccagcgtgctctatcgccgcgaagaagcacattgatcagagcacaactattcttgatgtccaaggagtggtatgtaaaaaacctatgtgagaagaccttcaatgcttttccagtatgtgactaaacatgcctttccttgtttttgttataacagggactgaaaaacttcaacaaggctgctagagacttgattactcgtcttcaaaaggtcgatggtgacaactatcctgaggtgtgatttatatctctgcatgctcaattcttttccactggtctatgaaccagtagtttaactttgtaacgactttggatcagaccttgaacaggatgtttatcatcaatgctggctcaggattcagaatgttgtggaacacggttaagtccttccttgacccgaagactacagcaaaaatccatgcaagtattcaaaaccttttactattgaatcttcttctgaatgataattagttttcacaatttaagtaattatactttgtttgaataccaggttcttggcaacaagtaccaaagcaagttgcttgagataattgatgaaaggtgagctatgcaagacgattagcatacaaattaatctatgttatatattatataacatgaaactgattcttattaatttgtgaccagtgaacttcctgagtttcttggaggttcatgtacttgtgctgacaatggtggctgcatgcgctctgacaaaggcccatggaaaaatccagagatcatgaaggtgaatgattcttaagacaactatagtgacagcaacataaatgacaagagtgaacttgatttttcattttttcttacagagagttcacaatggtgatcacaaatgctcaaaaggatcccaagctgaaaactctggagagaagaccatccctgaggtctttgcttactttgagcttatctatatctcttgaatagtttcctttacctgaatcttgatcactccttccaatgctaattatattcaatgatcttccaggaagatgactctacaacagagccggcttctgaagaggaaaaggcttcaaaagaggtcgaaattgtaagaatggccaacctctaaactcttgatatcaagttcgcttttaatacttaatcgttattcgtttctcgagactcaggtcccggccgctcacccagcttggaacatgccagaagctcacaaattttccctctcaaagagtaagatgatgactcttgtgcatctctttttcttgcaatatggttgttgtatgttaaagctaagacatatggagctttaacgcttcttgtactttctcttctaagcagaagaagtttacgccattcaagaggcgtgcaacaacgctacaacagaaggagggaggtcacctattttcacaggggtcatggctcttgtgatgggtgccgccactatgattgaagtgactaaaagcgtgccaaggaaactaaccgagtcatccttgtactcgtgccccgcgtactgcgatgatgcatcaatgaacaagagtgccatgcaatcagagaaaatgactgtacctgcaatctcaggggcagatctcatggccattatgaaacgaatggctgagttggaacagaaagtgaccgtcttaagcgcgcagtcaacaggtatgcctccggataaggaagagatgcttaacgctgccattagccggtccaatgtattggagcaagagcttgctgccaccaagaaggtacatacattctgaatcattaagataaacctcctccattaaagttctttttaatactaactctcgttacaatgcaggctttggatgattctcttggtcgtcaggaggagcttgtggcgtacatcgagaaaaagaagaagaagaagaagctggtaagtctttctttcattagactcttggaacttgagacacaagccatcaagtcttgtgcttttttcacataacctctatgactgatcttttgttctgcttgttcttggaacagttcaactactggtga

SEQ ID NO: 147819 - DNA, 655 bp, Arabidopsis thaliana landsberg
gacatggatttgcatgaatcagaatcaagaacacatgttctgtccaccgatggtgatgatggttacatagacatggaagtcaatctctcttcttcttcttcttcttctacttcgtcctcaagcttcttcagcttccccgtcacttcctccccgccgcaaagcagagagttcgagtttcaaatgtgttcctccgccgtagcttccggtgaatcaaccacatctccggctgatgagcttttctacaaaggtcaacttcttcctcttcatctccctcctcgtctcaaaatggtacaaaagcttcttctcgcttcctcctcctccaccgccgcaacggaaactcctatctccccacgcgccgccgcagatgtatcgtctccacggagattcagtagctgtgagatcggacaagacgagaattgtttctttgagatttcgacagagctcaagagattcatcgagagcaacgagaatcatcttggaaacagttggagcaaaaagatcaagcattcatccataacacaaaaactcaaagcctcacgcgcttacataaaagctctgttctcaaaacaagcctgttcagattcatcagagatcaatccaagattcaaaattgaaccttctaaagtctcaagaaagaagaacccatttgtgaaca

SEQ ID NO: 147820 - DNA, 721 bp, Arabidopsis thaliana landsberg
gagctcaaactcagtaacaacaaactagctggtcagcttcctctatgtttaactagcttgactggacttcgagttcttgatctttcatcaaatcaattgactgggaacgtaccctctgctctcgctaaccttgaatgccttgagtacctatcactgtttggtaacaacttcgaatgttttcttttcacttggtttactcgccaacctctcaaaacttaaggtgctcagacttgattcacaatccaactcacttgaagtagagtttgaaacgtcttggaagccaaaattccaattggtagttattgcgctacgatcttgcaacttggagaaggttcctcattttctcctacatcaaaaggatttgcatcacgttgatctctctgacaatcaaattcatggaaattttccttcttggctgttggagaacaatacgaaactcgaggttttgcttctacagaataattcttttacgagctttcagctaccgaaatctgctcataacctgcttttcctgaacgtgtcagtcaacaaattcaatcatctctttcctcagaactttgggtggatactccctcatttagtctgtgtgaatttagcctataatggttttcaaggaaatctgccatcttctctggataacatgaagagtattgaatttctagatttgtctcacaacaggttccacgggaagctaccaagaagatttttaaagggttgttaa

SEQ ID NO: 147821 - DNA, 1536 bp, Arabidopsis thaliana landsberg
tttcagataaggttctcaggatttaggttgcttctatgagaaggacacgttgcagttggtgcttcatgtctaggtaatgaaggctttatgtgatagatttgttcctcaacaatgttcttcatcaagcaagagtgatacgcatgataaatcccctttagtttcagattctggacctagtgataataagtccaagtttaccttatggtcaaacgtgtttacgtcttcttcctcagtttctcaaccgtatagggagtcttcaacttctgggcataagcaagtttgcaccactcgtaatggttggacagcatttgtaaaaagagtctctatggctagtggagcaattaggagatttcaggagcgtgttttagggcctaataggaccggtcttccgagcacaactagtgacgtatggctcttgcgtgtctgctattaaatatctgcggatgagaactcaggggaaaccgatactggcactgtattggctgcattgcaactagatttttcatccaaaatactgatgacatatcgtaaaggtttgtaaactcaactacagattaaagccaaaataaagttttttacataaaatttaccatttacgaattgtattttacaggttttgaaccctttagagacacaacttataccagcgatgtgaactggggttgcatgattcgaagtagccagatgctttttgctcaggtgtgaggaagagtatttcttttggcatgagattttgaagtttataacatattctgacaaaccaaatattatcaggcgttgcttttccataggctggggagggcttggactaagaaatctgaggtaagctcaatgtagcaacactaggaacagaaacccggtttcttgcattgagatagtggaaacctcatgcttgtttgatttaaaaatgcagcttcctgaacaggaatacttagagaccttggaaccttttggtgattccgagccttcagctttctccatccacaatcttataatagctggagcgtcctatggtctcgctgctgggtcatgggtaggaccgtatgccatttgtcgagcgtgggagtcattagcgtgcaagaagagaaaacaaactgattctaaaaaccagacgcttcctatggctgttcatatcgtttctggcagcgaagatggagagagaggtggggctccaattctctgtatagaagatgctaccaaatcttgtctagaattctcaaaaggacagtctgagtggacaccgattatccttttggttccactggttcttgggcttgacagtgtgaatcccaggtttgcaactgtgaaattgattccattatctctgttatgctcgactcgtatttgtacttgacctttctgacgtattgctataatctgatgacaggtacattccatctctcgtagccacattcacttttcctcagagcgtggggattttgggtggcaaaccaggtgcctcaacttacatagttggtgttcaagaagacaaaagtttaaaccttgatccgcatgaagttcaacaggtttcatttc

SEQ ID NO: 147822 - DNA, 1231 bp, Arabidopsis thaliana landsberg
ttgaatcttcatcatcctcgatcagtggttgttacctgagaaaccctagatttcaattcccaacaccttaattttgttcgacaaacccaagaagaatcgatgggtaagaacgattttctaaccccaaaggcgattgcgaatcgaatcaaagccaaaggtcttcaaaagcttcgatggtattgtcagatgtgtcagaaacaatgccgagacgagaatggattcaagtgtcattgtatgagcgaatctcaccagcggcagatgcaagtttttgggcagaatccgactcgtgttgtcgatggttactctgaagaattcgagcagacgtttctcgatctgatgcggcggagccaccgtttctctcgtatcgctgccactgttgtctacaatgagtatattaacgatagacatcatgttcatatgaattctacggagtgggcgacgttgacggagtttattaagcatcttgggaaaactggtaagtgtaaggttgaagaaactcctaaaggttggtttattacttatatagatagagattctgagactttgtttaaggagaggttgaagaataagagagttaagagtgatttagctgaggaggagaagcaagagagggagattcagagacagattgagagagctgctgagaaattgaatggtggtggtggtgaaggtcaaaccagtggtaatcatgaagttgtgcatgatggtgatgatgagaggaagaaagatgaagacttgaggttgaagagtggggtcaaggttggatttgctcttggtgtaggtgttaaacaggttgctacgggtaaagagagaggggaaagctcgaaacttttgtttggggatgaagagaatgacaaggttgagagaggggagaagaggaagagaagtggggactccgggaggagcgagaaggagaggagatcagctttggatgagttgatgaaggaggaagagaagaagaaggagaggatgaatcggaaagattactggttgttcgaagggataattgtgaaggtgatgagtaaggctttggcagagaaagggtattataagcaaaagggtgttgtgaagaaagtgattgataattatgttggggagatcaaaatgcttgattctaaacatgtgttgagagttgatcaaaaggagctagagactgtgcttccacaaattggagggatggtgaagatagtgaatggggcatatcgtggttcgaatgcaaggttgttgagtg

SEQ ID NO: 147823 - DNA, 148 bp, Arabidopsis thaliana landsberg
atggagaaagaacccaagcaagagccagaggaagggagagctaagtacgagccacatcagcaccagccacctgtatatctcgcagatgcagccagtgacgcacgaagcctacggtggtggcctctacggtcagggacgacgaaaaggg

SEQ ID NO: 147824 - DNA, 353 bp, Arabidopsis thaliana landsberg
tgattccctgaaaccaatgtatatgttgtttgatgacgaccaggtatgtttctttttttatatttggcgtagtgttgagttgacaaataaatttctcagacggaatttgcactttgcaggataacaatctgagacctcaagagatcgaggatcttttttcaactgcacctgaaaggtaccttttttacacctccagaaggcaaagaacgtgtacttttgattatggtaatctccattatattgccatgccatactaaattgtgaatggcagtccatggaaggaagctccttatgaagatgctgcggaaaaaactgcccttggaggactatcatttgacgctttcctgtcaatg

SEQ ID NO: 147825 - DNA, 946 bp, Arabidopsis thaliana landsberg
atgccatatttctcggtcgatatcaaagtctccattcacgctaaacttacccgcttgcgattcatacaatacccaagcagcgcccggacattacctaattggcgaataactccttcacgcagaacttctgaatttcgaataggtatttaatatcctctgctttcggttatctaataaatcatttaatgaaagtagattatctttccattcattaaaaaaaaagttctatgatcccttcccgaaccaaacatgaatctttcgattcatttggctctcatgctcacttattccaatcaattatttatgagacttcccttcccatctttttcatgcaatgagcctaccctctcccgagtttttttattcaattcatattcaatatatatttctatcgaaaaagatcaccaatccaagataaaaatattcggaggattcttctgaccaatgaaaaattaataattgtcagcaaagttgtttctttttttcttgaaatccaaagaattcttattattttatacgtaggttatcaattctgcattataaaaaaagactcaaaaaattttatcgacatgagtgttttatatcgaaaaaagtataacaattctttttgaaaattttattcatttttttatttagtctacatttagactatatatagtagaaagagtaccatgttgcatctgaacttcaaacggtttagctttaaccatgttaattaattgtcccaatttttggttaatagagaatcaaagtaaagcggacttaccaaagaataacgaaaggctatggttctcaaatatgatttttttattcagaagtaattcgcgggattatgcactctttcctagttatagtgccactgggtgaatccagcctattcttgaaatgaacaactcacacacactccctttccaaaaaagatcaatacaccgaaaactacacttag

SEQ ID NO: 147826 - DNA, 1031 bp, Arabidopsis thaliana landsberg
atggacatgtatcatttgacagaatacatcggcgtggtatcgggcgtccttatggtagctcttgcttcgtgcttgtatggccattacctacgtcgcatggtatgtccatgttgtgaacctagactacctagtgactctaatgcctaactattatcattttgctattgattatatttatatacatgtattgtcgaaaattgtgcgtccgtttatcctctacgctaaacggactctagatgaataattatttgtttcaaaatattgtaactctattctattgatatttatgagattttacaaatttcttttcaaatagtttgtacttggaagctgtcattttcttaggctttgtttttctttttcgtcgagttcaatattccatccatctcatcgatttatttcttatatattacatgtactacgttatgtgcaaaactttgatgatatcacaattaatatatcacatccaagttttgcaaagcatgtcgtcaaattataaacttatcaaaacatatgcaaccccattaatatcaaacgtatgtaaacatcgctagataaccaatcagacccctacgactaatattttcgaattcgatacgttatggtaagatttaaaatcgatgatattttagtgacatttcaaatgattaaacatataacaaaaaaaaaaaaataacacgaacccgagcatggggttaagatttgcgttttgctcaacggattagcgttagcgtttgcaaaaaaaaaaaaaaaaaaaaaaggtttgcatcaacagctggcaaaaaagaaaaagaaaaatcaaaaccggcgagacggaaaatttcagcgtttccgaactttccattagagtcgcgagacgatagatgagactcgttccagagatttaatcgttgcttctcttcccagctgatctgcgtccaacatcactgtttccaggatcttcagaatcagcgaaggaagaagataagaggacgacgaagtaattgaagttggagaatcgcacatttggctctcgatatttgctcaatgac

SEQ ID NO: 147827 - DNA, 1586 bp, Arabidopsis thaliana landsberg
ttcttccttcaccttccgtcgtagttccccgacaagctaactactgttgagccccgccgcatccgaagccgacttttcaaatcgtcgagcttcaacaatgacgtctcttctccttccttcatctcaatttctccagactcgaacccaaaacaatggccaaccattgcttctccctcgaacaccactgttcgcaccactaccttctctccgtcagttgagaccgaaacacatctctatttccgccgcagcgccgaagaaacaatcggagactgtcacggcgccgacaccggcagcgaagaagaattcgagcgtggaggaggaaacagaagaggaagtagaggaagatatgccgtggattcaagagaaggcgttagacctagtcgagttcactggatcggtgagtcaggcgattcctggtcctcgagttggaagtagcaaattgccgtggatgctcgccgttcctttagcttacgccggcgtcactttcgtcactgctttcgtcaaaaccggtcagaagttctcttcccctaaagctcaacgcaagaaactggtctctgattccactctctcttttgtgatccttactttaaaaaaaaaaaactaattcaatattggtttttcgaatctcttcaggtgaatcagaatgctatgctttgcagatctatagatgagctgttacgaaaagatggaacagtgcatagctctgagcttaaggcacttgaacaaaaggtgagaatatatataacatgtcactaatcttttggtttgatctcttaatcatttccagttcagaatttgacatgagaatgctaaattttgttatctacaatacagacagagtttaacatggaggagatattgcggaaatacattcgttatgcgttgaatgagaaaccgtttaatcccgaccttgttgctgatctcattcatctaagaaaagcttctggtttgaatgattctcagattcctgagattttaaatgagatctctcgtcgtattgtcaaggaaaaaggtaaccgaaactttgttaaaaggttctctattgtggcagtctcttctttattgcccttgacatatttggttttggcaggtccggtagtgatgaaaatgcaaggctttaccgaaaaaggattcaagagaaaactcgccgtgcaagcgctttttggaaagatttactatctttccgaggtaatcaatgtagaaacattacttatacttgagagaatctgcttactctttcaacattttcgttgatctaatcctgaagtcaaatatgcatacaatgttttcgatatgtgatagattttctaactccattctctcttcaacagcttcctgacttctgctcaaaagacaactccttaatcgtcaaggaaatattcggagttacagagtaagttaactttcaaattgcagctttattcttatgcttttacaatgttccttttacttgaccatctctaccaaacatttcagtgaagacgcagagaagctgcggatacacgctcttgctgaagctggagacatagaggcacttgagaccatggtcgcatttgagaaaactggggagtcttctaaggataaga

SEQ ID NO: 147828 - DNA, 1290 bp, Arabidopsis thaliana landsberg
atgactcggattttggttcaaagaggttcatcaggcagttcttccaactctagccgtccttcttcctcgtctagttcttcctcgggatcagaaacacagataaacaataatattccggttcctcctgttactatagatgaagaaattacggatgagaaacaagaagaggttactgtagttgaaaaagcagagtgttctgatgctaaagatgtagctgtggacagtgatgaacctgcggatagagaagatgatgaagggttggtagttgcagaaaatgttcatgttcaaagtgaaggtatagattgtgattctccagttagcggtggcagtaactctgattcaccacccgtaccagctccaccaccaaaatcttcttccgctgtcaatcctggtagtaacagatcggttttgggaagttttggcgctttacgaattggaccaacacgaagagctgctgggcctcgctctcttgtttccagtaggagttcgccaactggatcacatccttcttctgcgagtaaccaccgtgaggttttaggctattttagtacactgtgatcataggcacatctatgtgagcactgagtttcggcttgaaaagcgtaaggtatccatctcggaccgatgctttttgatgagaacaatgacgaatgaggtcaggaagtatattctcaaagtaatctgtcccaagagctgctataacctgaaacgaaaggagaaaacgttctaacagatgcagctacaatttggggaaacatttgttaagcagactctgagattaatgatttgtaagttgccgtatttccatttgccatacaccatatcagtttcaaatgtacttgattgaaacattaaaagaaggtaccgaatcaagcgagtacaaatacagctacgtttatttaacttaaatgtaaattaagagacttaatcagcttataattgaacagtaaaccctaatactcatgcaatgatgtattggaaactgtgaagataacaagattaagctcatagtgttaaagccaccagataatatagtgtatttccacaacatcaaccaggcgttttgactaaatgaaacaatgccacaaaaaaacacatctttttctacatacctcacttaatccctgagcggctccatatctttcaacattgcttgtatcagattttagagtttcaaacagccacggaacaagatctgggaaattatcctctcccattcctctaataagtgacccaacagcccttgctgcaacagaacgtacttcgggaattggatccacaagaacctga

SEQ ID NO: 147829 - DNA, 1103 bp, Arabidopsis thaliana landsberg
cccatttgtgtatttcttttcatcaatcacaaagatctctctacttcaataaatctccaccttactttaagaacaagaaaaacacagtattaacaaatggcaggaatcaaagttttcggtcacccagcttccacagccactagaagagttctcatcgctcttcacgagaagaatgtcgactttgaattcgttcatgtcgagctcaaagatggtgaacacaagaaagagcctttcatccttcgcaacgtgagtacatataacatctgtcaagccaaaatattgtatttcatctagatactgaatcttggtcttaacaatcttgaataatgtttttgcagccctttggtaaagttccagcctttgaagatggagacttcaagattttcggtaaatacaaatatatatcattatagtcatgtttacaaatttttggttttatgatcattgcaataatagaaagcagaaacactcaaaaatgttttttttttggtgggcagaatcaagagcaattactcaatacatagctcatgaattctcagacaaaggaaacaaccttctctcaactggcaaggacatggcgatcatagccatgggcattgaaattgagtcgcatgagtttgacccagctggttcaaagcttgtttgggagcaagtcttaaagcctttgtatggtatgaccacagacaaaactgttgtgaagaagaagaggctaagctagccaaagtcctcgatgtttacgaacacaggcttggtgagtccaagtatttggcttctgaccacttcactttggtcgatcttcacactatccctgtgattcaatacttacttggaactccaactaagaaactcttcgacgagcgtccacatgtgagtgcttgggttgctgacatcacttcaaggccttctgctcagaaggttctttaagtgaatctcaaactatttatcgatcagaagatgtaataaaagtggcgatgacctaattgcccaattctcataaactctgtttttctttttgtgtttcctctgtttttctgcttccgagtgtttgatttgaatgtaatcttcgataatgagtcttgatataataaaatatttcttatctt

SEQ ID NO: 147830 - DNA, 7218 bp, Arabidopsis thaliana landsberg
acggaggattatgaatataccaaagtggtcgattgcgtggtctactggtcaaggattaatgttgcggacgatattgaatctaccaagtgatctattgcttggtcgattgccttccttaaccaggtcaaaacccggtttgttccgggttgatatggtttattttctcattactataaatactcttaacctagttttagagaagggagctttttgtttaggaatcaaaacttctatttaagtttttttatcttaggtttttgtatgaatcttgagtttttaagtttctatatcaagtatttcttttaaatttctcatctcttttctaatgatcatggctttacaaagatcaaaccaattccttgtataatcatgatcatgagtgagtagtcttttagagttctttggttagggtagattaggatggtttagatgttgggttatggagttagggctagattacttaagattcttacttattggttgcttttaaggctagatcaaccttgatcatgttgatttagacactaggaatttcatccccggaaggtgttcgatgaaaatcccgaaccaaaatctttaagtgcttttcataccttacctttgaaaattgttaattagggtgattagtggctagatagacttgttatttatgctttttgatcatttgattgcctttggaaattgttgatgattgattgattagtaaaggaattaatatcatggaaatgtattagtcttgtttagtgttctatgacccaaggatcattgcttgttagaagttgtttgatgctccataatccatctctttatcatttctaatcgattaccttaacccgagaatttgtctttagttatcactaagtaattattaatttcccgctttgtttactttcgaaacttgttagtcttttgtttcttgctttcttttatcttgttttgcattgtttgcttgataatgcattgttactaagattatgaacactcaaaatcaccttattagattagattaagcaattgtgtgtatttttggtgagttgattaattgcaaattgtggttcgataattaatagaaataaatgctacatcaatttagcgccgttgccggtttgcaatagttattagccattaggatatcatatttgcttgagactaagccttttactttagttaccaatcctttatacttgatctttgctcttgttttgaaggtgtatgaacctacgaaatcacggtcgagcaaacttagtagaagaaattcaagacatccgccggtttgaaagagaaaacgctagagcaagaagagaacgagaacgacttgaacaccttgctcggttaggcgtcatgaatgaacccagagttgggggccataatggaaatggccaagctaatggggatggtcatatgccacaacatcaacaaagagctcatcaaccaattggagcctttgatgaaccaaacatccggggaaatagaaacggtattcaagctcatccggttgagaacaacaactttgagattaaatcaagcctcatcaacatggttcaaagctctaagttccatggttgaaagagaaaacgctagagcaagaagagaacgagaacgacttgaacaccttgctcagttaggtgtcatgaatgaacccagagttgggggccataatggaaatggccaagctaatggggatggtcatatgccacaacatcaacaaagagctcatcaacccattggagcctttgatgaaccaaacatccgtggaaatagaaacggtattcaagctcctccggttgagaacaacaactttgagattaaatcaagcctcatcaacatggttcaaagctctaagttccatggtttatcaatggaggaccctttggatcatctagaccaatttgatatgttgtgtagcacggtgaaaatcaatgggatcttggaagatgcattcaaacttaaactcttcccgttttctcttggagatcgagctcgtatttgggagaagaatctacctcaaggctccatcacctcttgggaccaatgcaaaagagccttcctctcaaagttcttctccacaacaagaacggcaaggttgagaaatgagatatctagcttcactcaaaggagtaatgaaagtttttgtgaagcttgggaaaggttcaagggatacaaaatgcaatgccctcatcatggtttctctaaagaatctatactaagtaccttgtatagaggagttctccctaaatttcgcatgttgttggacacggcaagcaatggaaacttcttgggccaagatattgatgatggtctgtctttggtagagaatctaactcaaagtgatggtaactatggtgaagattatgaccgcactccaagagaaagtaatgagatgagcgatctacaccgcaaacagatcaaagctttgaatgaaaagatagataagatgattcttgcaaatcaaaaactgatccattttgtatccaagagtgatgtctaccaagggtatcaagaacacatggaaggctgtgtagagggacaagatgaggtaaactatgttagtggacaagggtacaacaaattcaaccccaactataggacatcccaacctttcatataggagcaataatgtggagaacccataagatcaaagctacccacctttaaagcctccctggtttcacacaacaacccaactatcaacctaaaccccaagggaacttccaaccaaagcctcaagcctaccaccacaaccaacaccaagggagttcatcgaatcctccacctcaagcagatgatacaaatgctcttcttagacaaattctagaagggcaaggaagaggagcaatcgatctcgccacacaaatgaaaggaatgcacaccaaagttgatgacctttatggtgagctcaatgccaaaatagagagtttgaatgcccaagtttatagccaatcctcatccacttccaagcagccaatgggaactttaccgggtaaaccggaaccaaatccgaaagagtatataaatgctataacccttagaagtgataaagagttgccgagtggagagctcaatagagacattgagcctaaacaaaaggagggtgtgagtgagattgatgaagaggaggtattgaatgagaaagtttgtcaagaagagattgatgttgaaaagtgtattattgacaaagagaagggtaaaattgttgaagagtctaaagaagacaaaacccaagtagaaatctccacgaaggataaaagttttgctaagaaagagactctatttgtgcctccaccttatgaaccaaagttaccattcgtggatcgtttcaagaagcaacaaatagagaagtatagagcaatgtttgatgagcaaatgaaagaagttactatcaccatgcctatcatagatgtgttcttgttaaacccgacttacaacaagtttcttaaagatgcggttgtagaaaagaagaaaacattgcaaggtatggtccttttgactcatgaatgtagcactatcatccaaaacaagattgtagcaaagaagcttgatgatccgggtagctttacacttccatgtgctcttggtcctttatcctttgaccattgcttgtgtgatcttggtgctagtgttagcttgatgcctcttttgattgccaaacacttatacttcacaagatataaagattgtagaatcgcacttgtccttgcggaccgttctattagaactccggttggtttgcttaaggatcttcccgtgataattggtcattttgagataccaatggactttgtggtccttgagatggatgaggaaccaaaagacccacttatcttaggacgcccattcttgagaaccgcgggagtaatgattgatgtgtgaagaggaaagattaatttgaacttgggtaaggaggtattaacctttgatattaaaaaagtgatgaagaaacctaccattgaaaaaccaagaattttatatcgaagagatggaagctttagtggatgagcttttggaagagctagcaatggaggatccacttcatagtactttgactataaaacaaggagagtttgggttacttgaaagtgatagtgaggggtatgagaagatacttgattctcacaagtcttctaatgaagatggaaccttccttgagttgaaagaagttagtcatgaggttaatgttgttgagattgaagaggtgacaaacaaggaggaaactagcaatggtaagtctagcatagatggagaatagagtaaattctaggactccagaggtggaactaaaacctcttcccaaggggctaaggtacgcatttcttggaccaaactctacttatccggttataattaatgacgagcttagtgatttagaggtctccaccctaatagaggaattgaaaaagtatagaaaagctattggttattctcttagtgatattaaaggaatttcggaaactctttgtgtgcttaggatccatcttgagaatgagtcaatgacttccgttgaacatcaaaggcggttaaatcctaaccttagaaatgtggtacgggaagagatcctcaaactcttagatgcgggaataatttacccgatctcggatagcacatgggtttctccggttcatgtggtcccaaagaagggtggagtcacggttgtaaagaatgatattgatgagttgatcccaactagaacaataacggggcataggatgtgtatagattatcgaaaattgaatgccgcttctaggaaagatcattttcctttaccgtttattgatcaaatgctagagaggttagccaatcacacccactattgttttctagatggatattcgggattctttcaaattccgattcatccaaatgaccaagagaaaacaactttcacatgcccttatggtacatttgcatataggagaatgccatttggtttgtgtaatgctcccgctacatttcaaagatgcatgatgtctatattctcggatctaattgaaaatgtggttgaagttttaatggatgacttctccgtctatggagactcttttgcctcttgtctttctaatttgtgtagggtcttgaaacgttgtgaggagactaaccttgtgttaaattgggagaagtgccacttcatggttagagatgggatagtattgggtcacaagatcttcgagaagggtatagaggttgatagagctaagattgatgtgatgaccaatctagcaccgccaaattcggttaagggaataagaagttttcttgggccatgccgggttttatagaagattcatcaaggacttctccaaaatagcaagaccactcactagactactgtgcaaagaggcaaaattcatatttgatgaagaatgtctaacagcttttaagacaatcaaggaagctttggtctctgctccaatagtccgagctcctaactggggctatccatttgacatcatgtgtgatgcttcagactacgctgtaggagcagtacttgggcagaagattgataagaagctacatgtcatctattatgccagcaggactatggatgatacacaagtgaggtatgccaccactgagaaggaattactgtttgtggtattcgcattcgagaaatttagaagctacttggtgggttctaaggtgacagtatacactgatcatgttgctttgaggcatatatatgcgaagaaggataccaaacccaggctgttgagatggatcttattgctccaagagtttgacatggagattgttgataagaaggggattgaaaatggtgtagctaaccatctttctaggatgagaattgaagacgaggtacccattgacgactccatgctagaagaacagctaatagcgattcaacaacttaacaagaggactcaaactaaaaaatcactcgatcaagtttgtgcagtagagaacaagcttccgtggtatgctgatcacttcaattacttggttggtggtgaggaccctccgagtctgtcgggctatgtgaagaagaagttcttcaaggacattaaccatttttactgggacaaaccctatctctgcacactcttaaagataagatctataggcgatgcgtctcagaagacgaaactgaaggcatcctactgcattgccatggatctgcctatggtggccactttgcaactttcaaaacagtgtcaaaaatcctgtaagcaggtttatggtggccgacaatgtttaaggatgctcaggaatttatctcaaaatgtgatttatgtcagagaaaggggaacatcagcagaaggaatgagatgcctcaaaatccgatcttggaagttgatatttttgacgtttggggaattgatttcatgggtccatttccatcttgttatggaaacaagtacatactggtagcagtagactatgtgtcaaagtgggtggaagcgatagccagtcccaccaatgatgctagagttgtgctgaagttgtttaagaccgttatattcccgagatttggagtcccgagagttggaatcagtgaaggagggaaacatttcatcaacaaggtttttgaaaatcttttgaagaagcatggattagagcacaaggtagccactccttatcatccacaaacaagcgggcatggggaaatctccgacaggaaggtaaaaacaattctaaaaaactgtggggattacaaagaaagattggtctacaaagctcgataacgcactatgggcttacataacagcttttaagacccctattggcacaactcctttcacccttctctatggaaaatcctgtcacctacatgttgatctcgagtataaagccatgtgggcaactaaactctggaacttcgatattaaaaccgctgaggagaagcggttgatccaactaaacgatctcaacaagattcgcttagaagcttatgagaattccaaaatctacaaggagcgaacaaagtcttttcatgacaaaaatataatttcaagagattttagggttggtgatcaactgctgctgttcaactctcgcctgaggctttttccaggcaagctcaaatccagatggtctggtccattctctgttactgtagtccgaccttatggtgttatcactctagctgggaagaatggagacttcacagtcaatgggcagcggctcaagaagttgatgcaagtcacgacttctctatatccggaatacactcgaccgcgttgctggccgccacgaagtcgatga

SEQ ID NO: 147831 - DNA, 720 bp, Arabidopsis thaliana landsberg
attctctccttccctcatctcatctcctacctagatctctctcttctcttcctctcatttccttctcccttactaaatttccttctctaatctctactttgtccaaaagcatttaactttaaccggaaaaatcttacatttttttcctcctggatctctctctctatatctgcagattcacactacagctgatttagatctatttcgtaagtgggtctttcaaagtcgtctcctttgatctactttgattcagggttaggattaaaaacttctcctttttctatagttgcttcactgtttctattccatggagaaagttgctagctttaatttgccaacttactattcttatgtgtaataatcgtttgcagggtcgttgatttggtgataagtcagtagaaatggataaggagaaatctccagcacctccttgtggaggtcttcctcctccatctccatcaggtcgatgctctgcattctcagaagctggtcccattggtcatggttcagatgctaatcgaatgagtcatgatattagccgtatgcttgataacccacctaagaagattggacatcggcgagctcattctgaaatacttactctccctgatgatttgagctttgatagtgatcttggtgtggttggtaatgctgctgatggagcttctttctctgatgagactgaaaaagatttgctctctatgtatctggatatggata

SEQ ID NO: 147832 - DNA, 337 bp, Arabidopsis thaliana landsberg
ggtaagctcgaatgaaagggattcaagcaatagtgatagagaaggtgatgtgtatgactttggtattgttctacttgagatactaagcgggcgaaaagctatcgatagagagtctgatcctgcggggattgcggaatgggcggttcctttgatcaggaaaggaaaagcagcggcgataatcgataggaacatttgtttgccaagaaatgtagagcctttgcttaaattggctgagttagctgagcttgctgtgagggaaaattcgaatgaacgaccaaatatcagaaatattctgtgttttcttgatctcatcgtcaagtctggcctcactttttaa

SEQ ID NO: 147833 - DNA, 876 bp, Arabidopsis thaliana landsberg
aaaggcttgatactttctggactgtatgcacctcttgcaaagttcagtatgagtatctgaggaagtatgtgaataagaggctttcatgtaagaactgtcgtggagcatttattgctgtagaaactggtccagctcctgttagtgcaccatttcattacacgcctccatctcatgcgcctccctctcatgcgcctccatctcatgcgcctccgagtaatggctatggtgcacatggttatgatgctatgtcacgcatgcccaccaattccacgtatttcttaggccactatcctgggcaaggacatggatatgattatggtacgaatggttcatatgaatggagctcctactctggaacaacaacctccccagggaatctggatttgaagcgtgtgtcctcagtgtctaatgggtatccttataagcacagcaactcagtagtcagcgcgggattaaataaagtcaaagacggttctaatgggacatgctcgaagaaaagcacaccaggtggtctgatatatcctaatcagctcagcatgtctgctcacgcgagtgcaaataaggtcggcagacctgggaagaagagcaaagtttttatggaagctgctgctaatggatttgttgaaaaccctctgagatctgtttcagtatcaaagacaacgaatacagatgccaaaatggatcaggattacaaacttcatatccaaagttcaactagacgttggtctgctgcatcagtattggatacacggaaacccttaattcaaaaggccagaacagatatcaagcaaagattggagatgatgagattggctttagaggcagcagcggctgcagaggatgcaacaccccttgatgaaaaaactgttctctcct

SEQ ID NO: 147834 - DNA, 272 bp, Arabidopsis thaliana landsberg
aatgaaaattacaatcgaattgaaaataaaagctggatcttacaaatggggtaaaaaacagcagagcagttaaatatttgtagtaattctctcgacatgcgtgttctagatcctctaaccaaacaaaatcaacaacttcaaataatccagataacgatattgcacaaagagaagaaaacattttggttggattctttttctataagatagcttcgatgtctaactccaagtaagagcatggatcagggatgtcaaagttgttcaaaacctga

SEQ ID NO: 147835 - DNA, 2203 bp, Arabidopsis thaliana landsberg
cttgtgtgttgttacttactttgttagcttttggttttgattcaatcgaatatgtagttatgaataagtgtatggcttcattggtgttactgagatgtgagattaatgagacttgatatagtttcttttcgttagttggtcttggtttataatctctacgttgttttgaaaatgcagaaccggaggtggaggtggtggtactccagccaaggatgcccttggaaacgatgtagttgcagcggaatggcttaagactcatggtcccggtgaccgaaccttgacccaaggattaaaggtaagatcatgaacaacttatttagctctccttgaaacactgctttaagaactcaataaaggttcttgcatctcaatgggtgtggattatttgttatagggagatccgacttacctagttgtagagaacgacaagactctagcgacatacggtatcaacgcagtgtgcactcatcttggatgtgttgtgccatggaacaaagctgagaacaagtttctatgtccttgccatggatcccaatacaacgcccaaggaagagtcgttagaggtccagccccattggtaagtcaaatacattgcattctttcttttttgcgtatctctaaagtggaccgtctaaagtaaccttaatttcatggaacagtcgctagcgttggctcacgcggatatagatgaagctgggaaggttctttttgttccatgggtggaaactgacttcaggactggtgatgctccatggtggtcttaagactcttcaacaagaaaaagagaaagatttggtctttttgtgtaagacttgtttgaatgttcttataatgtataagctacatttcatcgcaattactctgtgaattcttgcctcttatatgaaatattatgttcattcacttcccaagtttcttttttaatttcccgttttcaagggtcactttgggagtaattagcttttgtttgttgacaatggtacatgtaagatcaggtgtgtttgcaatcaaaacaggtatttaaatacattactgaaagattaaatcaaaggcccgtatagctcagtggtagagcgtcagtcttgtaaactgaaggtccgtagttcgatcctgcgtgtgggcacctttttatccattgctttaattttacgttatcatttatttttttcaaggatgttacaaatatattcaccagtcatcaggttgtttgctgtaattatttttccatatgagctttcatcaatcaataaacccgagggaataacaaactagttattttcgttgacattttgtttttgattttcttatcataaaaatgaagtcaaagacttcacaaacttgggacagtaccacatagtggctcaccactcgaaatgatttggtctcttgccggctaaatggtaaagtaactatgattaagtaaaataagtagattgatgtttataatcttgtttgttcggctatgaaaaatattagtaaatatttcataaagaattgctaaatatacaaatatgttttttgggttgaattttatagaaccgataaaacttttagaagacttcgatacaaagccacaagtctcctttaaaagacccaacatttgctctcaaccaacaataaaacaaatccctctctatctctcctattttcgtcccatttacatgttattacctcgagcttttggctaagaatttccgccaattctcgttaacattctccttggtttctgaaactaccctcatcgggtctccaagaggccaagaaaggcctctttctcggcttctaggagtctcatcattctcttttttcacattttcttcctccatacgcacccttcaaaaaaccctaaatttattaaaacaaatggattccacggagctgaaccgtgtgttccaaatgttcgacaaggacggagacgggaagatcactacgaaggagctgaacgagtcattcaagaacctcggtatcataatacccgaagacgaactaacacaaattatccaaaagatcgatgttaatggtgacggttgtgttgacattgaagagtttggagagctctacaagacgataatggtagaagatgaggacgaggtaggagaagaagatatgaaggaagcgttcaacgtatttgatcggaacggagatgggtttataacggtggatgaattgaaggcggttttatcttccttgggactcaagcaag

SEQ ID NO: 147836 - DNA, 482 bp, Arabidopsis thaliana landsberg
acaaaatcagaattacacaaatgggaactaataagattcccaaaaccctcaacgggaaccttgttcttatacttatcatcaccataatgatggtgactcactcccatggatttcaactggagatcaggaacgagctatcaggaaggtacaggaagcttgtgtacaaatgctggtcccgcgataacgatttcgggtggcgacagaactggccaggccagtacaaggactggtccttcgccatttcactattccacacctacttctactgccacttccgtacagcgtatggacgcgtggataagcagctagtagcctcatgggagttaaaacaagagtgtggggacaggagaaaatgcacttgggtcgttaagaaggacggactctacttgagacaatggaagaccaaattttttagtaacaagtatggtaacgaaaggtggaatgtgtatattgacgatgacgccacaagacaagttggggct

SEQ ID NO: 147837 - DNA, 1548 bp, Arabidopsis thaliana landsberg
aaaaaaaagaaataaaaggaaaaaacaccacaaagctggtcactccgctaccgaccactcacatcacaagtcacaacctccgctttgagatgagagccgccgccgccgccaccgccaccgtgagtcttcgacatttccgcagcttccctactattgtcccatctcttctcttctcctcctcctcctccataccttttcactccccccgtctctgcgtcttcctccgccctcgccaactcttccttaaccgtccactcgccgcaagtttcagttcctcttcatcaggttacaatctcatcatctccaatttttacccgaacttatccaacatttgcttagacgactaatattaatctgtaggtgctacctctgattcgacctacgacgttattgttgttggtgccggacacgctggatgcgaagcggctttagcctctgctcgattaggagctagtactctgcttctcacattaaacctcgatcgaatagcttggcaggtttgactttagtcataattggttacatacttgttagaattgtggtatatgagtgtgacatattgttacgtgaagccgtgtaatccagcagtaggtggaccagctaaatcacaattagtacatgaagttgatgcacttggtggtgatattggcaaagttgctgacaggtaattgtatacaagtttcttatctcaatgaaacctcttggcttatgcattgaggtttggggtttagcttttgagaattgttttcatcaaacgaatttgtttgacttgtacctatgatagcatgagtaataagagttatgagaaggagatcaatttgagtgatcatatagcttgcctcaaatctaatgagcttcaaacgcttaccgctgatgtaatatcttaacagtgcagatgctatttacagaagcgtattttgaatgtctcaaggggtcctgctgtaagatcgttacgtgctcagactgacaaaagagaatatgctacggagatgaaaaagatagtggacaggtcagctgaagtttacttcttgcttacatgtatttttgggccatataattttcaagctggtgtaagatgctaaaaaattccaatttacttattacgagtaatggcaagaatacaaacttgaattacaaggtgtatatgtttcttgtaaacaattgtttttgatttcttctattctggctataactgtaatgtttccttggtatgacagcaccgaaaatctctgtattagagaggcaatggtaacagatatcatagttgggaagaatgacaacgtgaaaggcgtggccacatttttcgggatgaacttttatgcaccttctgttattcttaccactggaacctttatgagtgggaagatttgggtcggtaaaaagtctatgccagcaggaagagctggcgagtcagcttcacaaggactgacagagaatttgcagaaacttggatttgaaactgatcgcttaaagactggtactccagcgcgtgtggatcgccggactatagacttttccaatttggaggctcaacatggagacgaagag

SEQ ID NO: 147838 - DNA, 4015 bp, Arabidopsis thaliana landsberg
tcttactactgactcgtagtcccaccgcaagtgtcctcggacaagcacggcgagtccaccgcagaattgatcccatcattgcacggcgaggcctcagagccaccaccacgtatatcctctatcaacttcaccacatgacccatcttcggacgatgatccgcggcaactgcggtacacgccatagcaatctgcaacaaccccaccatttcttcctctatatccttatacctcatcagctccaaatcaaacacttcagccgtccactcctctctcaccactgattggacccatcttggtaaatccaccatgtcatcccggcttggtgattgcactggagacttcccagttaacatctctagtataagtacacagaaactgtaaacatcggatttatgtgtgtgtttccttgtttccattacttctggtgcgcggtagcctgcacctctcattggagcaatcggcacagccatcagaggggtcagtccaaaatcagaaatgcacgcatcgctctcctgcttcataatcacatttgaggactttatgtttccatgactgaactttggacctccagctgcatggagatgagctataccttttgccgctgatagtgtgatttttactctggagtcccagtcaagaggcgttttctcacttccccggttacctgtcatggcatcgaaatcaagatattcttaagtacaccaacgaggtaaatataaaccattaaacgaaggtaggaagaaaactaaccgtggagtagtgatgataagttaccagcagggtaataatcacaaaccatgagcttctcatccttggagtagtaatatgcacggaggggaaccacactaggatggttcccgacccggctgataatctccatctgctgttcaaactccctctttccagctgcgacttctttcaacctttttaccacaacagttgtggattcctctaacacagccttgtatgctgtcccatagctaccttttcctagtacgtgtgctgatgccctcaacaaatcctctagatcaaagttataggagcatccattaaagaataccagcttattcttctcaggttcttgcaccccacttccaaattcttgctttgctttctcagtcaaagtctttacttttacgatgctgttttccctcttgtcctttttcttgatacagcagcataatataattacggtgatcaacaacagcagagcagcccctccagctgcaataggaatgatagtgcttacatgtagtttcctttttgaaccttctttgtgaggaaatggcggcaatggaggcgtggaaatgtgtggggttagcgaaggagggggagaggaggtggcacagggttgcagaggaagtccacataacaatgtgtttccggaaaaagatgaactgggaaagccaccaagtgcagagggtattgaaccattaagatgattgttgctcaagtttaaacgtctcagacttactgtatcaagattaggtactggtccagaaagtttgttattttggaggctcaaccctgtcaattgcttcagattttggaacgttgctggtatcttcccggtgaaagagttaaatgagagatctaagatattgagctgtcgggacacaaaggaaggaacctcaccagagaagttgttatgttggagatagatgtaatctagtgaagggagagagtgaatgtcaggaggaaggttaccactgaggaggtttgatctcaaactgagaatcctgagtgattctagtttaccaagtgtgtttggagggattggtcccaagagcccaattcctggaaggcgaagagcgtgaacactagtaccatcagaagtgcaggtgacgccaacccatgatttgcagatatggttagtggaattccagttgagtcgtctgagatgaggaacagaagcagcaaatgcaagaagagcttgcctatccgagttcaggtcggcaatagcataagagcagaaagtagttgtgacaaacaagaaagagacaagacaagtagacaagaacccctttgacggtctcaaggtaaatactggaccaacataaaactggaaatggaactgcatcatcagcttgacttcttgaccctgctccaaaagaaaagcagaagatgataagcaatgacttccactacacaagccagtatgcagcagcaaggaaagctaagctaatcaggtatctctaaggaactggccaagcaagcttcatttattggatcacaacattgaaagttgataactaatatttggttgtgaaagaaaaaagcatatcagttatataaaaaactacagatgggaagaaaaaacaaataaagatactagttagatcttcaagaaaaagtatgccattgcctatctttatctttatcattgggagattaaacaatccaagaggctaagataagagattgaagcatccagcacaaaaaaaaaagcaaaaggaataaagctaaagagccaaactttaacacaaaactttgatgagcaaagaaaagcagactccttttgccaaaagatattgtcactagagaaagaagcagaggtctgtccatcatgtggacaatgtcactaagtaaataaagatgagttttgagtgtctgatttttatcggagttgttgaacaaacaacgtgtagccagcgaattggaactaatataccacgtcactagcctgtatctaaagtcttgaaagtttcctacccacctagccggagaaaatggcgatttttaagtataattcccaacaatgagagacagacaattacagaaagttaaaaggaaaaatacaaaaaccaaaaagaagaagaagagagaaagagaacctgggagtagagaggtaagctagcgaagtaagaaaattgtgggcactgaagaactcagcaatagaggaagaagaacttatgcagatggagcgctcagacctctgcactctactgcattgagcggactataacacaatcttgaaatggtgacagagaagaaagaagaaaaggcaatgtatgtggggactagtggagaagaagaagaagaagaagaagaagaagaagaagaagaagaaagagagagagagtgtggtgaagttaaacaaaagaggcgtatttgttaagggtaagacagtcttcaaaaggagtctttagatcaaatcatattggtgtgtaaacaccgcaacaaacgctaatgtagagagacccagagactgaccaagcttaagattcttatgagatagcaaaatgacaaatacatgaaaacaaaaaccatcttgatccaagttgttatttttaaagtaatcatttagatatggtaatagttcttacctgtccaaccactcttgctactgttttctcttgatttgcatcattcttgatttgcggatactatgtaatagtaatactggtcatttcatcatctatcaccaactccaaaacaagatccaacacatttaggcattattgaagtctgaagttttctatgaacattgagcagtgcaacgtgctcctaatatcatcactatttttgttggctttttaatcagaggagacataattattaccatgctctggcaattctaaagacaccattcccagtttttcttatacattaaactgtaaatagctgatagactaaaaacaaatgtgaactgggggtactgaaattatgagatgcaacttagttcttaatttaactgcaaatttgattccatgtccttaataattctcaaaacacactggaattttaacaacagccataatctggttccacttctgctttctcttcacttgtaaaactcaaagtccgtgtctggcttcttaacatttgcgcggtagcccttctcgaaatccttaggtagtatcacatatctgttctttcgcaccgcatgcataccagcttcctggcaaattgctgctatctgcattgttcaacataaaatcaaaatagtgtgtcattaataactatcatcattacatgcaatctttttaggaacaattcccatgttcatgataaa

SEQ ID NO: 147839 - DNA, 390 bp, Arabidopsis thaliana landsberg
ccgacacttaacaattcacacctgctctttttactctttctaaaaccctaaattttctcgcttcagtcttcccactcaagtcaaccaccaattgaattcgatttcgaatcattgatggaaatgatttgaaaaaagagtaaagtttatttttttattccttgtaattttcagaaatgggggattccgacagggattccggtggagggcaaaacgggaacaaccagaacggacagtcctccttgtctccaagagagcaagacaggttcttgccgatcgctaatatcagccggatcatgaagaaagcgttgcccgccaacgccaagatctctaaagatgccaaagagacgatgcaggagtgtgtctccgagttcatcagcttcgtcaccggag

SEQ ID NO: 147840 - DNA, 758 bp, Arabidopsis thaliana landsberg
aactaaatagcacatattcatatcctacaagacattcaaaccatgaaatcatcccatgcatatctcgtctgcatactgttgctctctctattttctctacatcaatgtatgtacaagttctcttatatataatatttaccaaatatctctttgttttagagtcatcaaagttgagttgggttgatgtgtgtttcaaattaatgtgtaggtgtgaggttagaaagatcgaacaaaatcgatatgtctgtatgcgtccatgaaatttgcggtggtgttttcgacggaggctgttattgctgtcccaaaacgccagctctttgctgggcagacatacaattctgcaccacctattgtcaatctcaaacttaaaaccttaaataaactgatctggagctatagttgttccattttaaacctacacctattgtcatttatgtttgcatctgtttgtcaacgagaatactcctaaacgtcttgaggtttaacgagagtactcctaaacctcttgaggtttaaagatcttttgaaagcatgttgaggtggaatcgtagccattatgtatttccttagtttacaagtaatataccataatatttgttttgatgtttttctgttgtagaatcggggaatctcataaattcagacttattgagacttgttataagacgggtactcttgtcattaaaaacgtccagatgcctacaatgattgaagtcataatagaaagattcgaaacgatctattctccaatcgcatga

SEQ ID NO: 147841 - DNA, 605 bp, Arabidopsis thaliana landsberg
cgttaccgaaccaattcaccggcgagagagaatgaatacgccgatgtcactctcggcggcgcgtggccgtatgctaccttttttagagaaggagaaatctgaagaagagtctgaaactctggaatcgagtctcttacagctaatcgacgacaatcgtcgatcatcgttacagctccgggaaaaaaccggtacgtaaatcgacccattcctcagctaattctgattcaaataatcgagaatgaaaaagtgagattcacagagacacaaaatggaaaacagagagatcgagaaaggaagcaatcaggcacgcggcgagaacggcggatctgctagtgaaggcggtgaacggaggagtagaggaatgtttcgttaacgagaaacgaattgagtcggagattaggaatcttgccattacggtggcgaaattcggcaaacaaacggatcagtggcttgccgtcactcacgccgttaatagcgccgtaaaggtttctgatcatctctattttctacgagtcttcaaaatcacgtttcgtcttctttgttttgttcaatgatggatctgtgtgttgattttgttaggaaattggagattttgagaattggat

SEQ ID NO: 147842 - DNA, 783 bp, Arabidopsis thaliana landsberg
tttcataaagagatcagagtctttggttttattctcttgctaagtaagcgcaagaagagaagcagcacaaggccttagttttgacaagttaaacaacgaaacaacacaaaacatcaaacacaacaactacaacaataacaacgaggactgcatatttacactgatctggaagcttttcagattcagcagcacaagaccagacgacacaacagggaactcttttctttccattattcaagatctagtaacctccctgaatatacgcatttaggcgttgaagctcctctctatgctcatgaaccactgcacggacaacatctcctatggacaccattccaatcatgcccttgtctttgattaccggaatatgcctgattcggttatctgtacattacaaaaacacaaacccgcatttttatttgcttcagtaggttttaaacccaaaagcttgtatctttagtggaaaaatatcaagttgtctgcttacctgtcatcagttgcatagcacgcaagaccttggtctccggtgtcacagtgataagcttattctgcaattgccagttcacagatccagtaagtttcaatccacaaaagcaaaaaaaaaatcgtacaatcgtgcatttacatacctcttcagtcataatgtctccaacttttgttgatttggatgatctcccttgcacaatgatcttccgtagataatctagagaaatcacaatgccgaaaagaaaatcacacataccacaagacacaacaaaaaaattattaatgattagatctaat

SEQ ID NO: 147843 - DNA, 495 bp, Arabidopsis thaliana landsberg
atggccggacttctagcttgggctgccgatgtcgtcggtaaaaatggaaaagaaggagacgatgagaaggatcggatcccattggttttcacggaggagcagcagaaatacgtcgatgagcttggccgaaaagcgacaaacctcagccgttcgatccaagatctgcgggtcagattgcctccaccggatatctcccagcgtctacctgaccttcatgctcactcccttgcgtgcaatgccgctctcactcttcagcttgattcgcactccgcttctcgtgaacaggttcgagttattgaaatactattgctgatttgggaatagtgtttttgcgttataggattagtctttaaatggatatggctttggctgatgttgaagtgatcctaatggttattcttttggtattgcaactaggcacccatgagagagcagacactgctggaagaaaatagagcctatgagaatgcaatatcaacctgggagacaaaaatt

SEQ ID NO: 147844 - DNA, 398 bp, Arabidopsis thaliana landsberg
aagtcagttctgaagaggaagggttcgaaggagcttggttcagagctgttttagaggaaaacccagggaactcatctcgcagaaagcttcgtgttcgttactcgacgttgctggacatggacggttcgtctcccttaatcgaacacatcgaacagagattcattagacctgtacctccggaggagaatcaacaaaaagacgtcgttttggaggaaggtttgctggtggatgctgaccacaaagacgggtggtggactggtgttgtcgtaaagaaaatggaggacgacaactatttggtttattttgatttgcctcctgacattatacagttcgagagaaagcagttgcggactcatcttatctggaccggtgggacttggatccaaccagaaattgag

SEQ ID NO: 147845 - DNA, 1104 bp, Arabidopsis thaliana landsberg
atcatcgaaatgtcacgtaagttaaacttcactcccaatttctatatatattccttcttaatttttttctcataacacaaagattaacgaacaccattatttttcagctgttacggacatcgatacaagtggtattcacgcattagaagacttatacaagtctctccagaaaagagacattcaggtacatacatatatacacacatactgaattctttaaggattataatctaagcactcaaagtgaattagttgaagaagatttacctgactctgtgttttgtgatgataaacagttgattctggcgaatcctggaccgttggtgataggcaagctacacttgtcgcactttgccgacatgttaggacaagacaatatctatctaacggtggctgatgccgtcgaggcttgctgtccaaaactctccaacgaggtctgaaatttacaagaaagaagaagaagaagaaaatgaagataatgacgaagaagaagaaagatatgctcttttaaatgttgtaacagtagagttaagaaagtgattgtatttctttggaccctttctttatgattcttctatcacaccaaggggtcaagtgtaaagttgactactttttataaattaagatttttctatgaaatgaagtttaaaaccccaaaatgtatccaatgtagagatctatatatctctggaaatagattggttaaaccaaatgggaactcaataatgtgacaagttggagtttaaaatgcattgatatttttagtagattagatatgatctttatccatatgttgaaaaatgaaaagatgatcctatccttagagcactaaatcaatttgatatgaacgtggaccaaaaacaaagcaagattcatttatgagtggagtaacactgtagcttcctttttctcttaacttgtctactagcgcaatgcactgcgattttacaagtcctttttagttattgggctttatcgatcggataaaagcccaaaccatgtttattcacaatgacccatttctttgtgaaaaactaaaaacgctgcgttttgattttatctcttcgtcggcgttatccctgagtttaggttgcagcgtcaatg

SEQ ID NO: 147846 - DNA, 382 bp, Arabidopsis thaliana landsberg
atgcgctttgccatgtttgctgatcttggtcacttcaattacgcagcaattcaggttagtttctactttagcttggatgatttacttattgttatatcgccacaggtttcaataaatctttgttttgtttgctgtagattgcgtttaccttcctggtttatccggctcttatattggcatacatggggcaagctgcttacttatcccggcatcaccattctgctcatgcaattgggttttacgtctctgtaccaagtcagtaatttgccttacttcaagaactcaatttttttttggtgttgatcattgaaaacgtaatctgatcttttgtttatataactccatggttttgaacagaatgtttgcactggcctgtgcttgc

SEQ ID NO: 147847 - DNA, 228 bp, Arabidopsis thaliana landsberg
aaaaacaaaaaccaatcataaaagagataaagaagaagaagaagaagaagctcacgttattgcctttccagcctttataagttctgatcagctcatcaccaccactaacaccgccgctactactcggagctccatgacgccgatctgacggctgcaaatctaacatcggaagaaacccagaaaaaaaatcgcgtttttttttgctacacaaacaaagtcttcagagca

SEQ ID NO: 147848 - DNA, 1007 bp, Arabidopsis thaliana landsberg
gcaaaacttgagagtttcttactaaggttgaatcatggtttccgaaacaaccaaatcttctccacttcactttgttctcttccctttcatggctcaaggccacatgattcccatggttgatattgcaaggctcttggctcagcgcggtgtgatcataacaattgtcacgacgcctcacaatgcagcgaggttcaagaatgtcctaaaccgtgccattgagtctggcttgcccatcaacttagtgcaagtcaagtttccatatctagaagctggtttgcaagaaggacaagagaatatcgattctcttgacacaatggagcggatgatacctttctttaaagcggttaactttctcgaagaaccagtccagaagctcattgaagagatgaaccctcgaccaagctgtctaatttctgatttttgtttgccttatacaagcaaaatcgccaagaagttcaatatcccaaagatcctcttccatggcatgggttgcttttgtcttctgtgtatgcatgttttacgcaagaaccgtgagatcttggacaatttaaagtcagataaggagcttttcactgttcctgattttcctgatagagttgaattcacaagaacgcaagttccggtagaaacatatgttccagctggagactggaaagatatcttcgatggtatggtagaagcgaatgagacatcttatggtgtgatcgtcaactcatttcaagagctcgagcctgcttatgccaaagactacgaggaggtaaggtccggtaaagcatggaccattggacccgtttccttgtgcaacaaggtaggagccgacaaagcagagaggggaaacaaatcagacattgatcaagatgagtgccttaaatggctcgattctaagaaacatggctcggtgctttacgtttgtcttggaagtatctgtaatcttcctttgtctcaactcaaggagctgggactaggcctagaggaatcccaaagacctttcatttgggtcataagag

SEQ ID NO: 147849 - DNA, 2681 bp, Arabidopsis thaliana landsberg
  unsure (1)..(2681): unsure at all n locations
aggattttggtattgaaaaatggcatcgaaattggttcaacttcaatcaaaggcatgtcaggcttcaaagtttgtggccaagcatgggaattcctactacaagcaattgttggagcagaacaagcaatacatccaagagcctgcaactatagagaagtgcagtgatttgtctaaacaattgctctacactcgtcttgctaggtcattaccattttcttctctctttatctcatggacatattttcaatggccatgctcaaactatcttttatgtatacttttgaaacattaatctttagataatgctgaggaaatgtgcaagttgaatttgcattacttgcgagtagctagccttttttgcctgaaaaaaatatgcttgagaatttggtgttatcctctagtagtttttgtcctcgatggaattgagttggtaaatctctggtgattaggataatatatgtgcctgtcttgtttttcccgtctagataacacattataagcaccacattgtgttttgctatcagttgaagagttcggctttctgtgatacgcaatcttgcgtctatagctaatactcttcttactaactacagcattcccgggcgctacgaaacatttaggaaagaagtagactacgcaaagaacttattgaagaacagagcgaatctgaaggtggaagatgcaggaatcgctgcattgtttggcttagaatgctttgcttggttttgcgcaggtgaaatcgtcggcagaggattcactttcaccggctactacccttgaaattgagacaacaaacaaccaggtcgccggaatattcttcctgacgcttgtaactccctccatatgattcctcacttgaactatatatacttcctcaaatccatttatattttcagttttttcctgaaacagaagtgttggagctaagggaaaaaaaaacagtttggtaaagctcttaataagttgagaaaaatgcatttgatacaagattcttctttagatatttattttatccacaaagtttaatatctgttcacaatatttaaaacatcagagaattattttttttaatatattaagtgattgttaattgtcgaataacttcaaaaatagaggaatatttgaaaaaaatgttattttgaagaatttatgatattcacaagaaaatgatttttgagtaaaaaactgtaatttttattttgtttgagaaactgatatcatagttgaagtaaaaatttaattttgcagctgataaattcaaaaatagaaatatataatacatttatttgagtggacttaagataaaatattgaattaacttcaaatctcagcgagagaatattcaaaaaaataataataaaattttggtgtgtgcgagaaagcaggaagaccaatgggatcttaaggagacccaattggaatctttagccacaatttcgaaaccttagcgaagaagacaacaacgatttacgagacgacgacgatgatgtttcgcacttcattgatgcgtttcgcggcagctttcttcgccattgtcttcgtcgttctcgtcggtgtcgctcgcagtgaggttcgatttggttctgtgtttttctctgtttcccaaattagacaaaaggaatcacattcttgtaggcattgacttaattggaaccttgccaaaaatctgattttgacaatgatgtttttgctaatttcacttcactttatgtctctgtgttttattgtttcttgcggtaatttcgaacaatgaattgattttgtgtcttgtttgnnnnnnnnnnnnnnnnnnnnnnnnnncaagaacttgcattgcacagaattgtgacagtaagattacaacttttctgaagtttccttaggttttttagctttttagctgactcacatgtatgtttgtttcagctctttctattcgatatgggaagtattgtgggattggacattctggttgtcctggtgaggagccttgtgatgatcttgatgcttgttgtaagatccatgaccattgtgttgagttaaacggtaatcaatcaagaatacgcaaatcccttactgctgtgttaaatatggatctgcacgaaaaggtctagttaccgttcttaggtgtactaggaattgggatgtagttttggtattatcatctggaaaggtttacactggccaatattgtatgcccattaggtctctataaacagagctgagataaactggaaattagctacagagttagtatgaatgtaagttggcttgattagtccttggatttgagattgtagtcaatctggtctgtccggtttctctacacaaattgtgtaatgcagagtgctaagatatcaagtatgataaatctcttaaggcctataaggctcagatgatcataagtaactctgctgctatgattcattgttcttaagctatagtttcactgattcaaatgctaaacttttggtcttgagttaacaaggttacgatgaaataatcgcatttttgcttcctatttgcaggtatgactaacataagctgccataagaagttccagcgatgcgtaaacaggctaagcaaagcgataaaacagtctaaaaacaaaaaggttggattttccacaaagtgcccttattcagtagtcatacctacggtgaatcaaggaatggatattggaatcttattcagtcaattag

SEQ ID NO: 147850 - DNA, 581 bp, Arabidopsis thaliana landsberg
aatgaagatggagaaaatatggatgctgaagcagtgaaacaggcagtgacagatgcaatcaggagctggggtgaaatcaatgatccacagaactagattgacccacttttcattttttttttatatataatttatttcttattatacaaaatataaggaaataacacagtttctatagtatttctgcttcttcttttttctttttcttctgtccattttgtagtccagaatttccccgtgaaaatggataatgaagaaaaatcaattgtatgtttatttatttcacgtaagcaatagaaaatacgtttttaaggtacatcacctaacatatcaagttatcaactgagatagttataattttgttcattttaaattagatcagaaataaataaaaaaagctgagtgtagcagagaactaaaacttattactattttggatttgatcagaagatattagagaaaattgtttcctacaacagaagaagacaagcatttttgttcacgtgagcaaaataactccagaaacccgggaaagtaaaacgtacaaatacatccgttctacacattcgtcccacgattga

SEQ ID NO: 147851 - DNA, 230 bp, Arabidopsis thaliana landsberg
aaagaagaagaagatgaagaaaccatcgaaaaagagcgaaatcgagttctgcacggtgtgccggtttcatcacgaccaaggctcgcgccacaagtacttccctcgccacaaaagttccctctcttccttactcgatcgattcagatcgaagatagctgacgtcagattcttcctgaagaaccctagcgttctacggccacaagagcagtcgcaaaaccgtgtttggtggg

SEQ ID NO: 147852 - DNA, 925 bp, Arabidopsis thaliana landsberg
caataatcaaataatccctgacttcgtcacgtttctttgtatctccaacgtccaataaatgaaagcaactctagcagcaccctcttctctcacaagcctcccttatcgaaccaactcttctttcggctcaaagtcatcgcttctctttcggtctccatcctcctcctcctcagtctctatgacgacaacgcgtggaaacgtggctgtggcggctgctgctacatccactgaggcgctaagaaaaggaatagcggagttctacaatgaaacttcgggtttgtgggaagagatttggggagatcatatgcatcatggcttttatgaccctgattcttctgttcaactttctgattctggtcacaaggaagctcagatccgaatgattgaagagtctctccgtttcgccggtgttactggttagcttcctcaatcttttgctctgatattatcacttgagttaaatacgctgtttgttatatggttaacgaacaaataaaagagttaataatacaacaaaatgactcttaaaatcttttaaaccacaaaaaaaaatcttattgtctacagaaatgactagggataattgtctttttgtagtcaaatagtgttgtagtactctgttaccccatgaaaggtggtttattagccacaagccatctctaacatttaatttttatgaacaataatttttcttacatttgtattaagagatgattgtaagcttaatgaatacatatttttaaactgaaaacgtatatagtttagaaatttctttttttttctctggtgtgttattcagttattgtacctttttaattattatatatatgaagttgagttgatgccatgtaaatgattgtgattgaaaatgatgaagaggaggagaaaaagataaagaaagtagtggatgttgggtgcgggattg

SEQ ID NO: 147853 - DNA, 946 bp, Arabidopsis thaliana landsberg
aattttcctaatcaattctctcatattaatcattttcaagtcctcaaaaagttcttgcccggaaagatcgggttcaagaaatagtactactccaatacaagaaggtaattagataatatggcttgaatttctgtgtttatgtagctaatatagctgcacaaagataaaacatgtgtagcatacgtatattgtattttgtgtgaatacttataggcatatataaattacgaactcatagaaaacatgtacattcgtcatattaatgtgcaagtaaatgagtaatggtgcattaattcgtatacaacttgattttttaaaaaaaaacgattttttttatagattatatgggttaaactgatcaaatttttttgtaaagatagtatgaaacgatcatgattttcatagttacatgcatgcatatggatgtacacttgcatatgggtacgattacatacttgtgtaacttccaaaactaacttttggacatggattaatttgtcaggagcaatagaccaaactaaacgaccgatggagttctacaattttctccaagtaaacacggattcgaagatacacgaattgatagataattcaagaaaagacgaagaagaagatgtcgatcaaaacaaccgaattcgtaacgagaattgtgttccatttttcgactttttgtctgttggaaactctgcctctcagggtttatgttaatttgtccgtaccacatgtactataaggtggaccatatgttaattaaagataatgtagaaagtactaatcaattagagctcctgtttgagccaaatgtgaaaattagttaagacatcccaaacattttcttgtataacacatataaggttgtacttttatcaggtctaattttctatttttattttaaggatgtttaatcagactcataaccattcgatatttttcatatttaaagaaa

SEQ ID NO: 147854 - DNA, 1383 bp, Arabidopsis thaliana landsberg
cagacccggactcgactggatcttctcttctcgccccatctctctctatcgacgatcgaacttacttgagtacttcttcttcttttgaccagagctctcacacatacgagtcactataatggaaggcgatcaagagacgaatgtttatactttggtggcaaggaagccttccttcgatctcccaacagcttgccctaattgtcttcctgcttatatatacctgaaattagcccagctaccttttgaacttgcgttcaattcaaccttccctgattcaggtttgcttctgttttgattcctcgcttcgtattttggttgttgttagattaaggttttggttgcgtgatgtgtatctgttggaagtgaacattgttaattctattagcttgaattgagattcgaatcctagacaagataattttgagttctggattcgaattcgtactattaagatcctgctcttaggttaatcagagtttagatagggtttttaggcaatagtaattcaattttgaggtgtatatatgcattggtgaatttttctggataggaagtgttcatcataatttcttgttatagctttggttgaattcctcgttatcgtaattgttaattcgaagagaatgatgatgtttcatacttgttcagaagaaattacctgtttgatttagctattgagtttgtatattaacaatatcttcagaatttctatgttatgtttgataatatctctagacacttcgtaatcctttgttcacggatttacaaatttgtgcattcaatatttataagcttgtgtattgacaatgttaatcatttgtttttaatatagatgaactgccgtactttgaaagtgatacatatgttgcatataacaatgaagatggaggagtaattgaaaaactgaagaaagatgggactgttaatctggactctcagctacagtctctttcggattatttatctttgaaggctcttattgtgtcttggctacaagaagcgcttacctatgagatatgggttggtaccgaggggatatctacatcgaaaatctactattcagatcttccttgggtgatcagcaaggtcctgttttataagcagacattcttggcaaagaaccgtttaggaatcaccaaagagaacgcagagcaaagagaaaaacaggtcgggtttgtttaagttttgttgtaactttagaagacctgtggtttatatttgtgagcatttgaactagttattaaagttcatagtcttaaatgtgaacagatatacaagagagcaagtgaggcatatgaagctttgtcgactaggttaggtgaaaagaagtttctctttgaagacagggtattgcaatcacattccggagctggattctttccc

SEQ ID NO: 147855 - DNA, 271 bp, Arabidopsis thaliana landsberg
attttaatttgcaggggagatagagctttctgtagcagtgaatgcaggtccatagagatgatgatgtcagaggaaaatgatactaaatgaaataagtttttatttgagctatatataaaaaaaaagttatgataatgactatgattaataaaacgttagatatggtgaattttgtttagttgcttttgttttggtttggagaagagtttggtatcggtatctatgtgtattatgtgtctacatgcataatcatatatacatgttttacttt

SEQ ID NO: 147856 - DNA, 291 bp, Arabidopsis thaliana landsberg
gatcgatctctctgtctctcgcatcggaagtacgaagaaggatctttgttttcttcctcttctccttcttctactttcgatcactcgtgaatctgattctactctagtctaattgggtgctttcgatttctgaataaaaattcgattttggtctgacgattaagaaagcgaaagtgatggccgccgtaaatggatatcagggaaatactccggcagatcctccggcgtctaatggatcaaaacaacctgcggctccgaccaagactgttgacagccaatctgttctaaaag

SEQ ID NO: 147857 - DNA, 346 bp, Arabidopsis thaliana landsberg
ttttcaagtccgccaaaaaaagcgaagagagggttttaatacgattccactcttctcaacaaatttgacgtttttgttcttcgaaattcaaattcacccagaaaaaatctcaatccgcgatggttgaagaatcagcttctgcgtcggaagcttcggtgatacaaaccctaaccgagccggcgacggagattgcgcaaaccctagaacctaacctagcctcaatcgaagccaccgtcgaatcggttgttcagggaggcactgaatccacttgtcacaacgattctaataacaacaacgaagctgatagtgctgctactgaggtttgtgatgaggagcgtgagaagac

SEQ ID NO: 147858 - DNA, 1124 bp, Arabidopsis thaliana landsberg
aaatcctccagggtaactagaggtgggtcatcagatctctagggtgttctcattcttcattcccagatccgtagaatagaaaatgtttggccgacctgcgattcgtggaggaggattccgcgcagagaatctaggtcaaaacgcacttaccttaatcgagaacataggctggtcactcttcgtcttcggagtactaatcttcaccataatcgccgcaacttacgaaccagaagatcctctcttccacccatctgacaaaatcacaactttcctcacttccacatcaaacgctacacttagatccgatgactccgttgttaaaaccggtgaagatttcatgctcgctaaccaagccgcatttgcagagtttatcaacataaacgatgttgaagccagcaccaatgagactacttcagaggaagagggtaacaagttggaatgtgatgtgaatactccaattgattgcaaagatcagcaagtgtttcatcttatgatgagagctactattgacaagtttaaagatattcacttttataagtttggtaagcctgttactggcgaagaaggtgtgaattcttgtgatatggcgtggcgttataggcctagagatgggaagagtgctgctttttataaggattataggaggtttgttgttgctaagtctgagaattgtagtgtgagtgttgttgggattggtgagtatcattcgggtttgaatgcgaggaagaggaagaagaatcagaaagctgggtttgagaaaactggtgggaagaaagatgatttctctttgcctgttgttggtgaacttgtgaatgattctcttcctatggttgagtctgatagtgtgtttaagactggcaagtatttggtttatgttggtggtggagataggtgtaagagtatgaatcattttctgtggagtttcttgtgtgctcttggggaagctcagtatttgaataggactctagtgatggatttgaccttgtgtttgtcttctatctatacttcgtctggtcagaatgaggaaggcaaggatttcaggttttactttgatttcgagcatttgaaagaagctgcttctgtgttggatgaagctcagttttgggctcagtgggggaaattgc

SEQ ID NO: 147859 - DNA, 892 bp, Arabidopsis thaliana landsberg
gctatatgtatgctggcgtaactaagccatgttcttcttgttcatcgcgatatctccggtgtcttattagtctccatcaaaagaagaagctctctgtatccatccatatcgaaaaagtatgaactttatccgaatttcttctcaattttatggatttattagtcagactcatgttagggttttgttcgatttcatgaatttagggttgaaattttgcttgtttgtatagactctaatggaactgatggtttgttttaggattgggttgatctaaaaaaatgcttttttgctttgttgttgtcgtgaattctgctcaataccttccattaactaatcagttttggtttgttgatgaatagccagagatcggaggaaggagagagagataccaatctctgttgctttggttttaaggtaatgtgtttgtttccttcctcatgagaatcggaatattaaggtattttgtggttaagattttagttgatttttgagaatggttttggtcagggtttagaggagatgtcaaaccacccgaagatcacatcggcgcatcagaatgtggaggagaagctaagggaacttcaggagaggttctgtcatcttcaagctgctaggaaagaagggcggcatggtgaccttgcgcttttagaagcccaaatctctcagaatattcgggagtggcaagctgaactcactgctccttctcctgaatcttctctgttggttcgtcctactccattaccatacttctctatggtttatgggttccaattctttgaaaaatagtgaatctgtaagcttggttgagatttagctcttttggtctttaacatgttgcaaggtgaaggtattagccaattccttgaggagtttgctcctctgttgaaattag

SEQ ID NO: 147860 - DNA, 440 bp, Arabidopsis thaliana landsberg
ctgagttgttttccagaacgattgagcatagtatgcaaaacacggtcatcaacatatttaaatgcttttgtcaagtcaatatgagagtaacataaagggtccatggcacacgtattgaacattgtgcagcatgtagaagcttgcattagggactttgtatcaaccatcgaaaatacctgattatgatgcatgaatccattagacatgtggctaggaacaatataattaagagaaatccatattgattggttaccttaacggtgagttcagaagggaggaaccaggagatggaattgtggagtgtggctagtttctgagagcaacgtttggtggattggagaagaagcgagagtcgctcgagagtacgatcgacgagttggtcttgaacggagacatcacaagaggagagaagattatcaagtactcgatcaaaagaggag

SEQ ID NO: 147861 - DNA, 717 bp, Arabidopsis thaliana landsberg
ttgacagagtaaaatggcgaatcctaaagtcttcttcgacatcttgattggtaagatgaaggcagggcgtgttgtaatggagttatttgcagatgtgactccgagaacagctaataatttccgtgctttgtgcactggggagaatggtattgggaaagcagggaaggctttacactacaaaggctcagcctttcaccgtataatcccagggttcatgtgtcaaggtggagatttcactcgtgggaatggaactggaggagaatctatttacgggtctaaatttgaagatgagaacttcaagttgaagcacactggtccagggattttgtctatggctaactctggtcccaacactaatggttctcagttcttcatctgcacagagaagacttcgtggcttgatgggaaacatgttgttttcgggaaagttgttgatggatacaatgtggtcaaggcaatggaagatgttggctctgacatgggaaatccttctgaacgagttgtgattgaagattgtggtgagctcaagaacccaagttcataagttcttaaaacattgggtgggttgatcttgacaggttattctatcatatgctgtgaagcaaagacagcatcttaacgttaaggtcaatctagtctgggatgcactactttggttttgactatatcatatgaaccttaggaagtgggccatccttgaaggtgttttcttaaaac

SEQ ID NO: 147862 - DNA, 607 bp, Arabidopsis thaliana landsberg
aggcttttgttttgatggaggaaaacccgcatcgagtttcacgtagaaaccatggcgggacccactgtcaaaacgacgccgtggacgaagagaaccgtcgacgacggcattacaaccaccacactcacggcgacgaagtcaaatgctccagtaagagatgccgatcgtgggcggctgcggcgattgctgactgtgtagcgctttgttgctgtccatgtgcgatcatcaaccttcttactcttactctagtcaaagtcccgtggatgatcggacggcgatgtctcggcggcggcggtcggaataagaagaagcggagagtaatacacaggaggaaacgccgcgggaatatcaacggtgaagatgagttttatcatcataataaccatcaccgccggtttgagacagccgaggagggtgagaaatgcggctgcggcggtggcggaggaggatgttatggcggcggagattatgatgatcaccggtttgtggtagagagagatgggagtttaacgaaggaggaggaggaggaggagagaacgacgtcgtgtaaaggagaagatcatgatgagtcgcgaataagtgcaagagttgaagccgagagagtgtg

SEQ ID NO: 147863 - DNA, 719 bp, Arabidopsis thaliana landsberg
catgtctctgctcagccccccttgactccatccaatccgtcctccatttccttcaatcaatttgaatctatccaaatgacctcccaagaatcttggggatgtgtcctaagatcctcacttccgacgtcagaacagaactgtaccctgttttcatgttcctgtcgaatgatctccatgtccctgagaatgcgttcagaagagtgatcaagaaatgtccaaggctccttattagcagtgtagaagaccagctcaaacctgctctcttctacttgcagagacttggtctcaaggatcttgaagctcttgcttaccaagatcctatcttgttggtgtctagtgttgaacacactctcatcccaaagcttaggtaaaattttagccgttttcttcaatgttactagtgattagattagagaatctgcctttagtgttgttactaaggacatttctttttgttggtcagattcttggagagtatagggttctcaagaccagaagcgattggaatgatcctaagatgtccagcattattcacattcagcatagagaacaacttcaaaccaaaactggattacttcatgagtgagatcaaaggagaaactagagaatctaaaggagtttccacagtattttgccttcagtctagagaaaaggataaagccaagacacttagaatcaatggagagaggattagagttgccactgtcattgatgcttaa

SEQ ID NO: 147864 - DNA, 1451 bp, Arabidopsis thaliana landsberg
  unsure (1)..(1451): unsure at all n locations
aaacttcctcagtcttcttcagacaagctttcattcagacacaatgttactctcaccgtcactctcgccgtcggcgatccacctcaaaatatctcgatggttcttgataccggaagcgagctctcatggcttcactgcaagaaatctccaaacttaggatccgtttttaacccggtttcatcctctacgtactcccctgtgccttgctcctcaccaatttgcaggacccgtacccgggatttacccatacccgcttcatgcgatccgaagacccatctctgccacgtggctatctcctacgctgacgctacatcaatcgaaggcaacttggctcatgagacgttcgtaatcgggtctgtgacccgacccggtactttattcgggtgtatggactcaggtttaagctccaattcggaggaagatgctaaatcgaccggtttaatgggaatgaaccggggatctttatcttttgttaaccagctgggtttctcaaaattttcgtattgcatatccggttcagattcctccggttttttgcttctcggtgacgcgtcctactcctggctcggtccaatccaatatacgcctctggttctacagtcgacgccgttaccttatttcgaccgggttgcttacacggtccaattagaaggaatccgggtcgggtcaaagatactttctttaccgaaatctgtattcgtaccggatcataccggagcaggtcagacgatggtggattcaggtacccaatttacgttcctaatgggtccggtatacactgccttaaaaaacgagtttattacgcaaaccaaatcggttctcaggcttgtagacgacccggatttcgtgttccaagggacaatggacctttgttacaaggttgggtcaacgacacggcccaatttctcgggtttacccatggttagtttaatgttccgtggcgcggagatgagtgtgtcgggtcagaaannnnnnnnnnnnnnnnncggagccgggtcggaaggaaaagaagaagtatattgcttcacgtttgggaactctgatcttttggggatagaagcatttgttataggtcaccatcatcagcaaaacgtgtggatggagtttgatttagctaaatcaagggttggtttcgctggtaacgtcagatgtgatttagctagtcaacggctcggattaagagattgataggacttgtttaagtcttctgtgtcgtgtgtgacatgagaatatcttctagaccattgatacgtttttatagttttgtgagtatagcttacagtcttcttatacgattatggtacgtagagttttttttttttgtggggaattttgtaaggatgtgtattataggaaatcttcacttttttcgtttaaaaattataaaattagaaagcgatttagatattttggtataggttcccttcctcagtctgcaactaattccactt

SEQ ID NO: 147865 - DNA, 797 bp, Arabidopsis thaliana landsberg; identical to SEQ ID NO: 49071

SEQ ID NO: 147866 - DNA, 1415 bp, Arabidopsis thaliana landsberg
cgctctgtacgtacctgccacgtggcgtaatctctctgcacgacgcgcttcttttctttctatatacatctctccgacacaaacctaacccttcttctgaatcactttagttatcaatcgatagaaacgccgcccaattaccaaacatcgaaaccatcatgagggttatctcaaaactgttcgattccgacagaagacgaataccgaaatcgccgaagcatttggattccggcgaaagcgccacgtcatcttcctcactcagcgacgtaaccaccggctcaagcagcctccatagcagtctctctctccaaacgcttccttcagttccctctcttcagaaaatcccatccaccaccgtcaccgtctctcactccgttacctcctcgtttaaactccgtgaacggagtcttcctgtaacttgtctcgccgtcaacggtggctatctcttcgccgtttctggacatgaagtaagtatctacgaccgcgacatgtgtgctcatctcgacacattcaacggccaagatcctttctcaggaaccgtgaagtccgtcggcttctccggtgagaaaatcttcacggcgcatcaagacggtaaaatcggagtttggaaactaacggcaaaaagcggttataaacagttaacgacgcttccaactttaaacgaccgtttacgacgttttgctcttcctaaaaactacgttcaagtacgccgtcataagaaacgtctctggatcgaacatgctgacgccgttactgctctcgccgttaatgacggattcatttactctgtttcttgggataagaccttgaagatatggagagcctccgatcttcgttgcaaagaatcaatcaaagctcacgatgacgccgttaatgccattgccgtttctactaacggcaccgtgtacactggatccgcggatagacgtatccgggtttgggccaaaccgaccggtgagaaacgtcacacgttagttgcgactttagagaagcacaaatcggcggttaacgcattagcattaaacgacgacggatcggttttgttctccggttcgtgtgaccggtctattttggtttgggagagagaggacacttccaattacatggcggtgagaggtgctttgaggggacatgataaagcaatacttagcttgttcaacgtctctgatttgctactcagtggatcagctgatcggacggtcagaatttggcgacgtggacccgattctagttatagttgtttggaggttctttccggtcatactaagccggttaagtcgctggcggcggttagagaaaaggagttagacgatgtcgtttcgatcattagtggaagtcttgacggagaggttaaatgttggaaggtgtccgtcaccaaaccggataattcattttacacgaatctcgttcaataa

SEQ ID NO: 147867 - DNA, 3506 bp, Arabidopsis thaliana landsberg
  unsure (1)..(3506): unsure at all n locations
tagactcggcggagaagctcgacgagctcttgatatcgtctgcgatttgtaacggcgaagatttaggaccatttgttcggaaaactttcggtacagggaaaccagagactcttcttcaccatctcaagtttttcgcacgatctaaagaatcagagatcgaagaggtatgtaaagctcactatcaagactttatccacgccgtagacgatctcaaatcgcttttatcagatgttgaatcacttaaatctgcgctttccgattcaaactctaaactccaatctgttgcggcgccgcttctttcgtctctcgattcgcttgttgaggctcaaactgtttctaagaacgtcgatctggcgattggagcggtgactcattgtgttcgtgttatggaacttgtttctcgagctaatcagcatcttcagagcggtaatttttacatggcgttgaagtgtgtggactcgattgagagtgatttcatggagaaaactccttcgtcaacgctgaaacggatgcttgagaataggattccggcgattcgatcttatgtggagaggaaagtgaataaggagtttggagattggttggttgagatccgtgtggtgagtcggaatttaggtcaattggctattggtgaagcttccgcggctcgtcaacgagaggaagagctcaggatcaagcagagacaagcggaggagcagagcagactcagtttacgcgattgcgtttatgcgctaaacgaagaagaggatgatgaatttggttctggccatgaaggcagcgatggtggtagttccggaggtggattgctaggttttgatttgacaccactttatagagcttttcacattcatcagacactatctcttggagatacttttaagcagtactattataacaatagggatcttcagcttacctctgacttccaggtatctactatgactccgtttctcgagtctcatcagacgttttttgcacagattgctgggtttttcatagtagaggatagagttttaaggactggaggagggttgatttcgaagctggaagtggagactatgtgggatacagctgttactaanatgtgtgctgtgttggaggatcagttctctagaatgcagacggctaatcatctcttactgattaaggattatgtgagcttgttgggggtgagtctacgcaggtatggctatgctgttgattcccttctcgaagtattaagcaagcacagggacaagtatcatgagttgttactatctgattgccgtaaacagatcacagaagctttatcagcagataagtttgagcagatgttgatgaagaaagaatatgagtattccatgaatgtgctctctttccagttacaaacatcagagatagtaccggcattcccattcattgctccattttcgaccaccgtcccagattgttgccggattgtgaggtcttttatcgaggattcggttagtttcatgtctcacggaggtcagcttgatttctatgatgtagtgaagaagtatctggataggcttctaggcgaggttctcgacgaggctctgttgaagctgattagcacttcggttcatggagtttctcaggcaatgcaagttgcagcaaacatggccgtgtttgaacgtgcttgcgatttcttcttccgtcacgctgcacatctttcaggagttcctttgagaatggcggagagaggtaggaggcatttcccattgacgaaatctcaaaacgctgcagaagatacactctcaggaatgcttaagaagaagatagatggtttcatgacattactcgagaatgtcaattggacaagcgacgatattccacaaggtgggaatgagtacatgaacgaagtgttgatctacttggaaactttggtttccaccgcacaacagatattacccgctaaagtcttgaaaagggttttgcgtgatgtccttgctcacatttctgagaaaatcgttggaacgttatgcggggatctagtaaaaagattgagcatggctgcaatcaaaggacttgatgtggatattcagttgttggactcgtttacagagaacctaactccattgctcacggataaagaagcgagagagatgaaaaaagcgttcattgagataagacagatgatcaatttgcttctgagtagtcatcctgagaatttcgttaatccggtgatcagagaaagaagctacaatgctttggattaccggaaagtagccacggtttcagagaaattcagagatccatcagatagtattttcgggacttttggaacaagagggtcgaggcaaaacccgaagaacaaatctttagatgcgttgataaagagattgaaagatgtgagctgataatggatcccagcacaaacccaaaacgtaagtacgatcccgtcctttgttttatctatggtctattgttaattatatgattgctttatatttcattgttgatgattcgttggtctctcagtaagaaaggcaaaaaaacacaaaactgatttcaccccaaagattgtatctttttttccattaattgcatcttcgcaaatgagttaaatagtttgattttgaaattcaaggttcatgtcactaccgctttaagtcatgaatcggatccttagtacggttttagttacgattaagaaatagtaaaatcaatccagtggaatgcatacttggctcagtttctttctctatcaaggttggtttcgttaccacgtgatcgtcgtttttccctagtaacacgtgtgccctctctgtcaatcaaatcatcaccgtacatctaattgcatggtctcttcgtcagacgcgacgattacacagtccacaagacacaaccacctaacaactgttttcgtcttctgtacttaatgagacatttcaaagcttatgcttcaaaatagcaacacaaatacaatcaaacacgaatcatagtaacaaaagtgaaagagcccatgtcgccaaacgctaaacccacttgtaatatcatcttcttctttatctttctcacagtctctttcgccgtctccggccaaaaaccaactgcttacgacgccgtcaaactctataacttaccacccggaatcctcccaaaaggagtcgttgactatgagcttaacccaaaaacaggcaacttcaaagtctacttcaatgacacgtgtgaattcaccatccaatcctaccagctcaagtacaaatcaactatctccggcgttatatcacccggtcatgtcaagaatctgaaaggcgttagtgtcaaggttcttttcttctgggttaatattgctgaagtgtctcttgacggcgccgatctcgacttctccgtcggaatcgcgtcggcgagttttccggctgctgattttgaagagagtcctcagtgtggttgtgggtttgattgtaataatgggcttttattttcttcttgaatctgttgggcctttagttgtactgaataaaaaatgcccttctcttgattagttaactaataatttgatt

SEQ ID NO: 147868 - DNA, 762 bp, Arabidopsis thaliana landsberg
gcaaagagatatagatcggagtttcttcgtcagagaagaagacaacgtgattccattagtctctattgcgatatgatgcaggaagatgctgatcttctctctagaaagctgtcaaggtaatgaagcgctacgcagttcttgtatatgctttctttttatagcgttttgatagtatgtgttactttgggttgtttttaggtgttggaggtgctttgtaaggcagaagaggacaactttggatttggcgaaagcttatgatggtttgaagattaacgagtcattaccgtttgagcagcttgcgatgctacttgaatcgctgaacactcttaaaacggttaaatctttgcttgatcgccttgaaattcgcttagaagcttctaagaatgttaccacggtttctcaaccgtccatattggataatattgatcaccttcttaaaagagttgccacaccaaggcgaaaggctacgccgagtactctgaggagcagaaagggaaagaaggtttcttctgttaggaatgtggctgggacatcagtgaagatgtctaggtatcctgtcagagttgttctttctgcctttatgatactcggccatccagatgctgtttttaatggtcaaggtgatcaagaggctgctctcaataacgcggctaaagggtttgtgagggagcttaagttattgataaacgttattcaagagggtcctgttcaggtttcgggtggagaatcaaaacatcggaccttaagatctcagttggactt

SEQ ID NO: 147869 - DNA, 173 bp, Arabidopsis thaliana landsberg
tttacctccagggaaaaagaaaacaaattttcgccggcgaagatagtaacggaggagcaatgcggagtaaaaagagagcaaaaacgcagagtgtaggagaagaagaaaataagcgatcgtctctttctctttcactagttgcaacaaaaaagaaaaggagaagaatttattct

SEQ ID NO: 147870 - DNA, 759 bp, Arabidopsis thaliana landsberg
gtctttgacaattgtccatcatcaatggcattaaatggcaaaaccgtaatttcgaactccaccaaggggcaaacttaaaagtcgatgtctttcttcttcacctcggacccatcggagagaagatactactagaagagattcattcacagtgttgaaattaaaaaaccgaaactttctcgtttcttcttcttcttcttctccaattttcaaaattcgaaaagatgttgaagctttcgtgtaatgtgactgattctaagttacagagaagcttactcttcttctcccattcacatcgatctgatccggtgaatttcattcgtcggagaattgtctcttgttctcagacgaagaagacaggtttggttcctttgcgtgctgttgtatctgctgatcaaggaagtgtggttcaaggtttgggtactctcgcggatcagctccgattaggtagtttgactgaagatggtttatcttataaagagaagtttgttgttagatcttacgaagtgggtagtaacaaaaccgctactgttgaaaccattgctaatcttttacaggtcagatacaactttttcacgttgtgtgtgtgtgtgtgtgtgtgtgtcttgatgattggttttgttgtaaagtatgaatctttttgtggtgaattgttgtgtataggaggtgggatgtaatcatgcacaaagtgttggcttttcgactgatgggtttgcaacaacaactactatgaggaagttgcatctcatttgggttactgcg

SEQ ID NO: 147871 - DNA, 840 bp, Arabidopsis thaliana landsberg
aaaaaatctgttgtcatctgcaaattggtttcattctatcagctggtgttgaggtgtgttggaagatgtgaatctcctttactagggttcgattccaacataaaatagtacttttggaagatacagagaaagagatgggcaaatttcagattcttctaaacgctgagagctttacttgttcttctttcaatactttcttcactttatggatcttctttactcttcactcctttccatttcaagctcaagctgctccttctggtaactttaccatacttaacttcgttgctttgatctatctgcttcactcactttcttagtgaattcactcttcaatttctggttttttatgtcaattgttgtaaattgaatttaggttccttgattaagcacatgtcatcggttctcaagtggactactggatcatcctctaaattatcccaatcaggtaaattctcaattagtacgactgaatttggtcgccttgattgtttgttgttcataaacttggttttgatgtttctttctctaactgctacttgtggtgcagacactaatgttcttcagtttgagaatggttacttggtcgaaactgttgtggaaggaaacgatattggtgttgttccttacaagattcgagtttctgatgatggagaactttatgctgttgatgaacttaatagcaacatcatgaaaatcactcctcccttgtctcagtgtaaaacttcgttctccacaagttctcttctttatgacttagtttttgcagttttaagtacatccaatcatatacacatgccatcgcagattatacttgatacactaacgatactactgtga

SEQ ID NO: 147872 - DNA, 893 bp, Arabidopsis thaliana landsberg
caactctctcttctctctctctccgccgagaatggttggagttttccgacgatcactctcattccctaacaaaccttgcggccgatcatctccaccgtcaaagccacgtgtctctcaccacacaagatccatcagtctaccctgccggtctcatcccttaatctcccacgttaaccacgagatctctcagctcaaatcctggttctcattcgccggagaaactcacagccgcaccacctcttggatcaccgacggtctcagtctcctcaaggacgttcaagaaacgctcgctgatatacttcagctcccacaatctcaagaatctctacgaaaccgtcctgttttcttcgagaatcttctagaagatcttctccgattcgttgacgcttacggaatcttccgtacgtcgatcctctgcctccgtgagcaccagtccgccgctcaagtcgctctccgtaaaaaagacgacgagaaaatcgcatcttacctaaaatctcgccgatctctcgcaagagatatcgcgaaactgacgtcatcgatccgtgagccgaagacaaaacaccaacactgccacgtagacaacgttaacggaacgtacggtgacgcagagcttgcgtcagttataggtgacgtcattgaagtaactgttttggtttccgttgctctctttaacggcgtttacttatctctcagagccaccaaaacaacgccgtttatagggtttttgaaacgatccgaaaaaaaggagaaactagacgaaggaatcgtggagttgaagcaagttgaagagaaaagcttgattggtttaagcaagaagaagaacgaagaagtaaagagtttgatgaagaagatgatggaaatggagaataagatccgtgaaatcgaatgtgaga

SEQ ID NO: 147873 - DNA, 261 bp, Arabidopsis thaliana landsberg
ttagccacaaagctaagaatcagtctctgtcatcgccgtcgtctgttaagtcgacacgtgtcttcggttttctttggccttggaaggcattagacaatgaggatcattccgcggttgttctcgtccggctctttggcgatccggctactatcgagaagcgacttccaagaagctcttgaacaaagctgttggtaatttgtacaatgtttggttgggtttattgattgtttttacgttaaaatcgcttttataaattggaaa

SEQ ID NO: 147874 - DNA, 1051 bp, Arabidopsis thaliana landsberg
ttcaaattgatgctcatgttggtggtgtgaatgatatttccttctcgactccaaacaagcaactatgtgtaataacttgtggtgatgacaaaaccatcaaggtttgggacgctgcaacaggtgtcaaaaggcatacttttgaaggccatgaagctcctgtttattccgtttgtcctcattacaaggaaaacattcaggtaagcttagctaaccgttgatctccctcccttctattaaatgtttcagttttttgatgtgttgtatttttcctgtcatcaagttcatattttcaacagctcttgatgggaaaattaaggcttggttgtatgataatatgggttcccgagttgactatgatgcacctggtcgctggtgtactacaatggcttatagtgccgatggtactaggctattctcttgtgggacgagtaaagatggagagtctttcattgttgagtggaatgaaagcgaaggagctgttaaaagaacttatcaaggattccacaagcgttctctaggtgttgtgcagtttgatacaactaaaaaccgttatctagctgcgggtgatgatttctccatcaagttctgggatatggacactgtacagcttttaactgccattgatggcgatggaggcctccaggtacatgaacaaaaaatgcctaactagaaaagttttcagatattcttttggagtttcttcttaacttgcgcttctaatatatttaaactaggcaagcccgcgtatccggttcaacaaggaaggctctctcctggccgtgtctggcaacgagaatgtgatcaagattatggcaaactcagatggtctaaggctattgcacacttttgagaacatatcatctgaatcctccaaggtacttaaaatctaagctaagctttaaattacttacacccaattgaaagatttagtcaacacttcattctacatttgcagcctgcaataaacagcatagcagcggcagcggcagctgctgcaacaagtgctggtcacgcagatcgatcagccaatgtagtttccatccaaggaatg

SEQ ID NO: 147875 - DNA, 489 bp, Arabidopsis thaliana landsberg
tgcgtaaactacgtgcaaagaaaaacatcatgacctgcccttgctgcacaaccgatctctccgagtttctccaaaacccgcaggtaaaaaacagaaaccaactcttcttcttacattctagttcttcccagttttgttgtgattaactttggctaatcacaaatgtccaataaaacaggtgaacagagagatgatggagataatagagaattttaagaagagtgaggaagaggctgaagttgcggagtcatcaaacatttcggaagaagaaggagaagaagaatccgaacctccaactaagaagattaagatggataaaaactctgttggtggtacaagtctctcagcttaaggagctctttagtttttccaaacaaacttcctttctgtgaagtgcattgcgacttatcatttttattttaaaacttatcagaaattgctcgaatctttttttcccgttagatataaattcaacattactacaacata

SEQ ID NO: 147876 - DNA, 834 bp, Arabidopsis thaliana landsberg
caacaatgacgaaatctgcaactctattccttctctttctcactatctcagccttcactggtacgatatctcttctccttctcgataatttatgaaatggggtttgtttctcgttttgattcctctcaataatagtgactttgttcttttgcagatggagctcagcttataatagtgaataactgccaggagagcatttggccgggaattctcggcggcggaggccaaatcacaccaagaaacggcggattccacatgggaagcggcgaagaaaccatcatagacgtaccggataaatggtccggtcgaatctggggtagacaaggctgcacctttaaccaaaacggtaaaggctcatgccaaaccggagactgcaacgacggctctatcaactgccaaggaaccggcggtgtaccaccagcaaccgtagtagaaatgacattaggctcatcttcctctccgcttcatttctacgacgtaagtctcgtcgacggtttcaatcttccggtgtcgatgaaaccaatcggcggtggagttggatgtggcgttgcggcttgtgaagtgaatttgaacatttgttgtccatcagctttggaagttaagagagatgggaaagtggttggttgtaaaagtgcttgcttggcgatgcaatcggctaagtattgttgcaccggtgaatatgcgaatcctcaggcgtgtaagccgactctgttcgcgaatctgtttaaagcgatttgtcctaaagcttatagttatgcgtttgatgattctagtagtttgaataagtgtagagcttctcgttatgttatcactttctgtcctccaaagtgagag

SEQ ID NO: 147877 - DNA, 402 bp, Arabidopsis thaliana landsberg
gtaacttctcatttgcctcgtcctatcaaaatgcggaagaaacaagatgtgaagagccgttcagtaaggaaataaatgtggccagaactcaaaacattacaacaataagcaaagacagacctaaagcaaatcaacaacaaaccaagactacagacatctacctagcagcaaagactaaccacaagtagcagaaaagactcagaaattgaatatcctaagaaagttgaaacctttcctcttaagaaaacacaatcgcacaaagaaactctaacaaaacgttgttttttctcttccagagagctaatagcgttttcagatgacgatgagactcaaaaaggagaagactttcgtcggaaattagaagaacttactaagtacagagacgagagggttagggtttaa

SEQ ID NO: 147878 - DNA, 561 bp, Arabidopsis thaliana landsberg
gtcggtttagaccgattagtagacgaatcggacatgttaatctctcttatctccaaagcattgtattggaaacactacgtatgtacccggcagtcccactactactacctcatttgtcatcagaagattgtaaagttggaggctacgatataccaagtggaacaatggtattgaccaacgcatgggccatgcatagagatccagaggtatgggaagatccggagatattcaagccagaaagatttgaaaaagaaggagaggctgagaagctaatctcatttgggatgggacgaagagcttgtcctggagccgggctggctcataggctaataaaccaggctcttggaagtttggttcaatgttttgagtgggaaagagttggtgaggattttgtggacatgaccgaagacaaaggagccacattgcccaaagctataccattaagagccatgtgcaaagcacgttctattgttggtaaactgatataaatgttttactttgaaaaaatttattttatttgatgacaagcttttaattatgtattaaagacttttagtcttc

SEQ ID NO: 147879 - DNA, 312 bp, Arabidopsis thaliana landsberg
ctcactgaaccacagctcaaatgtttccttcacgtatcggagaatgttctcaaagatgctcaagagattgatcaacgaatcgctaaaggtgaggaattgggtcctctcgccggagttttgatcggcgttaaggataatatatgtactcaaggtatgccttctactgctgcttcgagaatcttagagcattatcgtccaccgttcgatgcgacggcggttaagaagattaaagagttgggtgggattgttgttggtaagactaatatggatgagtttggaatgggaagtaccactgaagcttctgcgtttcag

SEQ ID NO: 147880 - DNA, 819 bp, Arabidopsis thaliana landsberg
aagagcttatgcgaattgagttgcgatgattatgtcaaagctgggttgactttggaagacgccttggtatttgacaaattggtgagcgatgtgattacaaaggctatagagactgatccaagagatcaatggaaagctttggtagatgagagtgtgcttaagccatggcatccacatcctctgcatcagcttctctattactctgtctattcaaactgggactcctctgttcatggccctcctctctattggtttccttctctgtgcgtttcatgaacttgttcgaaattctgatatttatctgtaaaatacagctgattgtctgttcaatttcttctttgtgtgtgtttagatctcagtcaaagtccaccaatctggggaagctgatggaatatcacggaccaagacttcttggtccttcatacaagaaccctcttgaaagttttgaacttttccggagattctcagttgaacaccctgaagtaagcatcaacgttgaatgttgtcgagcaaaagaatctttgtcgcagctctggtttggtctaatgtaaacatcattttcaggtttattggtcatttgttatcgatgagctttcacttgtgtttcacactcctccgaggtgtatccttaacaaatcaaaacctgaagggacttggctccctgatgcagttcttaatatcgctgagtgttgtctgatgccttcaagccatcccaaaaaggaggatgatagtgtggctgttgtatggcgtaatgaagggtttgatgactctccagtcaatagaatgaccattaaagagcttcgggagcaagtaatgtat

SEQ ID NO: 147881 - DNA, 919 bp, Arabidopsis thaliana landsberg
catatgcacatcgcatctttgtcgaagaactaggtgcaccagaaagttcgttgttgaactgtgtacccaaggtatcatttttttcttctttcttattttgtataaccaagaaatatcatttcctgaaaggattataaatacacgttgaacagtgtcttttatgatttataacaacacgacaatcggacaatgtacaggaggactttggagggggccacccggatcccaatcttacctatgctaaggagctcgtggcacgcatgggattgagtaaaactgatgatgctggtggcgagcctccagagtttggcgccgctgctgatggtgatgcagaccgaaacatgatcctcggtaaaaggtagcagagactaattctcttttaagtgagatcacagagatgtggagcggatataccactctccccgttaaccaaaaatatctcttctccgcaggtttttcgtaactccttcggattcagttgctataattgctgcaaatgctgttggggccataccatacttcagctctggtttaaaaggtgttgctaggtatgcatcccggttcttgtttgtttactccagttcatagattgaaaacgctggactttggtgtcatacgtttttgtttattatagatagtaacaatcttttctcattaaattctcaactttcacattcgtattgcaggagcatgccgacctcagctgcacttgatgtcgttgcaaaaaacttgggtttgaagttctttgaggtagatgtcattgtgaagcttttctctagcttctattcattgcaatcacgtaacatagtctattgctctaatacttctatattttaggttccaacaggctggaaattctttggcaatctaatggatgctgggatgtgctctgtatgcggagaagaaagttttggaaccg

SEQ ID NO: 147882 - DNA, 346 bp, Arabidopsis thaliana landsberg
gtggtacgattgtgttgtttgatcgtaagatgttgaggaactttagaaaggatggtcataactggaaaaagaaaaaggatggaaagacaattaaggaagctcatgaacatctaaaagtgagttttcttaatgtctctgagttcatatgcgcttttctctcttctcctctgcagctaatatatttgttatttgtgatctctgtgtattgttcttccatcaggttggtaatgaggaaaggattcatgtttattatgcccacggtgaggatacccctacatttgtgcgaaggtgttactggttattggataagtatgtgtcaacaaacgattattggtttatcctttga

SEQ ID NO: 147883 - DNA, 485 bp, Arabidopsis thaliana landsberg
acttgtgccaaaatctcagcaagcttgagaatctggaacaaggtactcttctaactccatgattccagattaattggttgccatgtcagctcataagccaaaggaccaaactctcacaaattcttcctgtctgcaggattccaagagctcttggctgatttggttgaagccgctattgctcattgccaattgattgttgtttccaagtaatcttcttcttcaccgcttacacgtatcaaacaagttaatgattctcccctcaatgtcagctcctgaattttgtgatatttgtcttggttaggttcatagcgaaactagagcaagacataggtggcaaaggagtgaagaaacagctgaacaatctgtgttacatttatgctctttatctcctccacaaacatctcggcgatttcctgtccactaactgcatcactcccaaacaagcctctcttgctaacgaccagctccgttccttatacactcag

SEQ ID NO: 147884 - DNA, 3821 bp, Arabidopsis thaliana landsberg
atggagatatcggtgagcatcttcgtaaccatatccatttatctgaattgtattcatttgaagaaccatatgcatgagcagagtcctgttttaactgaccgtgccttaatgagagacctcattgttctccaaaggtcacggtctcttagagatccatctgcgagccctcctgcttggaacacgcctccttctgttgtggatttgcttccgaagaaaggagatcttgtggaaggaggaagaagatctgttgatttaaagaagtctagtcgtaggttgtctgctttgagtggttcttcacctgttgtcaactttgggacatctaaagtgactccttctgatgagaggtctggtcctgttagtggtgaaagggatagtggtaggagagttaagagagaggaatctagtagaaagagttatagaattggggatgattatcaaaatgttaatgaggttgtttctcatggttcgggatcaaaagctagtaggaggcttagtagggttaatgatgctatggttaagacattgtctgatcagttaaatgaggttgttgttggtgatagtgatgatgtggtttcatctaatgttcgtccacgggttaggtatggaggaggtggtggtggtggtaatactcggggatgtgcgggtggaatgagtccccctaaaagacggaagtttagagggacgaggagagttcggggtaagagtagagatactggtggtggtaagagtgagatgtctgttgcttctaacacattgcctcaagttgagaagcatgatggagaaaaagagggatttggggaacagaacatgacaaaggcttgtgggattccatttaattggtcaagaattcatcaccgagggaaaacttttcttgataaggcgggtaggagtttgtcttgtggtatgtctgattcgaaaggtggtaggaaaggtgaaactaatgagagaaatggttctgataagatgatgatacaatctgatgatgactcaagctcttttatccgctctgatggtgaagcacttcctttactagttgatagtggagagaatgatggttgggtgcacgattactcgggggagctaggtatttttgcagacagtctgctcaagaacgatgaggattctgaccttgcttcagaaggaaggtcaggggagaaaaaacacaaaaagaagagccatgtaaatgctcggcatcgacatcggcaacagcatcagagtcttactgaaaaatacacacctaaaacattccgggatcttctggggcagaatctggtggtacaagctctttctaatgcagttgctagacgaaagcttggacttttgtatgtcttccacggtccaaatggaaccggaaagacctcttgcgctaggatatttgcaagggctttgaactgtcattccatggaacaaccaaagccttgtggcacttgcagttcttgtgtttcacatgatatgggtaaaagctggaacattcgggaagtgggtcctgttgggaactatgactttgagaaaataatggatttacttgatggtaatgtgatggtttcatctcagtcccctcgggtgttcatatttgatgattgtgatactttgtcatctgattgttggaatgcgttgtccaaagtggtggatcgagcagcgccacgtcatgtagtctttatcctcgtctgttcgagtcttgatgttttgcctcatgtgatcatatctaggtgccagaaattctttttcccgaaactgaaggacgcagatatagtttactcattgcaatggattgcatcaaaggaagagattgagatagataaagatgcattgaagcttattgcttcaagatcagatggttcattaagagatgctgagatgactcttgaacagctgagtttgttaggacagaggatctctgttcctttagttcaggaactggtaagcattgttctgtcccaccaccatataaaacaattgaaagtatatttttttgaagataatttcgaattggttttaattctttcaggttgggcttgtttctgatgaaaaattagtggatcttcttgatttagctttatctgcagatactgtaaatactgtgaagaatctgagaacaataatggaaacaagtgtagaaccattggctttaatgtctcagcttgcaacggtcataactgatattcttgctggtagttatgatttcactaaagatcagcataaaagaaagttttttcgacgacaaccatgtgactttcgacattttccagcctacctaaatttcaatagctttgttttagtcttttgttctaatccaacttttgatttgttatagtacctaaagaagatatggagaaactgagacaggcacttaagacgttatcagaggcagagaaacagctgagagtatcaaacgataaactgacttggctcacagccgcgttgcttcaattggctcctgatcagaactatctgcttcaacgttcgtccactgcagacactggaggtagagaaagctcagatcaccatctggatccttctagcgatgcagctggtgcaacaagttctggtttggacagaagaagaggtgatagtagaaaaaaccgacccctgttgaagaaatttggttagaggttattgagaagcttcgagttaacggtttgagagagtttctttataaagaaggaagaatcgtctctcttaatctcggatcaggtaatgcatttcgtatagacaaatcttgaatctttattatgttcaaagtttctgtgaagccaacttctttctggtgttatggcagctcctactgtgcatctaatgttcagttctccgttaaccaaatccacggctgagaaattccgaagccatattatgcaagcgtttgaggcagttcttgagtcacctgtcacaatagagatcagatgcgagacaaaaaaagacccgagaaacaacgtgcatcatcatcatcatcacccaactgtgaaagacaaaagcctgccacaatctttagcactcattggccatgattacaacatcgatggaagtggaagaagtgagatagttgaagttactgaatctaatggacaaagacgacaacaacagaagcaacaggaagaggagaggacagagccagttggttcctctgcgttagcccgagctagaaggaaacatttggaagcaagccagagtcagaaccagagccaaagcattgtgagaggtaaggtctcgttggctcatgtgattcagcaagctgacggatgctcactccagaacggttggtctaaacgcaaggccgtgtctatcgccgagaagctggaacaagaaaatctgtaagaatctctaacacttaatcaaacatcatttcaaagatagataaaagtaaaaatgttgactcttttttttcttacaggagacttgaaccaagatcaagaagcttgttatgctggaaatcctcaagaggcacacgtcgcaaggtaacatcaaaaccctctttatcttcagtgaaaatcaaaactttttggttatgagtaattgaaaagatggaaactttgacattataggccacgaggttgaaggtgagaacaagaagggcaagaccacatacgttacttaagctcgtgtcgtgcggcaaatgcctgtctacgagatctccaacaagataaaggctttaattctctgatcgatcatacgcagatttactgtagtttcaatcaatgtagcttttttctttgcattttttaatctttcttaccacaaaataaatggattaatttaactcttcaaaaccattcgtaagagagatctttattaatgtagatgcatcaagaactgcgttatgtaaa

SEQ ID NO: 147885 - DNA, 446 bp, Arabidopsis thaliana landsberg
aattataccgaaccgttataaatacggttcaaagttcaatctcttcaactaaaaccgaacttttatctattcgaaccgaaccaacagacccaatggccatggatgatatggttagccaggtggctatggattactggttacaaataaatctacgtggcttaatctcccttacacaaaactctctgtgccttttcttccccacttgagctaattcgcttaaacggcgtgcttcgcgacgaaccgccacagataaggttcttcttttttttttccaatatctctggattttttttcccctcgttgaagaaaatctagtggtgattaagccataggggaaacaaaacccagagagacgagtttgctagatttttttttttttttggaggctgaatgagtttggagaagaaggcgagtagtacaaattcgaactccaggaagtaaaagag

SEQ ID NO: 147886 - DNA, 246 bp, Arabidopsis thaliana landsberg
acaacctcataatcactttcgaaattacatttacgctttcttgcaatcaaattttccgatcttaagttcagaagacgatgtcagaggtggaaatagagaacgctgctacgatcgaaggaaacaccgctgcggatgcgccggtgacggatgcggccgttgagaagaagcctgcagcgaaaggacgaaagacgaagaatgttaaggaagtgaaggagaagaagactgttgctgccgtccgaagaagag

SEQ ID NO: 147887 - DNA, 3285 bp, Arabidopsis thaliana landsberg
gagggcaacactgtgattgctcggtctcgggttcgaatattaaagcggtcgagtgttgaagaacactctttttgtagcagagagagcatagattgttgttcactcgggtgccgtagagtccacagcctccctcgcatggtaatgcttctgtttcgttcaccatcttctttcttctacttcttgcgatagttgttatgagagtcaattcaagattttgtgtgagctctatcaatgactctaaaatctaaatatatagaggatgtctattgttcttagttcttctggaattgtgtagtgcaattaagtttccaattttttaaattcaattcggtaagtgtttcctcttttgtaatactaatctacgttcgataagtgtttgctaacgtttcttatcttaagttattgattttcctttcctcatataactaagaaaggaaaagttacaatagaaacgctgagagatatttcataataaggaaactgagaagacgtgtttaatcctcttcgaacagtcataaatccaataaagaaaaacgttgactaatgtaagaaaaaaaagacaaaccaaataaatacctaatccaacttgatgataatttagacaacagcagcttcctggtagtttctaaaacgtcggtccgttttctaaatacagaaaagagttgcgtgccgttttcactatcttaaggagtaattaattagtttcaagtaaaataccaaattagacaattccacatggtgatctttgatggcctccccaccaccgcacgtgaatttggaataccttgtttagtttcattatcaaattacacctaaacgcgttactaattaaattatttattgtctatcaaaaagccacgcaacaacagtctagcatttaaatcttcacgtgggtctaacccggttccggtttcattatccgggtatatgttttggctttcgtctgaatttgaatttgagttttgtcattcaaaaaacgataaataaataaaatattggtcagttattctttctatggttcttgtttgatatagaaagaataacaggttttggatttgtctgtgtgtttggactttggattagtattcattcggtttaaccaatcaaaattcgcaaccttaacacgtaataaaccatgatgttaatgatttaatcaatgatcaattaaatgtatagaaatttattttccatttccgcaacagctcaaaacgttttctctctttttccgattttagtctaaaaactgaaacaaacacaaaaagcaacaatttgtctttgaaaatctcctctgtgtatggttcagcttcggtttactaaatctctatgccgtcacgatcaatctcggcaccggttccggttcttgctccggctccgatcgtttcctctttagtcccagcagcgccgtcaggacatcagaataagacaacgcgaatctttccaccgttcgtggtggctggagccggcgccggtttctctcttttcatcactctctccgtctgtttctgtaaattcagccggaaacgttcatcacctccggcggaaaacgcttcctcttcgcctcggagaccgtcgccacgtgagttttcatattcgtctctccgtcgcgccaccggttctttctcgcaggcgaatagactaggtcagggcggatttggcgtcgtgttttgtggaactatctccggcggcgagaatgtagctgttaaagtaatggattcaggatctcttcaaggagaaggtgagtttcaaaatgagttgttcttcgccgccaagcttgactcgcctcacgttgtccctgttattggtttctctcatgatcgaaaacgacgacgtttgcttcttgtttacaagcttatggacaatggtaatctccaagacgcgttgcttcaccggagatgccctgagcttatggattggaatcggaggtttttggttgccgttaacattgccgatgggattaagcatcttcatagtcttgaaccacctgtgattcatggtgatattaagcctagcaatgttctattagatagtctcttctctgccaaaatcgctgattttggtttggctaggttgaaagcagagcaagtggagattagtgtagctccggagcgtgatggtgatggatctatggttgaagaagtagagagtgtggtaactactgtgactggttatgaagattttaactttgggttggttgatcagtctccggagagtgttgctaaagttcctgggtctgtgagtgcttctcctgaggcgacgacggttgtctctgtttctccggaaatgggagagaaaacggatgaggatggtggtagtgttgtggtgatgaagaaggggaaagagagtgagagcaaagattggtggtggaagcaggagagcaatgttgaaagagggagagtgaaagagtatgtgatgcaatggattggttcagaggtaaagaaggagagaccaagcagaagtgattggattgaggcggcagctttgtcttcttcgtcaagtaagaaacttgagaagaagactagcaagagactagattggtggttgtcattggaggaagaggatgagaataagaagaagaagaagcggaggatggttagagagtggtggaaagatgagtatcgtagagaactcgctaagaaaaggaagaagaagaagaagatgactttagaagccgagttttgtagtgatgatgggagtagtagtgtgagtcaatggcggcgtggtagtggtagtggtagcagcatagattggtggttagatgggttaagtggtgaacgatggttgagagcaaggggaaatagccatgactcggtgagcggtgagatagctaagagctgcggaattagtagcacgccgagcatgagagggactgtgtgctatgcagctcctgagtactgtaacttggacaacaacgtgtcagagaaatgtgatgtctatagctacggtgttctgttgttagttctgatttccgggaggcgcccgttggagatgacgggctccgcgagtgagatacaacgggcaaacctcatgtcttgggcgaggaagttggcgagaagaggaaaacttgttgatcttgtggatcaaaggttgcaaaacttagaccaagaacaagcagtgttgtgcataaaggtggctttgttgtgtctgcaaagattgccgatttcacgaccgtcaatgaaagaggtcttgggaatgcttaaaggagaagtgaatctaccagagttgcctagtgagttctcaccatcgccaccattaaagacaacgaggaagcagcgccgttgactaatt

SEQ ID NO: 147888 - DNA, 1277 bp, Arabidopsis thaliana landsberg
atggaattgctcctgatgcccaagaattctggtaggctcgaattggttcagtggccactttttcttctttccagcaaggtgagtttgttactttacctgcgtttgtattaaattcaacgttttattgtgatatctcgctagcctcattgctttccataaaatttacatatgaggttacgtatgagtgacaattattatttgataatctactgtagatattattggccaaagagattgcagctgagagtaattcgcaagaggagattctggagaggattgaaagggatgactatatgaagtatgctgttgaggaagtctatcacactctcaaacttgtcctaacagaaactctggaagccgaaggaaggctgtggtatggattttcggccctaaaatcacttacaacgttgttgctggataaaaagatgatatttatcgttaatttttttagggtggagagaatctatgaagatatccaaaccagcttaaaggagagaaatatacatcatgattttcagttgaacaagctctcccttgttatcacgagagtgactgcactcttgggaatcctggtattcgcattgccactgctaattattgtcagaaatgcctttatttaacggctcttaatgataatagtagttattttgatgatactggaagttagattattgtgaatttaaggcgttcttacctattattgggagaagggtgccatattttcttcaccctctatcaattggacggagttttattttgttattttcctagcatgatactttatatttgattttaaatttgcatggacagaaagaaaatgaaacaccggagcatgcaaaaggggctatcaaagcacttcaggatctctacgatgttatgcggcttgacatattgacttttaatatgaggtgcatacaaagttgatgatttgttttttaatgcaagaatccaatcgctcttttcttttccttgtttgatatgttttaaaattatgttgctctgtgtaggggtcattatgaaacgtggaacctgttaactcaagcctggaatgaaggtcggctttttacaaagttgaaatggcctaaagaccctgagctggtataatgatgattcttgttgtcaagcatattagtgcactcattctttttcgtcagtctgataattgtctttgatttgcagaaagcactcgtcaaaagattgtactctctatttactatcaaagattctgcagcgcatgttcctagaaatcttgaggcccagacgtagacttcaattct

SEQ ID NO: 147889 - DNA, 431 bp, Arabidopsis thaliana landsberg
caaatgcagaaaccatttgaggaagcaacttacgcgctcaaggtttgatttataagcgacattgtcgatacagacagtggagtccacatcattaagagaacagcttgaccttatctgatctgatagaaaatgtattgaaggtgcctgcttcgtttcccttctcttcttgaccagaagaacatagaagaagaagaataagaagaatttaactcaaggttattgttattgtggttttgattctgaatctgtctacgaatttgatacaactcaaacatatgataaaatcagacaagctatctcatttcttcttaaaggcttcataagcactccctgtcgtagacagtgacttgtataatcacatttcagtatctttgtcatggtcttactgcaacattctggcatcttgtgtgttgacattttgctcttaaact

SEQ ID NO: 147890 - DNA, 2208 bp, Arabidopsis thaliana landsberg
atggcagaaagagaggtcacaccaggaataagaattgaggaatacattggtagaaggaagaaacttgtggagcttctccctgagaatagtttagccatcatttcgtcagcccccgtgaagaggatgactgacgttgttccatatacgttcagacaagatgctgattatttgtatctaactggctgccagcaaccaggtggtgtggctgttttaagtgatgaacgcggtttatgcatgttcatgccggaatcaactcctaaggtatgatgatttcttagtacatgagtttttgtatacagagtggttttgatttctgtatagcagtttataagaattgatttgtcatgtaggatattgcttgggaaggagaagttgctggagttgatgcagcgtccgaggtcttcaaggcagatcaagcatatccgataagcaaattacccgaggtagcttatatttcttccctaagtggcctctcttttaaattttcctatgttgtagactttattacttttgtaacgcgagatttgttttatttttcacgttctttatgtacagattctttcagacatgataagacattcttcaaaagtgtttcataatgttcaatcggcctcgcaaagatacacaaacttggatgactttcaaaattcagcatctcttggcaaagtgaaaactctttcaagtttaacacatgagctgaggttaattaaatcacctgcagaactcaaattgatgagagagtctgcatcaattgcgtgccaggtattcctgtattccaacaaagccattgttatgcttagaaaatttctgtttttagcttttttagtacaactgagatgctagagagtaactggaaatttaaggtgttggagaaatttacaagagataatggggaaagttggttaagttgataacttttgcagacaattgtgtgtgtatatagtgaatttaatctcaagaattgatctgacaaagtgacgaacacacccataaaaagctcccaagccatggcctgatgggacaattttggttgagggtgttttattgtgattggaggctcatgaaagcaatgccttgctcaatgatatgtgaaagtgaatatattagaaattttacgtttgtcttgtggccaaagtgctaaggaaaaggaacatagagccaataaaacgtcatgaaccattttctacatatttgttgaaaataatagctattacagacaatgagcgtatggagtgattttgatcttttcatcctcagggtcttctgaaaacaatgttacattcaaaggggtttcctgatgaaggcatcttatcagcccaggttgaatatgagtgccgggtaagaggtgctcagcgaatggcgtaagtctcgacaattattccatgaataaatatgtgattcagggtctattacaataagtatttcctagtattcttattctagtgacaagaaaaatgacatgatttattcctcaggttcaatcctgtagtcggtggtggttcaaatgccagtgttattcactattcacgaaatgatcagcgtgtaagtttgacaaaaccctatttgattgctagtacagagatgttcctgaaaccagtatcttctttttataattatctgcagattaaagatggtgatcttgtcttgatggacatgggttgtgagttacatggttatgttagtgatcttactcggacatggccaccttgcggaaaattcagttctgttcaggttgatgtttctgctgtctcatctttcatctttttttgtctggtagttcaatattcttctgtttacgtttgtgctttgccggtggtgtttgtatgatgcaaccgagagttatcccttacttactatctcattctctactaccaaacttcttacttttttctgagatatacgtttcacaggctagctttttccttataatttttatttaggaattcttcagaatttggacatgtgcaggttacatagttttttttggtgaccttcgctcgatttcacaattatgttacacagatgaaaagtaactgtacagctgctttcttaaaactttctctatcaaaatattgacatttgtgttttttccaggaagagctatatgatcttatacttcagacaaacaaagaatgcataaaacaatgcaagcctggtacaaccatccgccaactaaacacatattcggtaattacaaacttatcttaa

SEQ ID NO: 147891 - DNA, 481 bp, Arabidopsis thaliana landsberg
gtcttacacaacaatccttcttacatttctaccaacaaaacacaaaacacaaacatagcattcaaaactttgaaaaatggcaccagctcctagtccaatcaattctcaacacgtggcggtgatcggagccggagcagccggtttagtagcagccagagagcttcgtcgtgaaggtcacaccgtcgttgtccttgaccgagagaaacaagtaggtggtctttgggtttacacacctgaaaccgagtccgacgagcttggtcttgacccgacccgacccatagtccactcgagcgtctacaagtctctccgaaccaatctccctagagaatgtatgggttacaaggatttccctttcgtgccacgtggcgatgatccgtcaagagactctagaaggtatccgagtcacagggaagttcttgcgtaccttcaagactttgctacagagtttaacatagaggagatgatccggttcgagactgag

SEQ ID NO: 147892 - DNA, 445 bp, Arabidopsis thaliana landsberg
tactatatagaatttactggaaccaaaaatctccagtggtcatcaaaagagaaaagattacaaaaccaaaagaaatacaaagaaaaacatatcacgatctcctcttttctttgttttcttctacctctcgaaaccatttactctccgtttttctttgtttgtttgtttgtttgaaaagaaacagataacaatggagaaaagcgggcgaaatctccgccgcttcatctctccatttcgcttaaatacgactagtccgatcagtcccacggcgacaagctttagcggtgaattaaaaaaaaaaaaaaaacgcattcttcaggattcgcttcttttatattatatacaaatacatattctagaagtcgatgattggttctccgattgtgagattgcgctccaccgtccatggtaagtggaagagtttcgctgtcacaaacttaaaaat

SEQ ID NO: 147893 - DNA, 3188 bp, Arabidopsis thaliana landsberg
atgagccaagagcaaccaaggaggccaagagagccagtcaaatacggggacgtttttgaagtctccggtgaactcgctgataagcccatagcacctgaggatgcaaagatgatgcaatccgcggagacacatgtgttcggccatactcagaaaggcggtccagctgcggtcatgcaatctgcagccaccaccaatatacgcggtggctttgtccatccaggtgacaaaactgagcttgtcgctgaacgaggcgccacagtggagcaaacggtccctgctgcaactgtcacaaccgaattcgtcggtggacaggtcacaagttgtttcgaaaagtactagtacttcttttcatatatccgttttttgttttggagtaatggtgaagctttaggtcgttggacaacacgttgaaccgaggcgtgtagtcgctgctgcgcgtacggacgaagaagctttgagtttacaaagtacaataacgattggagaagcactggaagcaactgtgaagacagctggaaacaaacctgtggatcaaagcgacgccgcagcgattcaagcggcagagatgagagcttccggtaccaacgtcattgctctagctggagtcgccgcttcagctcaatctgcagcggatcacaacgctaccgtagatcgtgacgagaggaaaatcaagcttcgtgatgttttgacggttaaaccctaattttcaaaacattttcatcaatgtttttgatgttttccttttaaagtagtggctaaatgttttcgaaccggatgaattatatagggtgcagcagggaagttatcggcagacagagctgtgacgagggaagatgccgagggagtggtgagcgcagagatgaggaataaccctaaattgtgtactcaccctggtggtgtagttgcttctcttaccgtcgctgctaggcttaacgagagagttgatatatgacaagacaaatccggcgagaggatcgatgatctttcttttcgttgtttgtatgtttgttcgtctctctttcacaacttaggaaacttgttatgtaaaatcgtctacagcttttggtcctttagccgatatgttagaaaatccggcggggagaggatggtgttcacaagcttgtgacatttaatcgactagcttttttgttcttttttgtatcttactgcttaaaaacttcccaaggatgatgttggaatgaataatggggactttttagtttgaagttaaaatccattctttagctgatttgctttgaactaataattcctaagagagttaacacttaccactactgatctatataaatgggatattcctccagtccaatggggtttgtgacaattaaaaatatctgagttttaaccaaaaaaaaccacaaatacagatacaacagtaaaacaaaaatccaaaagagaagagcgtttttactggaacaccttgagcataaccttccttcttattaccctcttccttgttatcatcctgcttccttatcctgatggttatacttagcttcagattctgtacgatctttcttcttcttgtccaatgtctcggatatatagcttcttcacaaactcttcgatcccttcctttatgcggtgcacatgtgggagtacgtctctgacgggtcttttgaccaacgcctagcctcctctcatgcaggagcatttcctcgattggctgaaaggtttaatggcgttgatgaccacagagcattcgctcacttgcacctcgagttcagttatattatatatgttgccatgttggagtaggtatgtattagctctcatctcatggcttcagaaatgttcagaacagctttgctcattgttgttatgttgtctcaatattgaaacgtggccaatgttgtacgaaacatggaaaaaagtatttaaacctaaatgacaaaactctatctcagtcggtctgaatcatcatcttgctaaggttgctataaacttggaaactgacacctgcctcttagtcacgtcattgacaaaatgacaagtgtcaaaatctcataatgttgctctcacactcatgcacctctcttatctttataggagttgttgtcacttttgtatgtaacacaaaacggaacataacataacaaaacagagagatgagtcaagaagaacaaccaaagcggccacaagagccagtcacttacggtgacgtttttgaagtctccggtgaactcgctgataagcctatagcgccggaggatgcaaacatgatgcaagcagcggagacacgtgtgtttggccacactcagaaaggcggtgcagcggcagtcatgcagtctgcagccactgctaataaacgcggtggctttgtccatccaggtgacacaactgatctcgacgctgaacgaggcgtcacagtggcgcaaactgacgtccctggtgcacgtgtcacaacagaattcgtcggtggacaggtcataactcaaatccagaattacatcttttttcttacgatcatgttttataatggtgaagatatatttgtcataggtcgttggacaatacgtcgagcctaggccagtggcgactgcggcagctccggaagcagaagttgtgggtttgagtttacaaagtgcaataacgattggagaagcattggaagcgactgtgcaaaccgctggaaacaaaccggtggatcaaagcgacgcagcagcgattcaagcggcagaggttagagcttgtggcactaatgtgattgctcctggtggaatcgccgcttctgctcaatcagcagcaaatcacaacgctaccatagaccgtgatgaggataaaatcaagctcattgatgttttggcggttaaaccccaattttaaaaacatcttcaatgtctcaatgttttagttttaagattgtctaaatgtgtttgaaccggatggcttattagggtgcgaccgggaagttagccgcagataaagctgtgaccaggcaggacgcagagggagtggtgagcgctgagctgaggaacaatcctaatttgtctactcaccctggtggtgtagcggcttctattactgccgccgctaggcttaacgagagagctgatatatgaaaaatcctgcgagagggagatgttttggttctgttgttcaaaaaagttcagtcataatgtaaaaaaatggtcactttccggttataaagttgaaatctaactcaa

SEQ ID NO: 147894 - DNA, 281 bp, Arabidopsis thaliana landsberg
cgagacttttcgtctctatccctatgcaacccacacaaataagcttccctgcgtcttcttctcagccactattatctccgccggcgaacaatttcaccgatggtggagctgggggattatgtcttacacggagaatcagagacagttccgtggtgacgcgagcagggcctagtacgagcagctacttgctcgcgttcgccattcctgctactcttatcgccgccactgtcttcacttcaatcaaaatcgctgacaaactcgacgaagatttccttgaggat

SEQ ID NO: 147895 - DNA, 826 bp, Arabidopsis thaliana landsberg
atgtgttatatgtcgtttagactatgaggatgacgaagacctgatactgctcccatgcaaacattcttaccactcggagtgcataaacaactggttgaagataaacaaggtatgtcttttatgaaaaataaacctgtagagaagctaaagtatatagttattgtagtcagctatgtggaacctgataaacccaagcagggagtctgtttgtagtctgtttttatcacttgacagataccgtttttgttaaggatagatgtattcacgttagaaaaaccgccacagctcctgatatttccataaaaattatctgtttatgagagggaactttatggtcagtacagactatctcatggttgttgagtttatggattgcatttatgcgtttcccgattgtgttcatcagcatcttcaaaaactgaggggttttgttgctaataagcagaaatttgaacttgttaattcattaggaagagtatctagagtatggtgaatcatctcatcagcttccatcacaattaggaagaagaacttttgtcaacattcatgtatgaacgagcttttggaattccattaacaagccaaaactgacacaatcttttgcaggtttgccccgtatgcagtgcagaagtttcaacttcgacctctggacaaagctgatgaggcaaaggaagaaagattcagaaagaatcataagctaagaacttcaaaaccttagctgcctgtttgtacacttcttataaacaaaataacatcatcagatttccttggatcctttaaaaaatctcaaagattggaacattctcaagcgtttttagtttttgca

SEQ ID NO: 147896 - DNA, 467 bp, Arabidopsis thaliana landsberg
tttggatgatgatgatgatgatgacgatgtaaaggaggttgattttttggtaaaatcaccaaaagaagattgtttggaggttaaggaagaagatgttggtgctgcagattcaagaaaggatgatggtgctgtcgacttgaaagaagacaagtatgtggaagaacatatgctcgaactgaatctcgggcaagagacagtgtcagaaatggtctctggggaagagcgaggtcctgttgagggacagccctggatgttgaggaaaataagaagaagaggatgaaaggtgggcatggaatggagactctcatgctggttctcatttccttcgccgttgcaatcatagtagtgccagggagggagacgaagataatcatatagaaggatccatggaaatgggagaagatgaaccaattgaagatgtcgaggaagaggaaactgaggaagatacagaaaagcatgaagggggg

SEQ ID NO: 147897 - DNA, 779 bp, Arabidopsis thaliana landsberg
gacatcgtcgtgtctctctctcgttgaatccttgttaatctttttcttcaatctctcgatctgatcgttatcgaaaccgcgcgattctaaccaagtccaggtgacaaatcagctctgctaaaatactcacaaagtctcgtgatcatattttgtggatcacatcattgtcttatttttggaattgcttatcctcgcactagttcactgatttgagatctgtgcagttaattttgtgctccatagcgattccatggcttctttaatgttatctctcggttccacttctctgttaccgcgcgagattaacaaggtacttttcgccgttctatcgagtatatggtagaaattacgcatcagtttattcaaaatcttacttttttgttttcgattaaacttgaacaggataagctaaagcttggaacttctgcttcgaacccgttcctaaaagcaaaggtactctcttttctttgttagtgctcgaatctgaaccatatgaacaattttgaatgacgttttagagtgttattagtctaataagtgtagtttgtatctgaaatttgtggattttggtttcagtcttttagcatagtgactatgacggttgcagtgaagccttctcgtttcgagggtataactatggctccaccagaccctattcttggagtcagtgaagcattcaaagctgacactaacgggatgaaactcaatctcggtgttggtgcttatcgtactgaggaactccagccttatgtgcttaatgtgttaaaaaggttggaact

SEQ ID NO: 147898 - DNA, 393 bp, Arabidopsis thaliana landsberg
atgagtaggtgggcaaattgggaatttcacatatcgttcgatgttcgagctggcattgtcatatctctcgcatcccttttcgacacggacgtgaacaaataccggcaagtcctatataaaggtcacttatcggaaatgttcataccttacatggatccaactgatgattggtatttcattacttatcttgattgtggcgattttggctgcggtcagtgcgccgtatctcttcagccatacactgattgtccagcgggtgcagtttttatggatggtatttttgctggtcaagatggaactcccgcaaaaatcccaaaagttatgtgcatttttgaaaaatatgctggagatatcatgtggcgacatacagaagctgaaattccaaacttagaa

SEQ ID NO: 147899 - DNA, 646 bp, Arabidopsis thaliana landsberg
gagtttctgtgaactgaaaaaaaaaatcaaatcttttttgagtttcaatctctgagagtttctatgaaacaatcgtcatggggttgcacaatcttcatccaattatctctatgtctcataatctatgtgtctctgcattcgggtcacccattcttcttctctagtgacgacggtgacaatgccacaccactagatcttcatttcatctccgttgccggaggtttcaggcatcttaaccaccaaactcgccttctccgtttggtttgtttccaatcttcttacgttttggttggaacatgaaaaattggtttcaatttatctagttatcgaattcattggtttcatggttaaagtctggttctttataatatttctagcttccccatgattcataatttgagttttattttactgaatttgtttctgtttgatcgttgaagatggagaaagttgcagaaacttacaaggccaaatttgttgtgagctcaagtgaacaaggagaagaagattcattcctgcaaaatgtaatcttccattttgggttacttggattgacaaaaaagttctgaatctctttagttcgaaagttagtatgagtaatgagtggtttgatctttttgcaggcgactcgactgtcttctacact

SEQ ID NO: 147900 - DNA, 1880 bp, Arabidopsis thaliana landsberg
agtttcgtgattgttttaaaagtctcagatgttattggaattataacttggcatgggacagagaaagctgttctcataaattcgctttacctccctgtcctagttgctatatcattacatccaccatgttagagatgatggagagatgctatctaacccccgggaccattttgaccatctttttccaccacttgttgaagctagatgctgttttacatggtgaaacagtccatccaacctctgttattggaggaaccccaccttccttttagaaagagacaaaaaaatcttactttgaagtttagtcttcatttttctctcttgaagatgcaagcggttttgggaccttattagggtagataaggcgtaaaaactagagttaagtatataatggttatattagtggcatataattagttactggactgttttctcacttgccaaagatatgggaaactgatgtaacagtaaaatctatctttgttgattgaatgatttgctgggagagttaaaaaaaatgcttatctgtctgattgaaacctttaaaagagattcttacaccatttttataaacttgtgttttcgccattatcttgatctactcccgtgtcatcttgataatttggtggtttacatgtgctttttcgagaaattggattttggcggtgatagaagaacctcctggacaagaaatcacgaggttcattttcaaatacgttgtacgggtgtttagaaatgtctttcctgcttagttaggagattaaaatccagtggagaagcaatttagaagtagggttctgtatacttgtgtggcattctatctgcagattagctgttgaggtagatgcaagacaagaccttactgtgttacctgcaattggttttagactgtttccgtttagcagtggtttgtgtgttttcatctttgagactatggcctggaagtttctgcccttttggttatgcagcgattctaatgagctgttgtctgtcttttctatgttacaggttatttcttcttggtttggataagtacgggaaaggtgattggcgtagatttctcgcaactttgtagtaacaagaacaccgacccaagtcgcgagccatgctcaaaagtatttcattcgtctaaattcaatgaacaaagacagaaggcgatcaagcattcacgacatcactagtgttggcaacgcagatgtctcaacgccacaaggaccaatcactggtcagaacaacagcaataacaacaacaacaacaacaacaacagttctcctgctgttgctggaggaggaaacaaatcagccaagcaagccgtctctcaagcaccacctggacctcctatgtatggaacacccgccataggtcagccagcagttggaacaccagtgaacctcccagctccacctcacatggcttatggagttcatgcggctccagtccctggctcagtggttcctggtgcagcaatgaacattggtcaaatgccgtacaccatgccgcgtacaccaacggctcataggtaactcgaaagcacttttgctgtcatagtgcactttgtttttaggtgtaagaaagaagatgtgtaaaggatttagtgaatattcaagcttgttccttgagtgagttttttttattacttaatttgtggggattttgtatgaggtccgaataagatattaagatgacatgattagtttccagactcgagaagcaaaaatactcctgtttgtatgtgaacacaataaagcctctgttatgagacttacaacaaagcaacattgtatatcttgttctcacattcaacaatctctttgaattatcaactgcaacgtgcaattccttattttgaagttgtaactcattttggatcttgtataat

SEQ ID NO: 147901 - DNA, 686 bp, Arabidopsis thaliana landsberg
ctcatgggctgctctgttcgctggaatctgtttcgctcttcttctctgtaacatccaagacgtcttcgacagttacatcttcaaacgaacggaatcaaccaatcaaaaaccaagcttgcctctgttttcgaagttattatcttctcttctctcgttgctacgatcatctccgtcgtgggtctgcttatagccggtgagcaacacgatttaagagggaaatgaatggattctcgaaagggaaaggttcttatgtgatggctatggttggtcaagctgtttcgtggcaggtctattgggttgggattgttggacttgtctactctgtttcgagcgtgttgtcgaatgtgatcagtgtcattacgtggccgattgtgtcggttcttgtggtgatcttcttcaatttcatggatgatgagtttgatgccttcaaaggtgttgccttggttactgccgtcttaagcgctgcagcttatttctttaggcttcacaaagacaatcgtatggcttattaggtttggattcttgaatctctaaagaaagtttttttatttcccttgattttttgtgtgtatatctaatcatatattctaggtgtttatcttgtgtaagtgtaagtgtgtaacagctttggttatagatgtaaatttgtatgttttacaatgaaaatgtttggaagtgtgcaatct
